United States Patent Application Publication US 2006/0134663 A1 - sequence listing, part 96

SEQ ID NO: 283629 - DNA, 1000 bp, Homo Sapiens
gagccaggcaggcaatccatggaccttgtggaacttgtgtctctttttcccacgctggctggacttgcaggactgcaggttccacctcgctgccccgttccttcatttcacgttgagctgtgcagagaaggcaagaaccttctgaagcattttcgattccgtgacttggaagaggatccgtacctccctggtaatccccgtgaactgattgcctatagccagtatccccggccttcagacatccctcagtggaattctgacaagccgagtttaaaagatataaagatcatgggctattccatacgcaccatagactataggtatactgtgtgggttggcttcaatcctgatgaatttctagctaacttttctgacatccatgcaggggaactgtattttgtggattctgacccattgcaggatcacaatatgtataatgattcccaaggtggagatcttttccagttgttgatgccttgagttttgccaaccatggatggcaaatgtgatgtgctcccttccagctggtgagaggaggagttagagctggtcgttttgtgattacccataatattggaagcagcctgagggctagttaatccaaacatgcatcaacaatttggcctgagaatatgtaacagccaaaccttttcgtttagtctttattaaaatttataattggtaattggaccagttttttttttaatttccctctttttaaaacagttacggcttatttactgaataaatacaaagcaaacaaactcaagttatgtcatacctttggatacgaagaccatacataataaccaaacataacattatacacaaagaatactttcattatttgtggaatttagtgcatttcaaaaagtaatcatatatcaaactaggcaccacactaagttcctgattattttgtttataatttaataatatatcttatgagccctatatattcaaaatattatgttaacatgtaatccatgtttctttttcc

SEQ ID NO: 283630 - DNA, 1000 bp, Homo Sapiens
ggtcaacaacacccgcccgccgcacgtgcagctgttgcgcaagccggtgctcacggccatggggctgctggcgctgctggatgaggagcagctctgggccgaagtgtcgcaggccgggaccgtcctggacagcaaccacacggtgggcgtcctggccagcgcccaccgcccccagggcccggccgacgcctggcgcgccgcggtgctgatctacgcgagcgacgacacccgcgcccaccccaaccgcagcgtcgcggtgaccctgcggctgcgcggggtgccccccggcccgggcctggtctacgtcacgcgctacctggacaacgggctctgcagccccgacggcgagtggcggcgcctgggccggcccgtcttccccacggcagagcagttccggcgcatgcgcgcggctgaggacccggtggccgcggcgccccgccccttacccgccggcggccgcctgaccctgcgccccgcgctgcggctgccgtcgcttttgctggtgcacgtgtgtgcgcgccccgagaagccgcccgggcaggtcacgcggctccgcgccctgcccctgacccaagggcagctggttctggtctggtcggatgaacacgtgggctccaagtgcctgtggacatacgagatccagttctctcaggacggtaaggcgtacaccccggtcagcaggaagccatcgaccttcaacctctttgtgttcagcccagacacaggtgctgtctctggctcctaccgagttcgagccctggactactgggcccgaccaggccccttctcggaccctgtgccgtacctggaggtccctgtgccaagagggcccccatccccgggcaatccatgagcctgtgctgagccccagtgggttgcacctccaccggcagtcagcgagctggggctgcactgtgcccatgctgccctcccatcaccccctttgcaatatatttttatattttattattttcttttatatcttggtaaaaaaaaaaaa

SEQ ID NO: 283631 - DNA, 1000 bp, Homo Sapiens; identical to SEQ ID NO: 115098

SEQ ID NO: 283632 - DNA, 1000 bp, Homo Sapiens; identical to SEQ ID NO: 115099

SEQ ID NO: 283633 - DNA, 1000 bp, Homo Sapiens
gagggctcagcgtgccagtgcgagaggaccactgagggctgcctgaacccgcggcgtgttgagtgtagtggtcgtggccggtgccgctgcaacgtatgcgagtgccattcaggctaccagctgcctctgtgccaggagtgccccggctgcccctcaccctgtggcaagtacatctcctgcgccgagtgcctgaagttcgaaaagggcccctttgggaagaactgcagcgcggcgtgtccgggcctgcagctgtcgaacaaccccgtgaagggcaggacctgcaaggagagggactcagagggctgctgggtggcctacacgctggagcagcaggacgggatggaccgctacctcatctatgtggatgagagccgagagtgtgtggcaggccccaacatcgccgccatcgtcgggggcaccgtggcaggcatcgtgctgatcggcattctcctgctggtcatctggaaggctctgatccacctgagcgacctccgggagtacaggcgctttgagaaggagaagctcaagtcccagtggaacaatgataatccccttttcaagagcgccaccacgacggtcatgaaccccaagtttgctgagagttaggagcacttggtgaagacaaggccgtcaggacccaccatgtctgccccatcacgcggccgagacatggcttggccacagctcttgaggatgtcaccaattaaccagaaatccagttattttccgccctcaaaatgacagccatggccggccggtgcttctgggggctcgtcggggggacagctccactctgactggcacagtctttgcatggagacttgaggagggcttgaggttggtgaggttaggtgcgtgtttcctgtgcaagtcaggacatcagtctgattaaaggtggtgccaatttatttacatttaaacttgtcagggtataaaatgacatcccattaattatattgttaatcaatcacgtgtatagaaaaaaaaataaaacttcaat

SEQ ID NO: 283634 - DNA, 1000 bp, Homo Sapiens; identical to SEQ ID NO: 220505

SEQ ID NO: 283635 - DNA, 1000 bp, Homo Sapiens; identical to SEQ ID NO: 115100

SEQ ID NO: 283636 - DNA, 1000 bp, Homo Sapiens; identical to SEQ ID NO: 115101

SEQ ID NO: 283637 - DNA, 1000 bp, Homo Sapiens; identical to SEQ ID NO: 220507

SEQ ID NO: 283638 - DNA, 1000 bp, Homo Sapiens
aaatatttggaggggtatttttgccctgagtccaagagggtcctttagtacctgaaaagtaacttggctttcattattagtactgctcttgtttcttttcacatagctgtctagagtagcttaccagaagcttccatagtggtgcagaggaagtggaaggcatcagtccctatgtatttgcagttcacctgcacttaaggcactctgttatttagactcatcttactgtacctgttccttagaccttccataatgctactgtctcactgaaacatttaaattttaccctttagactgtagcctggatattattcttgtagtttacctctttaaaaacaaaacaaaacaaaacaaaaaactccccttcctcactgcccaatataaaaggcaaatgtgtacatggcagagtttgtgtgttgtcttgaaagattcaggtatgttgcctttatggtttcccccttctacatttcttagactacatttagagaactgtggccgttatctggaagtaaccatttgcactggagttctatgctctcgcacctttccaaagttaacagattttggggttgtgttgtcacccaagagattgttgtttgccatactttgtctgaaaaattcctttgtgtttctattgacttcaatgatagtaagaaaagtggttgttagttatagatgtctaggtacttcaggggcacttcattgagagttttgtcttgccatactttgtctgaaaaattcctttgtgtttctattgacttcaatgatagtaagaaaagtggttgttagttatagatgtctaggtacttcaggggcacttcattgagagttttgtcaatgtcttttgaatattcccaagcccatgagtccttgaaaatattttttatatatacagtaactttatgtgtaaatacataagcggcgtaagtttaaaggatgttggtgttccacgtgttttattcctgtatgttgtccaattgttgacagttctgaagaattc

SEQ ID NO: 283639 - DNA, 1000 bp, Homo Sapiens; identical to SEQ ID NO: 115103

SEQ ID NO: 283640 - DNA, 1000 bp, Homo Sapiens
ctgcttgcactttgtaacatgtttacttttcagggcatcttagcttctattatagccacatccctttgaaacaagataactgagaatttaaaaataagaaaatacataagaccataacagccaacaggtggcaggaccaggactatagcccaggtcctctgatacccagagcattacgtgagccaggtaatgagggactggaaccagggagaccgagcgctttctggaaaagaggagtttcgaggtagagtttgaaggaggtgagggatgtgaattgcctgcagagagaagcctgttttgttggaaggtttggtgtgtggagatgcagaggtaaaagtgtgagcagtgagttacagcgagaggcagagaaagaagagacaggagggcaagggccatgctgaagggaccttgaagggtaaagaagtttgatattaaaggagttaagagtagcaagttctagagaagaggctggtgctgtggccagggtgagagctgctctggaaaatgtgacccagatcctcacaaccacctaatcaggctgaggtgtcttaagccttttgctcacaaaacctggcacaatggctaattcccagagtgtgaaacttcctaagtataaatggttgtctgtttttgtaacttaaaaaaaaaaaaaaaagtttggccgggtgcggtggctcacgcctgtaatcccagcactttgggaggccaaggtggggggatcacaaggtcactagatggcgagcatcctggccaacatggtgaaaccccgtctctactaaaaacacaaaagttagctgagcgtggtggcgggcgcctgtagtcccagccactcgggaggctgagacaggagaatcgcttaaacctgggaggcggagagtacagtgagccaagatcgcgccactgcactccggcctgatgacagagcgagattccgtcttaaaaaaaaaaaaaaaaaaagtttgtttttaaaaaaatctaaataaaataactttgccccctg

SEQ ID NO: 283641 - DNA, 1000 bp, Homo Sapiens; identical to SEQ ID NO: 220510

SEQ ID NO: 283642 - DNA, 1000 bp, Homo Sapiens
gcaaaaatggcttcactggatcaaataagccttctcaatccaccttgaagttgtccacattgcactgtcaaggtacagctctcctagacaagactcgctacacagagtgttaactgttacatcagtaactgcattattgaattgttcttaaacctgtaaaaaaaaattacctgtaccagtaattttaacataaagggttggatttaggaaattatttatttttaggtacattaggcaagagacctctacctagtagaaagtgtagtctatgaccactgccacacgtaaaaactatttgtcattgttacatggcataaatatgaagttgagagtgtttagaaatttttatagaaattttgacacagtaattttgtttgatgaatcttttaaaaaacagaggaggtattttgcatatctttttttcattttcgtaatttgtattgcattctataaaaatattagttcataacagatcagaaatttaaaataaggggctttttcctcaggtagtttgaaaaacacactctagagatgcactgttcaattcggtacgcactagccacatgtggctaaattaaaattaaataaaatgagaaatgtagtttctcagttgcactacgtttcaagttctcaatggctacgtcaagttctcaatggctacgtgtgactagtgcttaccatactggacagcacagacacagaatattttcatcaccacagaaagttctatctgttctattatagagacttttatgtatgccctatctggattctacttatttataatttaaggtaaacatctgaaagcacatttcagcctatttgcttagtgaaacattaagctgtagactgtaaactcctcgtgagtaggaaccctgtctcagtgcattttgttttcctgcttcctacctcaagatcttggcaatggtacactacaaatgtgctgagttagaattactctgaagttatgaaacatataatgaaaacaatttttccggcc

SEQ ID NO: 283643 - DNA, 1000 bp, Homo Sapiens
tgtgtttgtacgccttcgacctcatctacctcaatggagagtccctggtacgtgagcccctttcccggcgccggcagctgctccgggagaactttgtggagacagagggcgagtttgtcttcgccacctccctggacaccaaggacatcgagcagatcgccgagttcctggagcagtcagtgaaagactcctgcgaggggctgatggtgaagaccctggatgttgatgccacctacgagatcgccaagagatcgcacaactggctcaagctgaagaaggactaccttgatggcgtgggtgacaccctggacctggtggtgatcggcgcctacctgggccgggggaagcgggccggccggtacgggggcttcctgctggcctcctacgacgaggacagtgaggagctgcaggccatatgcaagcttggaactggcttcagtgatgaggagctggaggagcatcaccagagcctcaaggcgctggtgctgcccagcccacgcccttacgtgcggatagatggcgctgtgattcccgaccactggctggaccccagcgctgtgtgggaggtgaagtgcgctgacctctccctctctcccatctaccctgctgcgcggggcctggtggatagtgacaagggcatctcccttcgcttccctcggtttattcgagtccgtgaagacaagcagccggagcaggccaccaccagtgctcaggtggcctgtttgtaccggaagcaaagtcagattcagaaccaacaaggcgaggactcaggctctgaccctgaagatacctactaagccctcgccctcctagggcctgggtacagggcatgagttggacggaccccagggttattattgcctttgctttttagcaaatctgctgtggcaggctgtggattttgagagtcaggggaggggtgtgtgtgtgagggggtggcttactccggagtctgggattcatcccgtcatttctttcaataaataattattggatagct

SEQ ID NO: 283644 - DNA, 1000 bp, Homo Sapiens
ttctgtttttaaaatttaaaatatattgactttttgcccttcataggacaaagtaatatatgtgttggaattttaaaattgtgttgtcattggtaaatctgtcactgacttaagcgaggtataaaagtacgcagttttcatgtccttgccttaaagagctctctagtctaacggtcttgtagttagagatctaaatgacattttatcatgttttcctgcagcaggtgcatagtcaaatccagaaatatcacagctgtgccagtaataaggatgctaacaattaattttatcaaacctaactgtgacagctgtgatttgacacgttttaattgctcaggttaaatgaaatagttttccggcgtcttcaaaaacaaattgcactgataaaacaaaaacaaaagtatgttttaaatgctttgaagactgatacactcaaccatctatattcatgagctctcaatttcatggcaggccatagttctacttatctgagaagcaaatccctgtggagactataccactattttttctgagattaatgtactcttggagcccgctactgtcgttattgatcacatctgtgtgaagccaaagccccgtggttgcccatgagaagtgtccttgttcattttcacccaaatgaagtgtgaacgtgatgttttcggatgcaaactcagctcagggattcattttgtgtcttagttttatatgcatccttatttttaatacacctgcttcacgtccctatgttgggaagtccatatttgtctgcttttcttgcagcatcatttccttacaatactgtccggtggacaaaatgacaattgatatgtttttctgatataattactttagctgcactaacagtacaatgcttgttaatggttaatataggcagggcgaatactactttgtaacttttaaagtcttaaacttttcaataaaattgagtgagacttataggcccaaaaaaaaaaaaaaaaaaaaaaaaaaaaaaaaa

SEQ ID NO: 283645 - DNA, 1000 bp, Homo Sapiens
ggaacgcacaagattgggagaatcacagggctggatgccgcgggacctttgtttgagggaagtgcccccagcaatcgtctttctccagatgatgccaattttgtggatgccattcatacctttacgcgggagcacatgggcctgagcgtgggcatcaaacagcccataggacactatgacttctatcccaacgggggctccttccagcctggctgccacttcctagagctctacagacatattgcccagcacggcttcaatgccatcacccagaccataaaatgctcccacgagcgatcggtgcaccttttcatcgactccttgctgcacgccggcacgcagagcatggcctacccgtgtggtgacatgaacagcttcagccagggcctgtgcctgagctgcaagaagggccgctgcaacacgctgggctaccacgtccgccaggagccgcggagcaagagcaagaggctcttcctcgtaacgcgagcccagtcccccttcaaagtttatcattaccagttaaagatccagttcatcaaccaaactgagacgccaatacaaacaacttttaccatgtcactactcggaacaaaagagaaaatgcagaaaattcccatcactctgggcaaaggaattgctagtaataaaacgtattcctttcttatcacgctggatgtggatatcggcgagctgatcatgatcaagttcaagtgggaaaacagtgcagtgtgggccaatgtctgggacacggtccagaccatcatcccatggagcacagggccgcgccactcaggcctcgttctgaagacgatcagagtcaaagcaggagaaacccagcaaagaatgacattttgttcagaaaacacagatgacctactacttcgcccaacccaggaaaaaatcttcgtgaaatgtgaaataaagtctaaaacatcaaagcgaaagatcagatgagatttaatgaagacccagtgtaaagaataaatgaatcttactcctt

SEQ ID NO: 283646 - DNA, 1000 bp, Homo Sapiens
gtctcttttgttcctggctttgacatgaaaagataggtttgagttcaaattttgcattgtgtgagcttctacagattttagacaaggaccgtttttactaagtaaaagggtggagaggttcctggggtggattcctaagcagtgcttgtaaaccatcgcgtgcaatgagccagatggagtaccatgagggttgttatttgttgtttttaacaactaatcaagagtgagtgaacaactatttataaactagatctcctatttttcagaatgctcttctacgtataaatatgaaatgataaagatgtcaaatatctcagaggctatagctgggaacccgactgtgaaagtatgtgatatctgaacacatactagaaagctctgcatgtgtgttgtccttcagcataattcggaagggaaaacagtcgatcaagggatgtattggaacatgtcggagtagaaattgttcctgatgtgccagaacttcgaccctttctctgagagagatgatcgtgcctataaatagtaggaccaatgttgtgattaacatcatcaggcttggaatgaattctctctaaaaataaaatgatgtatgatttgttgttggcatcccctttattaattcattaaatttctggatttgggttgtgacccagggtgcattaacttaaaagattcactaaagcagcacatagcactgggaactctggctccgaaaaactttgttatatatatcaaggatgttctggctttacattttatttattagctgtaaatacatgtgtggatgtgtaaatggagcttgtacatattggaaaggtcattgtggctatctgcatttataaatgtgtggtgctaactgtatgtgtctttatcagtgatggtctcacagagccaactcactcttatgaaatgggctttaacaaaacaagaaagaaacgtacttaactgtgtgaagaaatggaatcagcttttaataaaattgacaacattttattaccac

SEQ ID NO: 283647 - DNA, 1000 bp, Homo Sapiens
tcttcagctcattttgtctctctcacattaagggagtaggaattaagtgaaaggtcacactaccattatttccccttcaaacaaataatatttttacagaagcaggagcaaaatatggcctttcttctaagagatataatgttcactaatgtggttattttacattaagcctacaacatttttcagtttgcaaatagaactaatactggtgaaaatttacctaaaaccttggttatcaaatacatctccagtacattccgttcttttttttttttgagacagtctcgctctgtcgcccaggctggagtgcagtggcgcaatctcggctcactgcaacctccacctcccgggttcacgccattctcctgcctcagcctcccgagtagctgggattacgggcgcccgccaccacgcccggctaattttttgtatttttagtagagacagggtttcaccgtgttagccaggatggtctcgatctcctgaccttgtgatccacccacctcggcctcccaaagtgctgggattacaggcgtgagccactgcgcccggccacattcagttcttatcaaagaaataacccagacttaatcttgaatgatacgattatgcccaatattaagtaaaaaatataagaaaaggttatcttaaatagatcttaggcaaaataccagctgatgaaggcatctgatgccttcatctgttcagtcatctccaaaaacagtaaaaataaccactttttgttgggcaatatgaaatttttaaaggagtagaataccaaatgatagaaacagactgcctgaattgagaattttgatttcttaaagtgtgtttctttctaaattgctgttccttaatttgattaatttaattcatgtattatgattaaatctgaggcagatgagcttacaagtattgaaataattactaattaatcacaaatgtgaagttatgcatgatgtaaaaaatacaaacattctaattaaaggctttgcaacac

SEQ ID NO: 283648 - DNA, 1000 bp, Homo Sapiens; identical to SEQ ID NO: 115104

SEQ ID NO: 283649 - DNA, 1000 bp, Homo Sapiens
atttgttgatgcttgtgtcaaacagtacactatcttaattattgtacatttatagttgtaactgtagtccagctttgttcttcttcaagtcaagatttccatataaatattagaaacagtttctcaatttctacaaaatcctgatgaggtttctactgggaccacattgagtctatcaatcaacttatgcagaactggcaacttactactgaatctctaatcaatgttcatcatgtatcgcttcatttaactaggatttctctaacttaattgctatgttttgagatttttagtttaaaaaccttgtatatcttgttttggtggttttagtgattttaataatatattttaaatattttttcttttctattgttgtacacagaaatacagttaagttttgtgtgtagtcttacgatgtttagtaacctcaataagtttatttcttaaatctagtaatttgtagattcctctggattttgtatatgcatagtcatgtaagctgaaaatatggcaatacttgcttcttcccaattgctttaccttttttcttaccttattgcactggttagcaaccccaatacagagaccaccagagcaggtatagactcctgaaagacaatataatgaagtgctccagtcaggcctatctaaactggattcacagctctgtcacttaattgctacatgatctagagccagttactttgtgtttcagccatgtatttgcagctgagagaaaataatcattcttatttcatgaaaattgtggggatgatgaaataagttaacacctttaaagtgtgtagtaaagtatcaggatactatattttaggtcttaatacacacagttatgccgctagatacatgctttttaatgagataatgtgatattatacataacacatatcgatttttaaaaattaaatcaaccttgctttgatggaataaactccatttagtcacaaaaaaaaaaaaaaaaaaaaaaaaaaaaaaaaaaaaa

SEQ ID NO: 283650 - DNA, 1000 bp, Homo Sapiens
gtgcccacggagcctacccgattatagcagaggtaagttaggaacgaacatgttagtcaatccgggtgaagacatgtactgatgacacaccatggatttcagaggaggaagtacggagtcgttgcataatccgcccctggtgggtggcactctcaggtgctcctgaacagaagatttggccctcattttccctcagaaccccacggcaaggatatatgtccccttgttctctctgcttctgtcttgaggatatgggaagcctagagaaacgcaagcagactggattgggatagaagtatttgtgtacctggattaatgaactatgattttttttttttttttttgagaccaaatcttgctctgtggcccaggctggagtgcagtggcacgatctcagctcactgcaacctccacctcccaggttcaagcgattctcctgcctcagcctcctgagcagctgggattacaggtgcgtgccaccacaccaggctggttttcttgtatttttagtagagacgggggtttcaccatgttagccaggctggtctcgaactcctgacctcaggtgatccacccgcctcagcctcccaaagtgctgggattacaggcatgagccactgtgcccggcctatgattcttttttttttttttttttgagacaaagttttgctcttgtcacccaggctggagtgcagtggtgcaatcttggctcactgcaacctccgcctcccaggttcaagagattctcctgcctcagcctccgaagtagctgggattacaggcgcccgccaccatgcccggctaattttttgcatttttagtagacatgaggtttcatcatgttggccaggccggtctcaaactcctgacctcaggtgatgcacccacctcagcctcccaaagtgcagggattacaggcatgagccaccatgcctggccatgattcttaagagaattgactgggcctcatgaataaaaaaattagaaaatctaaaaaaaa

SEQ ID NO: 283651 - DNA, 1000 bp, Homo Sapiens
ttgcattagggtgtgttttatgttaagcaaaacatactttagaaacaaatgaaaaaggcaattgaaaatcccagctatttcacctagatggaatagccaccctgagcagaactttgtgatgcttcattctgtggaattttgtgcttgctactgtatagtgcatgtggtgtaggttactctaactggttttgtcgacgtaaacatttaaagtgttatattttttataaaaatgtttatttttaatgatatgagaaaaattttgttaggccacaaaaacactgcactgtgaacattttagaaaaggtatgtcagactgggattaatgacagcatgattttcaatgactgtaaattgcgataaggaaatgtactgattgccaatacaccccaccctcattacatcatcaggacttgaagccaagggttaacccagcaagctacaaagagggtgtgtcacactgaaactcaatagttgagtttggctgttgttgcaggaaaatgattataactaaaagctctctgatagtgcagagacttaccagaagacacaaggaattgtactgaagagctattacaatccaaatattgccgtttcataaatgtaataagtaatactaattcacagagtattgtaaatggtggatgacaaaagaaaatctgctctgtggaaagaaagaactgtctctaccagggtcaagagcatgaacgcatcaatagaaagaactcggggaaacatcccatcaacaggactacacacttgtatatacattcttgagaacactgcaatgtgaaaatcacgtttgctatttataaacttgtccttagattaatgtgtctggacagattgtgggagtaagtgattcttctaagaattagatacttgtcactgcctatacctgcagctgaactgaatggtacttcgtatgttaatagttgttctgataaatcatgcaattaaagtaaagtgatgcaacatcttgtaaaaaaaaaaaaaaaaaaaa

SEQ ID NO: 283652 - DNA, 1000 bp, Homo Sapiens; identical to SEQ ID NO: 115105

SEQ ID NO: 283653 - DNA, 1000 bp, Homo Sapiens
cttgcattccctccaggagattagggtctgtgagatccatgaagacaacagcaccaggagctcccagcatttctactacgatggggagctcttcctctcccaaaacctggagactaaggaatggacaatgccccagtcctccagagctcagaccttggccatgaacgtcaggaatttcttgaaggaagatgccatgaagaccaagacacactatcacgctatgcatgcagactgcctgcaggaactacggcgatatctaaaatccggcgtagtcctgaggagaacagtgccccccatggtgaatgtcacccgcagcgaggcctcagagggcaacattaccgtgacatgcagggcttctggcttctatccctggaatatcacactgagctggcgtcaggatggggtatctttgagccacgacacccagcagtggggggatgtcctgcctgatgggaatggaacctaccagacctgggtggccaccaggatttgccaaggagaggagcagaggttcacctgctacatggaacacagcgggaatcacagcactcaccctgtgccctctgggaaagtgctggtgcttcagagtcattggcagacattccatgtttctgctgttgctgctgctgctatttttgttattattattttctatgtccgttgttgtaagaagaaaacatcagctgcagagggtccagagctcgtgagcctgcaggtcctggatcaacacccagttgggacgagtgaccacagggatgccacacagctcggatttcagcctctgatgtcagatcttgggtccactggctccactgagggcgcctagactctacagccaggcagctgggattcaattccctgcctggatctcacgagcactttccctcttggtgcctcagtttcctgacctatgaaacagagaaaataaaagcacttatttattgttgttggaggctgcaaaatgttagtagatatgaggcgtttgcagctgtaccatatt

SEQ ID NO: 283654 - DNA, 1000 bp, Homo Sapiens; identical to SEQ ID NO: 220511

SEQ ID NO: 283655 - DNA, 1000 bp, Homo Sapiens
gggagaacgagggtgtgttcagcatgcagcagcgacaggccctggcccagatctcattgccccggatcatctgcgacaacacaggcatcaccaccgtgtctaagaacaacatcttcatgtccaactcatatccccgggactttgtcaactgcagtacacttcctgcattgaacctggcttcctggagggaagcctcctagaggccaggtaagggggtgcagcagtgaggggtatatctgggctggccagttggaaccacggagatctccttgccctagatgagcccagccctgttctgggtgcagctgagaaaatgagtgactagacgttcatttgtgtgctcatgtatgtgcgaagtatataaattggcttttcatgcgtgtgtgttgtctgaacatggggagtgtttcatgggttatgtgtatgtgccatttatgtgagtgtgtgtttgtgctgatgagaatactgagtatgtggaaggcagcagagcggactggtgaggagcacagctcaggaactagactgcctgggttccaatcctggctctgtggcttgctagctatgtgaccttgagcaaattaccctccttaaacaagagttttcttccttgtaaattacatctgtcatggtttcttggagggcccacttgtatcctctggttcttcatttattgagcacctactacatgcaaggcactgtactaggcgtgagaagcatatagaggcaagaaagagataccaagatgccatctgtgtcctggttagcagagctggaccagtggtgccttggagggataagccagctgcagctgggctgtgtggttgacttatgggcccagccagccaggctcaggccatggctcccctttttcttcctcaccctgatttcttgcttattcactgaagttctcctgaagaggaactgggcctgttgccctttctgtaccatttatttgctcccaatgtttatgataataaaggcaccgctgatggggacctcc

SEQ ID NO: 283656 - DNA, 1000 bp, Homo Sapiens; identical to SEQ ID NO: 220512

SEQ ID NO: 283657 - DNA, 1000 bp, Homo Sapiens
aatagctgtatagatgagtttttcattatttggaaatttaggggtagaaaatgttttcccctaattttccagagaagcctatttttatatttttaaaaaactgacagggcccagttaaatatgatttgcattttttaaatttgccagttttattttctaaattctttcatgagcttgcctaaaattcggaatggttttcgggttgtggcaaaccccaaagagagcactgtccaaggatgtcgggagcatcctgctgcttaggggaatgttttcgcaaatgttgctctagtcagtccagctcatctgccaaaatgtagggctaccgtcttggatgcatgagctattgctagagcatcatccttagaaatcagtgccccagatgtacatgtgttgagcgtattcttgaagtattgtgtttatgcatttcaatttcaatggtgttggcttcccctccccaccccacgcgtgcataaaaactggttctacaaatttttacttgaagtaccaggccgtttgctttttcaggttgttttgttttatagtattaagtgaaattttaaatgcacagttctatttgctatctgaactaattcatttattaagtatatttgtaaaagctaaggctcgagttaaaacaatgaagtgttttacaatgatttgtaaaggactatttataactaatatggttttgttttcaatgaattaagaaagattaaatatatctttgtaaattattttatgtcatagtttaattggtctcccaagtaagacatctcaaatacagtagtataatgtatgaattttgtaagtataagaaattttattagacattctcttactttttgtaaatgctgtaaatatttcataaattaacaaagtgtcactccataaaaagaaagctaatactaatagcctaaaagattttgtgaaatttcatgaaaactttttaatggcaataatgactaaagacctgctgtaataaatgtattaactgaaacct

SEQ ID NO: 283658 - DNA, 1000 bp, Homo Sapiens
gtggtatcgtgagtctaaaacccgagtgaaaaatagggtgactgtggtaataaccactgacatcacagtggactcctcttttgtgaaagctggcctggaaaccagtacagaaacagaagcaggcttggagtttatctccacagtgcagttttctcagtacccattcttagtttgcatgcagatggacaaggatgaagctccattcaggcaatttgagaaaaagtacgaaaggctgtccacaggcagaggttatgtctctcagaaaagaaaagaaagcgtattagcaggatgtgaattcccgctccatcaagagaactcagagatgtgcaaagtggtgtttgcccctcagccggatagtacttccagcggatggttttgaaactgacctgtgatattttacttgaatttgtctccccgaaagggacacaatgtggcatgactaagtacttgctctctgagagcacagcgtttacatatttacctgtatttaagatttttgtaaaaagctacaaaaaactgcagtttgatcaaatttgggtatatgcagtatgctacccacagcgtcattttgaatcatcatgtgacgctttcaacaacgttcttagtttacttatacctctctcaaatctcatttggtacagtcagaatagttattctctaagaggaaactagtgtttgttaaaaacaaaaataaaaacaaaaccacacaaggagaacccaattttgtttcaacaatttttgatcaatgtatatgaagctcttgataggacttccttaagcatgacgggaaaaccaaacacgttccctaatcaggaaaaaaaaaaaaaaaaaaaagtaagacacaaacaaaccatttttttctctttttttggagttgggggcccagggagaagggacaaggcttttaaaagacttgttagccaacttcaagaattaatatttatgtctctgttattgttagttttaagccttaaggtagaaggcacatagaaataacatc

SEQ ID NO: 283659 - DNA, 1000 bp, Homo Sapiens; identical to SEQ ID NO: 115107

SEQ ID NO: 283660 - DNA, 1000 bp, Homo Sapiens
gaacataaagcgaatgatcgaatggtgagtggagcatatcgccaggaatttggagaaagtaaagagataacatctgctatcaagagggttcataaattcatggaacgtgaaggtcgcagacctcgtcttcttgtagcaaaaatgggacaagatggccatgacagaggagcaaaagttattgctacaggatttgctgatcttggttttgatgtggacataggccctcttttccagactcctcgtgaagtggcccagcaggctgtggatgcggatgtgcatgctgtgggcgtaagcaccctcgctgctggtcataaaaccctagttcctgaactcatcaaagaacttaactcccttggacggccagatattcttgtcatgtgtggaggggtgataccacctcaggattatgaatttctgtttgaagttggtgtttccaatgtatttggtcctgggactcgaattccaaaggctgccgttcaggtgcttgatgatattgagaagtgtttggaaaagaagcagcaatctgtataatatcctctttttgttttagcttttgtctaaaatattattttagttatgatcaaagaagagagtaaagctatgtcttcaatttaatttcaatacctgatttgtactttccttgaaagctttactttaaaataccttacttataggcctggtgtcatgctataagtatgtacatacagtttcacttcaaaaataaaaaaaaatccctaaaaactctctatactctctataacaatactttatcaagaactctggacaatggtattatttttaaaaatcatggtgatgtatttattagaatgtttcttataaatctctttcatttttatattaagaattaaactgtacctaaaaaaactctgactattcccatttctcagtttagcattacattgtcttgagcaccagaaaataaaatccatatattaattaaaacctatcttgaaaaaaaaaaaaaaaaaaaaaaaaaaaa

SEQ ID NO: 283661 - DNA, 1000 bp, Homo Sapiens
acgctggtgctgcaggttgttgacaagccaagtcctccccaggatctccgggtgactgacgcctggggtcttaatgtggctctggagtggaagccaccccaggatgtcggcaacacggaactctgggggtacacagtgcagaaagccgacaagaagaccatggagtggttcaccgtcttggagcattaccgccgcacccactgcgtggtgccagagctcatcattggcaatggctactacttccgcgtcttcagccagaatatggttggctttagtgacagagcggccaccaccaaggagcccgtctttatccccagaccaggcatcacctatgagccacccaactataaggccctggacttctccgaggccccaagcttcacccagcccctggtgaaccgctcggtcatcgcgggctacactgctatgctctgctgtgctgtccggggtagccccaagcccaagatttcctggttcaagaatggcctggacctgggagaagacgcccgcttccgcatgttcagcaagcagggagtgttgactctggagattagaaagccctgcccctttgacgggggcatctatgtctgcagggccaccaacttacagggcgaggcacggtgtgagtgccgcctggaggtgcgagtgcctcagtgaccaggctggctcctggggatggccaggtacaaccggatgccagccccgtgccaggagcctggagggaagttggggaaacccctccctactgttggatgtatgtgtgacaagtgtgtctcctgtgctgcgatgggggatcagcagggcagttgtcgggcagtcctgagtgggtgttgcacagactggtccacagggctcctgaaggaagcccctggatctttggggtaaaaggagggtggcctcaagaaacaatgtctggggacaggcctttctggcctgctatgtcttcccaatgtttattgggcaataaaagataagtgcagtcacagagaactcactcttc

SEQ ID NO: 283662 - DNA, 1000 bp, Homo Sapiens
gcaagtcaagagcctccagagcttgttgaaggacacccagattcagctggacgatgcagtccgtgccaacgacgacctgaaggagaacatcgccatcgtggagcggcgcaacaacctgctgcaggctgagctggaggagttgcgtgccgtggtggagcagacagagcggtcccggaagctggcggagcaggagctgattgagactagtgagcgggtgcagctgctgcattcccagaacaccagcctcatcaaccagaagaagaagatggatgctgacctgtcccagctccagactgaagtggaggaggcagtgcaggagtgcaggaatgctgaggagaaggccaagaaggccatcacggatgccgccatgatggcagaggagctgaagaaggagcaggacaccagcgcccacctggagcgcatgaagaagaacatggaacagaccattaaggacctgcagcaccggctggacgaagccgagcagatcgccctcaagggcggcaagaagcagctgcagaagctggaagcgcgggtgcgggagctggagaatgagctggaggccgagcagaagcgcaacgcagagtcggtgaagggcatgaggaagagcgagcggcgcatcaaggagctcacctaccagacggaggaggacaggaaaaacctgctgcggctgcaggacctggtagacaagctgcagctaaaggtcaaggcctacaagcgccaggccgaggaggcggaggagcaagccaacaccaacctgtccaagttccgcaaggtgcagcacgagctggatgaggcagaggagcgggcggacatcgccgagtcccaggtcaacaagctgcgggccaagagccgtgacattggcacgaagggcttgaatgaggagtagctttgccacatcttgatctgctcagccctggaggtgccagcaaagccccatgctggagcctgtgtaacagctccttgggaggaagcagaataaagcaattttccttgaagccga

SEQ ID NO: 283663 - DNA, 1000 bp, Homo Sapiens; identical to SEQ ID NO: 220513

SEQ ID NO: 283664 - DNA, 1000 bp, Homo Sapiens; identical to SEQ ID NO: 115108

SEQ ID NO: 283665 - DNA, 1000 bp, Homo Sapiens
cacccggacgcaggggcagcgtggaggctactgctccggagtgtgtacaactgctccggggaggcctgcaggggccacaatcgtagcccgctggtcaggcggccgtccctacagatgaataccagcatctggtacaaccgatctgatgtgtttgaggcctggcggctgctgctcacatctgctccctccctggccaccagccccgccttccgctacgacctgctggacctcactcggcaggcagtgcaggagctggtcagcttgtactatgaggaggcaagaagcgcctacctgagcaaggagctggcctccctgttgagggctggaggcgtcctggcctatgagctgctgccggcactggacgaggtgctggctagtgacagccgcttcttgctgggcagctggctagagcaggcccgagcagcggcagtcagtgaggccgaggccgatttctacgagcagaacagccgctaccagctgaccttgtgggggccagaaggcaacatcctggactatgccaacaagcagctggcggggttggtggccaactactacacccctcgctggcggcttttcctggaggcgctggttgacagtgtggcccagggcatccctttccaacagcaccagtttgacaaaaatgtcttccaactggagcaggccttcgttctcagcaagcagaggtaccccagccagccgcgaggagacactgtggacctggccaagaagatcttcctcaaatattacccccgctgggtggccggctcttggtgatagattcgccaccactgggccttgttttccgctaattccagggcagattccagggcccagagctggacagacatcacaggataacccaggcctgggaggaggccccacggcctgctggtggggtctgacctggggggattggagggaaatgacctgccctccaccaccacccaaagtgtgggattaaagtactgttttctttccacttaaaaaaaaaaaaaaaaaa

SEQ ID NO: 283666 - DNA, 1000 bp, Homo Sapiens; identical to SEQ ID NO: 115109

SEQ ID NO: 283667 - DNA, 1000 bp, Homo Sapiens
cttggatgaagaagtacttactgatccgaagatccaggcgctgcttcttactgttctagctacactggtaaaatataccacagatgagtttgatcaacgaattctttatgaatacttagcagaggccagtgttgtgtttcccaaagtctttcctgttgtgcataatttgttggactctaagatcaacaccctgttatcattgtgccaagatccaaatttgttaaatccaatccatggaattgtgcagagtgtggtgtaccatgaagaatccccaccacaataccaaacatcttacctgcaaagttttggttttaatggcttgtggcggtttgcaggaccgttttcaaagcaaacacaaattccagactatgctgagcttattgttaagtttcttgatgccttgattgacacgtacctgcctggaattgatgaagaaaccagtgaagaatccctcctgactcccacatctccttaccctcctgcactgcagagccagcttagtatcactgccaaccttaacctttctaattccatgacctcacttgcaacttcccagcattccccaggaatcgacaaggagaacgttgaactctcccctaccactggccactgtaacagtggacgaactcgccacggatccgcaagccaagtgcagaagcaaagaagcgctggcagtttcaaacgtaatagcattaagaagatcgtgtgaagcttgcttgctttcttttttaaaatcaacttaacatgggctcttcactagtgaccccttccctgtccttgccctttccccccatgttgtaatgctgcacttcctgttttataatgaacccatccggtttgccatgttgccagatgatcaactcttcgaagccttgcctaaatttaatgctgccttttctttaactttttttcttctacttttggcgtgtatctggtatatgtaagtgttcagaacaactgcaaagaaagtgggaggtcaggaaacttttaactgagaaat

SEQ ID NO: 283668 - DNA, 1000 bp, Homo Sapiens; identical to SEQ ID NO: 115110

SEQ ID NO: 283669 - DNA, 1000 bp, Homo Sapiens
tggagcgcgcggaagaggcacttgcccacatgggcagctccgtgttcagtggaatcacacttacaaaatttggagggattgtggtgttggcttttgccaaatctcaaattttccagatattctacttcaggatgtatttggccatggtcttactgggagccactcacggattaatatttctccctgtcttactcagttacatagggccatcagtaaataaagccaaaagttgtgccactgaagagcgatacaaaggaacagagcgcgaacggcttctaaatttctagccctctcgcagggcatcctgactgaactgtgtctaagggtcggtcggtttaccactggacgggtgctgcatcggcaaggccaagttgaacaccggatggtgccaaccatcggttgtttggcagcagctttgaacgtagcgcctgtgaactcaggaatgcacagttgacttgggaagcagtattactagatctggaggcaaccacaggacactaaacttctcccagcctcttcaggaaagaaacctcattctttggcaagcaggaggtgacactagatggctgtgaatgtgatccgctcactgacactctgtaaaggccaatcaatgcactgtctgtcctctcctttttaggagtaagccatcccacaagttctataccatatttttagtgacagttgaggttgtagatacactttataacattttatagtttaaagagctttattaatgcaataaattaactttgtacacatttttatataaaaaaacagcaagtgatttcagaatgttgtaggcctcattagagcttggtctccaaaaatctgtttgaaaaaagcaacatgttcttcacagtgttcccctagaaaggaagagatttaattgccagttagatgtggcatgaaatgagggacaaagaaagcatctcgtaggtgtgtctactgggttttaacttatttttctttaataaaatacattgttttcctaaaaaaaaaa

SEQ ID NO: 283670 - DNA, 1000 bp, Homo Sapiens
acttaattcagtctgatacttgaatgtgatttacccctaattaagtacaaaaacagagtcgcttttgccttttcaaatcaagaaaataagtgctctgtcaaaagcacaaaaagaaactttcaggcactggagagtggagtcgactcaccctttcaggccttgttgcatctcagataaacctgtgactgctggtaaaataatgtcccaagcctttccttttagtgataaacagtagcagcctgcgttaattgagcacctactgtgtgtctgagcatttctcattagcccagttaatcctcacacctactgtaggagataggtactgttgttttttattaccgccgaagaaacaggccagataagtgaagtaatttgcctaaggtcacagctaataagtggcacagctaatattcccagtaaagataccatgtataattttctacaacctaagatgttctgccttatcggggcgaaccttttaggattccatgtgaaaataaaatatgaggaaaagtttaacctaaataattagaatcccattagaggtacttttttttgatggcatgctgccttaaaagagccatttatttttagagatctgtcatattatgaaagttctgggctatcttagctaacttatcctaaacccttaacctaaatttaacttgagccccagtctcagaaattaacatggtatgaaggtgtttccaggccaggcgcggtggctcacgcctgtaatcccaacactttgggaggccgaggtgggtggatcacctgaggtcaggagtttgagaccagcctggccaacactatctgtactaaaaacacaaaattagctgggcgtggtagtgcgtgcctgtaatcccagctacttgggaggctgaggtagaagaattgtttgaacctgggaggtggaggttgcagtgagccaagatcgtgccattgcactccagcctaggcaacaagagtgaaactccatctcaaaaaaaaaaaaaaaaaa

SEQ ID NO: 283671 - DNA, 1000 bp, Homo Sapiens
ggtgtgagcggggcctggaccacgccatcccccactatgtcaccatgtacctgcccctgctgctggttctcgtggcgaaccccatcctgttccaaaagacagtgactgcagtggcctctttacttaaaggaagacaaggcatttacacggagaacgagaggaggatgggagccgtgatcaagatccgatttttcaaaatcatgctggttttaattatttgttggttgtcgaatatcatcaatgaaagccttttattctatcttgagatgcaaacagatatcaatggaggttctttgaaacctgtcagaactgcagccaagaccacatggtttattatgggaatcctgaatccagcccagggatttctcttgtctttggccttctacggctggacaggatgcagcctgggttttcagtctcccaggaaggagatccagtgggaatcactgaccacctcggctgctgagggggctcacccatccccactgatgccccatgaaaaccctgcttccgggaaggtgtctcaagtgggtgggcagacttctgacgaagccctgagcatgctgtctgaaggttctgatgccagcacaattgaaattcacactgcaagtgaatcctgcaacaaaaatgagggtgaccctgctctcccaacccatggagacctatgaaggggatgtgctgggggtccagaccccatattcctcagactcaacaattcttgttctttagaactgtgttctcaccttcccaacactgcactgccgaagtgtagcggcccccaaaccttgctctcatcaccagctagagcttcttcccgaagggcctttaggataggagaaagggttcatgcacacacgtgtgagaatggaagagccccctccagaccactctacagctgctctagccttagttgccactaggaagttttctgaggctggctgtaaagtaagtgtaaggtccacatccttggggaagtagttaaataaaatagttatgactg

SEQ ID NO: 283672 - DNA, 1000 bp, Homo Sapiens
gtccacatacggtggcaatccactaggctgccgagtggccatcgcagcccttgaggttttagaagaagaaaaccttgctgaaaatgcagacaaattgggcattatcttgagaaatgaactcatgaagctaccttctgatgttgtaactgccgtaagaggaaaaggattattaaacgctattgtcattaaagaaaccaaagattgggatgcttggaaggtgtgtctacgacttcgagataatggacttctggccaagccaacccatggcgacattatcaggtttgcgcctccgctggtgatcaaggaggatgagcttcgagagtccattgaaattattaacaagaccatcttgtctttctgagggtagccagctgttttcagtggtccctgggagccagctggagacaggtggtcctgtaaaagctttattcctaatgtgggcacattccactcccatgagtcttcaaaaactttttttttgaatatatttttttcagttgatacataatagaacaacgtttatgaacctgccgtttgctttgtaacgtaactaaataatgtaatggcatctatattcagttgaagtgttttgatgtgcatgtgtacttcctaaggtgaaatgcatctatatacagacagcctctaaatcaagtccttcagtataattgatatatgtttttataatttcctcactggtataagtgtttcatatttgaaaaagttatctctgggtattgcataaaaggcttcatcttataaagtgaaatcattgttattgaattttaggaaggattaatggttaagtgtatataaaatactaatattaagtaaacttcatattggccaacaccagggttgtattctatggatgtcattattttgaattaagaattagtgtttaacattcctaaattgttttgagtgcttgattataatttgtaaaaaatgtttattttcaatacttctttaaatttaaaataaagcttatatttcaaatgtc

SEQ ID NO: 283673 - DNA, 1000 bp, Homo Sapiens
gccggccctgcctgtagatacgccccgctgtctgtgctgtgagagtcgccgctcgctgggggggaagggggggacacagctacacgcccattaaagcacagcacgtcctgggggaggggggcattttttatgttacaaaaaaaaattacgaaagaaaagaaatctctatgcaaaatgacgaacatggtcctgtggactcctctggcctgttttgttggctctttctctgtaattccgtgttttcgctttttcctccctgcccctctctccctctgcccctctctcctctccgcttctctccccctctgtctctgtctctctccgtctctgtcgctcttgtctgtctgtctctgctctttcctcggcctctctccccagacctggcccggccgccctgtctccgcaggctagatccgaggtggcagctccagcccccgggctcgccccctcgcgggcgtgccccgcgcgccccgggcggccgaaggccgggccgccccgtcccgccccgtagttgctctttcggtagtggcgatgcgccctgcatgtctcctcacccgtggatcgtgacgactcgaaataacagaaacaaagtcaataaagtgaaaataaataaaaatccttgaacaaatccgaaaaggcttggagtcctcgcccagatctctctcccctgcgagccctttttatttgagaaggaaaaagagaaaagagaatcgtttaagggaacccggcgcccagccaggctccagtggcccgaacggggcggcgagggcggcgagggcgccgaggtccggcccatcccagtcctgtggggctggccgggcagagaccccggacccaggcccaggcctaacctgctaaatgtccccggacggttctggtctcctcggccactttcagtgcgtcggttcgttttgattctttttcttttgtgcacataagaaataaataataataataaataaagaataaaattttgtatgtcaaaaaaaaaaaaaaaaaa

SEQ ID NO: 283674 - DNA, 1000 bp, Homo Sapiens
gggcatttggagccctcatgcttcaccctagctccctgaaacaagcacggaggatggctctgagcagcgaggaaagtgctggaagcaagcaggccgagcgcgtccctggctggggacgttaatcattaccggagggcggcccgagcgcggccccgccccgggacggcagcctgcgcgcccggccgccgcctgccctctccgctggccacctgctgccgcccgcgccatggctggcaaagcacacaggctgagcgctgaggagagggaccagctgctgccaaacctgagggctgtggggtggaatgagctggaaggccgtgatgccatcttcaagcagtttcatttcaaagacttcaacagggcctttgggttcatgacaagagtggccctgcaggctgagaaactggaccaccatcctgaatggtttaacgtgtacaacaaggtccacatcacgctgagcacccatgagtgtgccggcctttcagaacgggacataaacctggccagcttcatcgaacaagtagcagtgtccatgacatagaccctgcccttcctctttgaattcttccgggggaaggggtgactgaactgggagtccagggagggagctgaggagcccttaccctcccaccactcccctcccaagacccagccgccgccgttgagggctgagtccttgctgtgggatgtgccagtgtccccaccaacaccaggaatttagaccttttccctgcaccactctcttcatcctgggggctctgttacactaatttgaataaactctcccctttctttgcaacttcccagcaacaataatgattttcttgccaggccgtctcttgctccctaattcatttcccaggaagctgtgatacagggtgaaataaagtcttgtcttagaaaccaggaccctaaaccccacactatgtaatagaaacacatgtgtttttatgtctcaaataaaactattatatcacttggaaaaaaaaaaaaaaaaaaa

SEQ ID NO: 283675 - DNA, 1000 bp, Homo Sapiens
ttgtaaaaggagacatcagcactaaatttctctccgatgtgtatcctgatggcttcaaaggacacatgctaaccaagagtgagaagaaccagttattggcaatagcatcatcattgtttgtggcattccagttaagagcacaacattttcaagaaaattcaagaatgcctgttattaaaccagacatagccaactgggagctctcagtaaaattgcatgataaagttcataccgtagtagcatcaaacaatgggtcagtgttctcggtggaagttgatgggtcgaaactaaatgtgaccagcacgtggaacctggcttcgcccttattgtctgtcagcgttgatggcactcagaggactgtccagtgtctttctcgagaagcaggtggaaacatgagcattcagtttcttggtacagtgtacaaggtgaatatcttaaccagacttgccgcagaattgaacaaatttatgctggaaaaagtgactgaggacacaagcagtgttctgcgttccccgatgcccggagtggtggtggccgtctctgtcaagcctggagacgcggtagcagaaggtcaagaaatttgtgtgattgaagccatgaaaatgcagaatagtatgacagctgggaaaactggcacggtgaaatctgtgcactgtcaagctggagacacagttggagaaggggatctgctcgtggagctggaatgaaggatttataacctttcagtcatcacccaatttaattagccatttgcatgatgctttcacacacaattgattcaagcattatacaggaacacccctgtgcagctacgtttacgtcgtcatttattccacagagtcaagaccaatattctgccaaaaaatcaccaatggaaattttcattgatataaatacttgtacatatgatttgtacttctgctgtgagattccctagtgtcaaaattaaatcaataaaactgagcatttgtctaaaaaaaaaaaaaaaaaaaaaaaaaaa

SEQ ID NO: 283676 - DNA, 1000 bp, Homo Sapiens; identical to SEQ ID NO: 220516

SEQ ID NO: 283677 - DNA, 1000 bp, Homo Sapiens; identical to SEQ ID NO: 115111

SEQ ID NO: 283678 - DNA, 1000 bp, Homo Sapiens; identical to SEQ ID NO: 220518

SEQ ID NO: 283679 - DNA, 1000 bp, Homo Sapiens; identical to SEQ ID NO: 115112

SEQ ID NO: 283680 - DNA, 1000 bp, Homo Sapiens
gtgaacagcttgtggtgtctggctcatgggatcaaactgtcaaattgtgggatccaactgttggaaagtctctgtgcacctttagaggccatgaaagtattatttatagcacaatctggtctccccacatccctggttgttttgcttcagcctcaggtgatcagactctgagaatatgggatgtgaaggcagcaggagtaagaatcgtgattcctgcacatcaggcagaaatcttgagttgtgactggtgtaaatacaatgagaatttgctggtgaccggggcggttgactgtagtttgagaggctgggacttaaggaatgtacgacaaccagtgtttgaacttcttggtcatacctatgctattaggagggtgaaattttcaccatttcatgcttctgtgctggcctcttgctcgtatgattttactgtaagattctggaacttttcaaagcctgactctcttcttgaaacagtggagcatcatacagagtttacttgtggtttagacttcagtcttcagagccccactcaggtggctgactgttcttgggatgaaacaataaagatctatgaccctgcttgtcttactattcctgcttgagatacactactttggtcagaaacagaggatgttggctgaagaactgcctaacagcaaataaattaactatggaaaacatagacattatgcttttatatgctattcagatttcaaatctttccaatttaccctggaatcagttttgagggagctgataaagactttagctgactcgttaagcctgatacataagccatatttaaaattctaagaaataattaatgttatgatatatcttgtagtatctattaaaatgtagtctctgggtcataaaatggattaaaatatgggagatcagtaggttatacgtatatagatagtgatatatttcatttttaatttgtcatttttgatgtaaaatataatcactgctgtgataaataaactatctattgatc

SEQ ID NO: 283681 - DNA, 1000 bp, Homo Sapiens; identical to SEQ ID NO: 115113

SEQ ID NO: 283682 - DNA, 1000 bp, Homo Sapiens; identical to SEQ ID NO: 220520

SEQ ID NO: 283683 - DNA, 1000 bp, Homo Sapiens
gacgctgctctcggacacggagatgaccagcatcgggggcatcatccacgtggaccagatcgtgcagatggccagtcagctgttcttgcaggaccaggtgtcaattggtgccatggacaccctggagaaagaccaagccacaggaatctgccacttcttttatgacagcgctccgagtggggcttatgggacgatgacctacctaacaagagcagtggcttcttatttgcaggaattgttgcccaattcgggctgccagatgcaatagggtctcacctggaaacatgatcacactctcaatctgtcacgtgccccctagccttactgggaaccttctgtcccccaagatcccctgtgctatcaggaaagcatgtcccatcagaaacactctcggggggcaatggtagcactcaccctgaaactgatgtatgttaaagccacagagatagagctgaggagtcctgtgttcccccgcaaggagcaccccgggatcattttctaggttcatttctctggaacatttgctgtagcatctggtctcacggactctgaggaggaattggaaattggtctcttttgagtgcagagggaactgagacgccagcttaaattggctcttgcagagagttacagaaatagtttcgatgagctagtgacacatcctaaagatgcaaagatcctcctggcggcagtagccttgacaagggccacctcttcacaggatgcagtctgtctgtgcaccaaactcttcaccaaatagaacacttgtgtctctctgtggaatggggggttttcttgtgccttgcttgctttcatagccttccattttattggcatggctgccttgatgtaacataattctctgtccccaagatttagaaaattcctcttcgttcaccttggctcatggtcttccagggtttttatcctggctgtctatgaactagggttttctcctgccttaggaaaaatactgcatcttctggaatctagaaaaaaa

SEQ ID NO: 283684 - DNA, 1000 bp, Homo Sapiens; identical to SEQ ID NO: 115114

SEQ ID NO: 283685 - DNA, 1000 bp, Homo Sapiens; identical to SEQ ID NO: 220521

SEQ ID NO: 283686 - DNA, 1000 bp, Homo Sapiens; identical to SEQ ID NO: 115115

SEQ ID NO: 283687 - DNA, 1000 bp, Homo Sapiens; identical to SEQ ID NO: 115116

SEQ ID NO: 283688 - DNA, 1000 bp, Homo Sapiens
gtgcggccccttcatttgattgtgggaagcctcaagtggagccgaagaaatgtcctggaagggttgtgggggggtgtgtggcccacccacattcctggccctggcaagtcagtcttagaacaaggtttggaatgcacttctgtggaggcaccttgatatccccagagtgggtgttgactgctgcccactgcttggagaagtccccaaggccttcatcctacaaggtcatcctgggtgcacaccaagaagtgaatctcgaaccgcatgttcaggaaatagaagtgtctaggctgttcttggagcccacacgaaaagatattgccttgctaaagctaagcagtcctgccgtcatcactgacaaagtaatcccagcttgtctgccatccccaaattatgtggtcgctgaccggaccgaatgtttcatcactggctggggagaaacccaaggtacttttggagctggccttctcaaggaagcccagctccctgtgattgagaataaagtgtgcaatcgctatgagtttctgaatggaagagtccaatccaccgaactctgtgctgggcatttggccggaggcactgacagttgccagggtgacagtggaggtcctctggtttgcttcgagaaggacaaatacattttacaaggagtcacttcttggggtcttggctgtgcacgccccaataagcctggtgtctatgttcgtgtttcaaggtttgttacttggattgagggagtgatgagaaataattaattggacgggagacagagtgacgcactgactcacctagaggctgggacgtgggtagggatttagcatgctggaaataactggcagtaatcaaacgaagacactgtccccagctaccagctacgccaaacctcggcattttttgtgttattttctgactgctggattctgtagtaaggtgacatagctatgacatttgttaaaaataaactctgtacttaactttgatttgagtaaattttggtttt

SEQ ID NO: 283689 - DNA, 1000 bp, Homo Sapiens
cctggcctttgtcgtccgctacaagcctgatgagcagccctcactgatgccacaccatgatgcctccaccttcaccatcaacatcgccctgaaccgagtcggggtggattacgagggcgggggctgtcggttcctgcgctacaactgttccatccgagccccaaggaagggctggaccctcatgcaccctggacgactcacgcattaccatgaggggctccccaccaccaggggcacccgctacatcgcagtctccttcgtcgatccctaattggccaggcctgaccctcttggacctttcttctttgccgacaaccactgcccagcagcctctgggacctcggggtcccagggaacccagtccagcctcctggctgttgacttcccattgctcttggagccaccaatcaaagagattcaaagagattcctgcaggccagaggcggaacacacctttatggctggggctctccgtggtgttctggacccagcccctggagacaccattcacttttactgctttgtagtgactcgtgctctccaacctgtcttcctgaaaaaccaaggcccccttcccccacctcttccatggggtgagacttgagcagaacaggggcttccccaagttgcccagaaagactgtctgggtgagaagccatggccagagcttctcccaggcacaggtgttgcaccagggacttctgcttcaagttttggggtaaagacacctggatcagactccaagggctgccctgagtctgggacttctgcctccatggctggtcatgagagcaaaccgtagtcccctggagacagcgactccagagaacctcttgggagacagaagaggcatctgtgcacagctcgatcttctacttgcctgtggggaggggagtgacaggtccacacaccacactgggtcaccctgtcctggatgcctctgaagagagggacagaccgtcagaaactggagagtttctattaaaggtcatttaaacca

SEQ ID NO: 283690 - DNA, 1000 bp, Homo Sapiens
atgtcaccttgatgggggctgtgagtggggcagtgtgatacccagtgactagacgcactctgcgttttcccgtgtttggggctgaggcctgctggacagatggctggccaagtgggagcagaccctagggagtttgcacctcggctgggccggattcggaccggctctgtgttcactacactcagaatagcctgctgcttctctgtctccgagaccggagtacttgggaacaacagctgggctggagagttggtgctggcaaaacagtccttcccctggggccggttcttacccaggtccagagaaaccaacgcgggatgtcagacttcaccaaaaggactttctggttgcccctggctggcttcctggaggcgttcgcctctagtttctcagggatggagcgagagcccagccagagaacagtaagaggagctgctctcctatctgcactcacccaggccttcacccagactttaccgcggaggcggctgagtgcagctacagctaggtccgcgtccctcactcttttcatcttctgcacgttcttcgtgaaactggaaggatcccgggtctcagctagaacacggtggaagagaactttcctaggaaacggttcatgtgtcacttttcaggatgtggaaacactgagccatacaccctccattgcttggtgctggggttgtgtggcctccactgggcacttgccgacctgagtctggggccaggggagcccaggctgccctgcactcctgcctcccagcccacagccaggtgctttcatcacagctaaacctggttccctccaaacctcccagccactcgggcttgtaactgtctgagccccggatccggtggggtgaaagcagccagctcatcccagtgactcacaggacacagccatccagcggcatctttccttgtcgaatgatactgtaatgaccttccaaagtgaagagtagcacattaaagtgattttattgtttaaaaaaaaaaaaaaaaa

SEQ ID NO: 283691 - DNA, 1000 bp, Homo Sapiens; identical to SEQ ID NO: 118736

SEQ ID NO: 283692 - DNA, 1000 bp, Homo Sapiens
tacagcaacaggacttcattattctgttccttcctgtcattatggaaaccagccatcaacctatggagtgatggcaggtagtttaaccccttgtctttataaatttcctgaccacaccttgagtcatggatttcctcctatacaccagcctcttctggcagaggaccccacagctgctgatttcaagcaggaactcaggcggaaaagtaaattggtggaagagccaatagacatggattctccagaaatcagagaacttgaaaagtttgccaatgaatttaaagtgagacgaattaaattaggatacacccagacaaatgttggggaggccctggcagctgtgcatggctctgaattcagtcaaacaacaatctgccgatttgaaaatctgcagctcagctttaaaaatgcatgcaaactgaaagcaatattatccaaatggctggaggaagctgagcaagtaggagctttgtacaatgaaaaagtgggagcaaatgaaaggaaaagaaaacgaagaacaactataagcattgctgctaaagatgctctggagagacactttggagaacagaataaaccttcttctcaagagatcatgaggatggctgaagaactgaatctggagaaagaagtagtaagagtttggttttgcaaccggaggcagagagaaaaacgggtgaaaacaagtctgaatcagagtttattttctatttctaaggaacatcttgagtgcagataagatttttctattgtataatagcctttttctcccgtttcattcctttctcttcctcaacaaaaacagaaattacttggttgacttaaaatcattttatatcaatagcttttacagaagctttacttttccacttttttttaaaaaaaagaaaccaacaatttaaattatattgatgttatttacttaaaataattattctcagaagccacattatctattttaagccaaatatattaacagtaataaaatgatctctctgtc

SEQ ID NO: 283693 - DNA, 1000 bp, Homo Sapiens
caccccacctccagctgccgcctctgcacagagcctgcacccggtgctccgagagcccccggatcacggcgaactgggctcgcaccattgccaggatcactccgacgaggagacgccaacctctgatgagttggaacagttcgccaaacaattcaaacaaagaagaatcaagttgggcttcacgcaggccgacgtggggttggcgctgggcacactgtatggtaacgtgttctcgcagaccaccatctgcaggttcgaggccttgcagctgagcttcaaaaatatgtgcaagctgaagcccctgctgaacaagtggctggaggaggcggattcgtccacagggagcccgaccagcattgacaagatcgctgcacagggccgcaagcgcaagaagcggacctccatcgaggtgagtgtcaagggcgtactggagacgcatttcctcaagtgtcccaagcctgccgcgcaggagatctcctcgctggcagacagcctccagttggagaaggaagtggtgcgtgtctggttctgtaatcgaagacaaaaagagaaaagaatgactccgccaggggatcagcagccgcatgaggtttattcgcacaccgtgaaaacagacacatcttgccatgatctctgactggaggaagcgaggaggcggccggccgcactgggagcagcgcgggatttcctttctctctcactctctttcctttcattctagtattcttaattatttatttttctctctctctcgttcgctcgctctctcgtactctctctcttttcctcctttcctttttctttccctttcccctttttctttcccttctttttccctttcctttcctttcattttctttcctttccccttcccttcccttcccttccatctcttcctttcctttccctttcttttcttttgctttcctttcctttttttcccttttctttccttttcataagaggttctaacttctgttgacaaaggaaacacatactc

SEQ ID NO: 283694 - DNA, 1000 bp, Homo Sapiens
tggcctcaacatctacaatctctatgccccgtgtgctggaggggtgcccagccattttaggtatgagaaggacactgttgtggtccaggatttgggcaacatcttcactcgcctgccactcaagcggatgtggcatcaggcactgctgcgctcaggggataaagtgcgcatggaccccccctgcaccaacacaacagctgcttccacctacctcaacaacccgtacgtgcggaaggccctcaacatcccggagcagctgccacaatgggacatgtgcaactttctggtaaacttacagtaccgccgtctctaccgaagcatgaactcccagtatctgaagctgcttagctcacagaaataccagatcctattatataatggagatgtagacatggcctgcaatttcatgggggatgagtggtttgtggattccctcaaccagaagatggaggtgcagcgccggccctggttagtgaagtacggggacagcggggagcagattgccggcttcgtgaaggagttctcccacatcgcctttctcacgatcaagggcgccggccacatggttcccaccgacaagcccctcgctgccttcaccatgttctcccgcttcctgaacaagcagccatactgatgaccacagcaaccagctccacggcctgatgcagcccctcccagcctctcccgctaggagagtcctcttctaagcaaagtgcccctgcaggcgggttctgccgccaggactgcccccttcccagagccctgtacatcccagactgggcccagggtctcccatagacagcctgggggcaagttagcactttattcccgcagcagttcctgaatggggtggcctggccccttctctgcttaaagaatgccctttatgatgcactgattccatcccaggaacccaacagagctcaggacagcccacagggaggtggtggacggactgtaattgatagattgattatggaattaaattgggtacagcttc

SEQ ID NO: 283695 - DNA, 1000 bp, Homo Sapiens; identical to SEQ ID NO: 220524

SEQ ID NO: 283696 - DNA, 1000 bp, Homo Sapiens
agcaaagaggtgcccaggcctgaggtactcacataaatgctttgttttgctggtgatttaaccagtgcttggaaaaatcttgcttggctatttctgcatcatttcttaaggctgccttcctctctcagtacgttgccctctgtgctatcatcttatcatcaattattagacaaatcccactggcctacagtcttgcttctgcagcacccactttgtctcctcaggtagtgatgaattagttgctgtcacaaaaggagggaagtagcacccaaattaagttgcttaagagaggaaatgtacatcttgtataacttagggagcgaagaaaatgtaggcgcgaaagtgaaaagtgaggcagctagttcttcctattccattctcgaccaacctgccctttcttaatatgactagtggtcttgatgctagagtcaacttactctgttgctggctttagcagagaataggaggaaccatatgaaaaagatcaggctttctgacttccatccccaaaacacatttaccagcatactccaaactgtttctgatgtgttccatgagaaaaggattgtttgctcaaaaagcttggaaaatactacacactccctttctccttctggagatcaacccacattagagtgtctaaggactcctgagaattcctgttacagtaaacaaaactaacgtaatctaccatttcctacactatttgagcatggaaatcatagtccccactctgtgaaaacttaacgctttttggaagacatttctgtagcatgtcagtttggagaaatgatgagctacgccttgatgaaagaaccgtgttggtgctgctaagtttagccattatggtttttcctttctctctcttaagccttattcttcaactaaaagatgaggattaagagcaagaagttgggggggatgtgaaaataattttatgaggttgtctaaaataaagagtagtttcttaacaaaaaaaaaaaaaaaaaaaaaaaaaaaa

SEQ ID NO: 283697 - DNA, 1000 bp, Homo Sapiens; identical to SEQ ID NO: 220525

SEQ ID NO: 283698 - DNA, 1000 bp, Homo Sapiens
cttgttgtccagttgaaaaaaggttgtgtagctgtgtcatgtatatacctttttgtgtcaaaaggacatttaaaattcaattaggattaataaagatggcactttcccgttttattccagttttataaaaagtggagacagactgatgtgtatacgtaggaattttttccttttgtgttctgtcaccaactgaagtggctaaagagctttgtgatatactggttcacatcctacccctttgcacttgtggcaacagataagtttgcagttggctaagagaggtttccgaagggttttgctacattctaatgcatgtattcgggttaggggaatggagggaatgctcagaaaggaaataattttatgctggactctggaccatataccatctccagctatttacacacacctttctttagcatgctacagttattaatctggacattcgaggaattggccgctgtcactgcttgttgtttgcgcatttttttttaaagcatattggtgctagaaaaggcagctaaaggaagtgaatctgtattggggtacaggaatgaaccttctgcaacatcttaagatccacaaatgaagggatataaaaataatgtcataggtaagaaacacagcaacaatgacttaaccatataaatgtggaggctatcaacaaagaatgggcttgaaacattataaaaattgacaatgatttattaaatatgttttctcaattgtaacgacttctccatctcctgtgtaatcaaggccagtgctaaaattcagatgctgttagtacctacatcagtcaacaacttacacttattttactagttttcaatcataatacctgctgtggatgcttcatgtgctgcctgcaagcttcttttttctcattaaatataaaatattttgtaatgctgcacagaaattttcaatttgagattctacagtaagcgttttttttctttgaagatttatgatgcacttattcaatagctgtcagccg

SEQ ID NO: 283699 - DNA, 1000 bp, Homo Sapiens; identical to SEQ ID NO: 115117

SEQ ID NO: 283700 - DNA, 921 bp, Homo Sapiens
gtgggaggaggcaccggccgcgcggcgggaggaggtgccggccgagcaccgcagacagcgccgggaagatgagcacggaaggtggtggccgtcgctgccaggcacaagtgtcccgccgcatctccttcagcgcgagccaccgattgtacagtaaatttctaagtgatgaagaaaacttgaaactgtttgggaaatgcaacaatccaaatggccatgggcacaattataaagttgtggtgacagtacatggagagattgaccctgctacgggaatggttatgaatctggctgatctcaaaaaatatatggaggaggcgattatgcagccccttgatcataagaatctggatatggatgtgccatactttgcagatgtggtgagcacgactgaaaatgtagctgtttatatctgggacaacctccagaaagttcttcctgtaggagttctttataaagtaaaagtatacgaaactgacaataatattgtggtttataaaggagaatagctattggggttagcattgcacaaagcccagtttctttctgtgtttgaaaaagattttgatccccttggaatattaagaggtcaacacgtgattgttgtacgtacacattgtgctctggagtgcctatttattgaaatcattgtaagacctgttataaatttaagtctatttaaaactaaacttgtaatatacatcctgaaaatcatttagagagtcttttatttataaattaaaaatcacttcattttcacaaaatgttttggtgtgggattatttgaaagcaaaagaaatctaattttgttttctccattacctcattttagtattaatttttacttggtataatatacatggttaaaatgcttatgtgacttcgagtaggtgaatcttaaagaaataaaattcaagtgaccac

SEQ ID NO: 283701 - DNA, 1000 bp, Homo Sapiens
aaatgatttttcccctaacctgagatatcagccacccagtaaaaatcaaaaaatctggtatgctgtttgtacaattggtggcaggtggttagaagaacgatgctatgatttgtttcgaaaccatcatttagcatcatttgggaaagtcaagcagtgtgtgaattttgtgattggacttttgaaattaggtgggctgattaattttttgattttccttcagaggggaaagtttgcaactttgacagaacgtctcctaggtattcattctgtattttgcaagcctcaaaacatacgtgaagttggctttgaatacatgaatagggaacttctctggcatggttttgctgaatttctgatttttctcttaccacttatcaatgtccagaagttgaaagccaagctgtcttcatggtgtattcctcttactggtgcacctaatagtgacaatacattagccaccagtggcaaagaatgcgctctatgtggagagtggcccaccatgcctcacaccataggatgtgagcatattttctgttatttctgtgctaagagtagtttcttatttgacgtgtactttacttgtcctaagtgtggcacagaagtacacagtctgcagccactgaaatcaggaatcgagatgtcagaagtaaatgctctttagaaactaaaattgcttcctttgaggaaaaaaatgcaccgtgtttaaattcttaatattagtcatcctaagtataccatttatgtatcctttataaggaatgtgctcctagccactgtcttctcctttccaggcatgactgaaatctaatcactggaaaccatgtgattctaaatatattatgtaaatgttaatgtattatgttttttaaatcattgcattcaatttttaatgtcaagaataatggacagcttttgtcaggtgactactaacaatgctccttcattttactacttcttaaaacaaggttggattctaaagataaagattttggagactctg

SEQ ID NO: 283702 - DNA, 1000 bp, Homo Sapiens
ttgggtaggaccccacgatttagggtaactgttatcatcagctgccatttctgatagggtctaccacatctgtaatgtctgtcctttcccccacttttactgggaattgatagtccagcttccttgggcagtgtaagtaggaggttcatctgctgtgcgcctctaatgtctgtctggatgggatgtgttaggagttggcctgttgggttgaattgttgatttggctgagcagagctgagttttggtaggagtgctcatggttctgtcattcttggacctctcctggctgagctctgattccctgtgagcacgatgctgatgcaatagtcctgtgtcatcactgcagcggtcctcaggagctgccagggccaattgctacagagtgtctgggtgtgtggcataggaggaaggtttgcttgtgaaatgaggctgggtgggagcggggagggactagatcagaagagatcaagggctgtattcaggaacgttggtgggaggacagagcaagtgggaagggggtatggtgagtgcggcaatccctcatcctcttagaagcacctgtgaatgggaattgagccaactgttatagaaaattggttcagaaagtgcaatcttgccagatttctagcaaataggttcagtgttaccataagcctttgctgtacttcttgaaatgtttctaggggagagcattggaaaatccccttcccccatctagatcgaaggaagatgagggagcagcttggattcttctcagttgtcccctgcatggggagatacactaacccccagaaatgactgctaagcctcttgccttgtctttagtagctaatgatcagagagattttttttttaaactaccatggtcccaggattccatcctgaaatttatttttctttgtatgaatatgtgtaaatgatttaaaaataaaactgtaaaatatttgtacgaagaataaatggaactgatgtgggtaaaaaaaaaaaaaaaaaaaaaaaa

SEQ ID NO: 283703 - DNA, 1000 bp, Homo Sapiens
tcaccagctctgccagagcctggctgggaagaacagcggcatgccgcccggggcagccgccatcgctgtgctcccggttaccctggataccccgatgaacaggaaatcaatgcctgaggctgacttcagctcctggacacccttagaattcctagttgaaactttccatgactggatcacagggaaaaaccgaccgagctcaggaagcctaatccaggtggtaaccacagaaggaaggacggaactcaccccagcatatttttaggcctcatctcagtgcctatgaggggcctgccagaaaagtcactaacctgtctcagtgtggccttgtccagccttgtgttttctgtaacccctgtttgtggtacgagataatgagtcctatttttctctcacataatatgcatttgctctcctagggacaagtgtaatacatttatgtgaagtaagacaatgcgagactggtggccgtcaaatagcatccgtcaatctgtgttaactgcataggaggctctcgatagcacctgctatagcggtgtcatgttggatcgctttgtgactgttcatctgtccttgacagtggctgtcatcttgactactttgttgatttgttggtattggggacattttaaaggctgagttatttttgaatgtcatgtttatgtcatagacgtagaaaacgcatccttgaattaaactgccttaactccttttgtggtataagcaaactacatggactctgtccctggtatccttttcctgtgtggttgcccctgtgcctgtggtctggcctaggttaagtgtgcaagataactactcgtgagttattcagaatgttgttcctaataaatgcacttgttgtctgtcttctttaatcaaatcacatcttatatacagcagtcagagatgagtatactagaatcatggattgctggaggtcttttaatctgatgttctcagaagggggtggatttaaatcctgaaataaatatttcaacac

SEQ ID NO: 283704 - DNA, 1000 bp, Homo Sapiens
acttgaaaaagtaaagtgttctgccagatcttaggtatagaggaccctaacacagtatatcccaagtgcactttctaatgtttctgggtcctgaagaattaagatacaaattaattttactccataaacagactgttaattataggagccttaatttttttttcatagagatttgtctaattgcatctcaaaattattctgccctccttaatttgggaaggtttgtgttttctctggaatggtacatgtcttccatgtatcttttgaactggcaattgtctatttatcttttatttttttaagtcagtatggtctaacactggcatgttcaaagccacattatttctagtccaaaattacaagtaatcaagggtcattatgggttaggcattaatgtttctatctgattttgtgcaaaagcttcaaattaaaacagctgcattagaaaaagaggcgcttctcccctcccctacacctaaaggtgtatttaaactatcttgtgtgattaacttatttagagatgctgtaacttaaaataggggatatttaaggtagcttcagctagcttttaggaaaatcactttgtctaactcagaattatttttaaaaagaaatctggtcttgttagaaaacaaaattttattttgtgctcatttaagtttcaaacttactattttgacagttattttgataacaatgacactagaaaacttgactccatttcatcattgtttctgcatgaatatcatacaaatcagttagtttttaggtcaagggcttactatttctgggtcttttgctactaagttcacattagaattagtgccagaattttaggaacttcagagatcgtgtattgagatttcttaaataatgcttcagatattattgctttattgcttttttgtattggttaaaactgtacatttaaaattgctatgttactattttctacaattaatagtttgtctattttaaaataaattagttgttaagagtc

SEQ ID NO: 283705 - DNA, 1000 bp, Homo Sapiens; identical to SEQ ID NO: 220527

SEQ ID NO: 283706 - DNA, 1000 bp, Homo Sapiens
agcattgcaggaatggtctctgtgcttggatacaagttcctgactccactttttactactaaactgaggatccatgatacatgtggggtccataacctccacggcttacctggtgtagtgggaggccttgcaggcattgtggcagtagcaatgggcgcctccaacacgtctatggccatgcaggcagctgcactgggttcctctatcggaacagcagttgttggaggtctgatgacaggtttaattctaaagttgcctctctggggacagccatctgaccagaactgctatgatgattctgtttattggaaggtccctaagacgagataacttgacaatcagttccatggacatggtgaccacagccagctggaacctgaagtctaaacaccattcctgctctccagcttcctttcccattatccagaatcaagtccaaataaacaaaaagggagtaaccaaagagagtatggaccagagtgaatagatcctaagtcccaaatggccagtgtaaaaatgtccttatgtctgatgctgtctcttgctcttcaatgattaattgaggggatgttactcataaaacagataatcaaatagatcttctccaggattcccaaaaagcttttggcagtgagtaaatacagagtaaacatgtcagtttcttaatgtagacactatgtcttcaatcccaaaaattataaaactgaaacccatgaagcaagaatagatgtgagaaatctatgtaaaaaaataattaaagaaatgcatgtgtgtaaagtagtaatatgatgattttaggtagtgctttttattttaaaaatagtctagttagtaatgttgtatccttgcatgaatattattcttaattccttttgcatgttgactatttgcaacgagctcaaatgctatctgatcaaagtctattttgcataaaatgtccaataattaaatattgttataaaataaaaaaaaaaaaaaaaaaaaaaaaaaaaaaaaaaaa

SEQ ID NO: 283707 - DNA, 1000 bp, Homo Sapiens; identical to SEQ ID NO: 220528

SEQ ID NO: 283708 - DNA, 1000 bp, Homo Sapiens
aacatactgtcctccagaataccaagtattaggtgacactagctcaagctgttgtcttcagagcagttaccaagaagctcggtgcacaggttttctctggttcttacaggaaccacctactctttcagttttctggcccaggagtggggtaaatcctttagttagtgcatttgaacttgatacctgtgcattcagttctgtgaatactgccctttttggcggggtttcctcatctccccagcctgaactgctcaactctaaacccaaattagtgtcagccgaaaggaggtttcaagatagtcctgtcagtatttgtggtgaccttcagattagacagtcttcatttccagccagtggagtcctggctccagagccatctctgagactcgtactactggatgttttaatatcagatcattacccaccatatgcctcccacaggccaagggaaaacagacaccagaacttgggttgagggcactaccagactgacatggccagtacagaggagaactagggaaggaatgatgttttgcaccttattgaaaagaaaattttaagtgcatacataatagttaagagcttttattgtgacaggagaacttttttccatatgcgtgcatactctctgtaattccagtgtaaaatattgtacttgcactagcttttttaaacaaatattaaaaaatggaagaattcatattctattttctaatcgtggtgtgtctatttgtaggatacactcgagtctgtttattgaattttatggtccctttctttgatggtgcttgcaggttttctaggtagaaattatttcattattataataaaacaatgtttgattcaaaatttgaacaaaattgttttaaataaattgtctgtataccagtacaagtttattgtttcagtatactcgtactaataaaataacagtgccaattgcaaaaaaaaaaaaaaaaaaaaaaaaaaaaaaaaaaaaaaaaaaaaaaaaaaaaaaaaa

SEQ ID NO: 283709 - DNA, 1000 bp, Homo Sapiens; identical to SEQ ID NO: 220530

SEQ ID NO: 283710 - DNA, 1000 bp, Homo Sapiens
acttgtgtgtgtacctgtggctgtgtgtctgcttgtatgcttttataggcctgtgtgtatagctgtgtgtgtgttcaagtgcgtgactgtatgtgtgtgtgtgaaccactgtgtgaaccactgtgtactggagcctgcattatgcacgtgtctgggtatctttgtatatatgtgtatatatgtgtgccctggactgtttcaaggtccatggagtacggctggtgtgtcatactgtgcaggcctgtccctgggagtgttcccgtgcctgggagagtggacctgtgctgtgagtgtgtggatgcgtgtgaacgcatgtggtaaggtgtgtactcagggcattctgttggcctaagtgcctcttctttttcttcttgtttctcatgaaaagtttgattaaaattcaggaagcagcaaaaccttcaaaacaagacatgtatgtgtgcttgagtgtgtgaacacgtgtgtgtgtgtgcacatctacatgccatgcctatgggccagagttgtctttattgtccaccatgctctctcacctgcttcccagtcctgcctgaacagccctctctctcactcccctctcctccccttcctgtttctcgttgtcacacccatggcctcagccctgctccctgcctcctgcctatgtctcctctatggaaggaggcctccactccttccatctcttccttcagaagtttcgtctaatgggggcagtctccccttcctggcacattgcccctctgccttgccctcctgggccctgggctggcacagcccctggagcctcagaaatctgtttgattggatattctcctcggactgtgtgcaggttgcagaggaagagtagatgagccgggtccggcctctccctgcctgtggcccctcccctgcagacggatgcccattcctgcctggtccagtggggaacaggtcccacgccaggccagcaggcgggctcctttgtacagttcttacaataaaccctccttggtgcctctgg

SEQ ID NO: 283711 - DNA, 1000 bp, Homo Sapiens; identical to SEQ ID NO: 220532

SEQ ID NO: 283712 - DNA, 1000 bp, Homo Sapiens
ggattatagagtatactaaaaaatgtctatagagaaaaactttcatttttggtaggcttatcaaaatctttcagcactcagaaaagaaaaccattttagttcctttatttaatggccaaatggtttttgcaagatttaacactaaaaaggtttcacctgatcatatagcgtgggttatcagttaacattaacatctattataaaaccatgttgattcccttctggtacaatcctttgagttatagtttgctttgctttttaattgaggacagcctggttttcacatacactcaaacaatcatgagtcagacatttggtatattacctcaaattcctaataagtttgatcaaatctaatgtaagaaaatttgaagtaaaggattgatcactttgttaaaaatattttctgaattattatgtctcaaaataagttgaaaaggtagggtttgaggattcctgagtgtgggcttctgaaacttcataaatgttcagcttcagacttttatcaaaatccctatttaattttcctggaaagactgattgttttatggtgtgttcctaacataaaataatcgtctcctttgacatttccttctttgtcttagctgtatacagattctagccaaactattctatggccattactaacacgcattgtacactatctatctgcctttacctacataggcaaattggaaatacacagatgattaaacagactttagcttacagtcaattttacaattatggaaatatagttctgatgggtcccaaaagcttagcagggtgctaacgtatctctaggctgttttctccaccaactggagcactgatcaatccttcttatgtttgctttaatgtgtattgaagaaaagcactttttaaaaagtactctttaagagtgaaataattaaaaaccactgaacatttgctttgttttctaaagttgttcacatatatgtaatttagcagtccaaagaacaagaaattgtttcttttc

SEQ ID NO: 283713 - DNA, 1000 bp, Homo Sapiens
agacactgtttctgggaacagcgtgtatgaggttatcacatcctggatggaaaacatgccagaaggaaaatggcctaactggatgattggtggaccagacagttcacggctgacttcgcgtttggggaatcagtatgtcaacgtgatgaacatgcttcttttcacactccctggaactcctataacttactatggagaagaaattggaatgggaaatattgtagccgcaaatctcaatgaaagctatgatattaatacccttcgctcaaagtcaccaatgcagtgggacaatagttcaaatgctggtttttctgaagctagtaacacctggttacctaccaattcagattaccacactgtgaatgttgatgtccaaaagactcagcccagatcggctttgaagttatatcaagatttaagtctacttcatgccaatgagctactcctcaacaggggctggttttgccatttgaggaatgacagccactatgttgtgtacacaagagagctggatggcatcgacagaatctttatcgtggttctgaattttggagaatcaacactgttaaatctacataatatgatttcgggccttcccgctaaaataagaataaggttaagtaccaattctgccgacaaaggcagtaaagttgatacaagtggcatttttctggacaagggagagggactcatctttgaacacaacacgaagaatctccttcatcgccaaacagctttcagagatagatgctttgtttccaatcgagcatgctattccagtgtactgaacatactgtatacctcgtgttaggcacctttatgaagagatgaagacactggcatttcagtgggattgtaagcatttgtaatagcttcatgtacagcatgctgcttggtgaacaatcattaattcttcgatatttctgtagcttgaatgtaaccgctttaagaaaggttctcaaatgttttgaaaaaaaaaaaaaaaaaaaaaaaaaaaaaa

SEQ ID NO: 283714 - DNA, 1000 bp, Homo Sapiens
atctgcctggcagtgctgtgggtggtgaagtccacgccggcctccctggccctgcccttcgtcctcatcctcactgtgccgctgcggcgcgtcctgctgccgctcatcttcaggaacgtggagcttcagtgtctggatgctgatgatgccaaggcaacctttgatgaggaggaaggtcgggatgaatacgacgaagtggccatgcctgtgtgaggggcgggcccaggccctagaccctcccccaccattccacatccccaccttccaaggaaaagcagaagttcatgggcacctcatggactcaggatcctcctggagcagcagctgaggccccagggctgtgggtggggaaggaaggcgtgtccaggagaccttccacaaagggtagcctggcttttctggctggggatggccgatggggcccacattagggggtttgttgcacagtccctcctgttgccacactttcactggggatcccgtgctggaagacttagatctgagccctccctcttcccagcacaggcaggggtagaagcaaaggcaggaggtgggtgagcgggtggggtgcttgctgtgtgaccttgggtaagtcccttgacctttccaggcctatatttcctcttctgtaaaatgggtatattgatgataatacccacattacaggatggttactgaggaccaaagatacatgtaaaatagggctttgtaaactccacagggactgttctatagcagtcatcatttgtctttgaacgtacccaaggtcacatagctgggatttgaactgagccgtgcagctgggatttgaaccaggccttctgatttcaaggtccgagctctgtcctctgtcagtcatgcgtccactttcccttcccctgtgactcctcccttccccactctgctcccagcccctaccttgagaccctcttctctgggcccagagagaggcgtcctgggtgaaggaaggtacaggcaggatgatccagggattgggctg

SEQ ID NO: 283715 - DNA, 1000 bp, Homo Sapiens
caatgagccaggagccttttggggactgatcctaggacttctgattgggatttcacgtatgattactgagtttgcttatggaaccgggagctgcatggagcccagcaactgtcccacgattatctgtggggtgcactacttgtactttgccattatcctcttcgccatttctttcatcaccatcgtggtcatctccctcctcaccaaacccattccggatgtgcatctctaccgtctgtgttggagcctgcgcaacagcaaagaggagcgtattgacctggatgcggaagaggagaacatccaagaaggccctaaggagaccattgaaatagaaacacaagttcctgagaagaaaaaaggaatcttcaggagagcctatgacctattttgtgggctagagcagcacggtgcacccaagatgactgaggaagaggagaaagccatgaagatgaagatgacggacacctctgagaagcctttgtggaggacagtgttgaacgtcaatggcatcatcctggtgaccgtggctgtcttttgccatgcatattttgcctgagtcctaccttttgctgtagatttaccatggctggactcttactcaccttcctttagtctcgtcctgtggtgttgaagggaaatcagccagttgtaaattttgcccaggtggataaatgtgtacatgtgtaattataggctagctggaagaaaaccattagtttgctgttaatttatgcatttgaagccagtgtgatacagccatctgtacctactggagccgcagaagggagtccactcagtcacatccagaaaaaggcagactaagaatcagaagccatgtgattgatgtctgacgtgagtctgtctcaggtagattccgggtgtcagtgtggtttataatccttgaatattgttttagaaactttggtctccctggttcctgccacttttcctgtccgtcctcctccccattttttttttaaaagaaagctgttttcccctc

SEQ ID NO: 283716 - DNA, 1000 bp, Homo Sapiens
atgtggaaggcagatgcctgctcgctctgtcacctgtgcctctcagaacaccagcagttaaccttcaagacattccacttgctaaaattatttattttgtaaggagaggttttaattaaaacaaaaaaaaattcttttttttttttttttccaattttaccttctttaaaataggttgttggagctttcctcaaagggtatggtcatctgttgttaaattatgttcttaactgtaaccagtttttttttatttatctctttaatctttttttattattaaaagcaagtttctttgtattcctcaccctagatttgtataaatgcctttttgtccatcccttttttctttgttgtttttgttgaaaacaaactggaaacttgtttctttttttgtataaatgagagattgcaaatgtagtgtatcactgagtcatttgcagtgttttctgccacagacctttgggctgccttatattgtgtgtgtgtgtgggtgtgtgtgtgttttgacacaaaaacaatgcaagcatgtgtcatccatatttctctacatcttctcttggagtgagggaggctacctggaggggatcagcccactgacagaccttaatcttaattactgctgtggctagagagtttgaggattgctttttaaaaaagacagcaaacttttttttttatttaaaaaaagatatattaacagttttagaagtcagtagaataaaatcttaaagcactcataatatggcatccttcaatttctgtataaaagcagatctttttaaaaagatacttctgtaacttaagaaacctggcatttaaatcatattttgtctttaggtaaaagctttggtttgtgttcgtgttttgtttgtttcacttgtttccctcccagccccaaaccttttgttctctccgtgaaacttacctttccctttttctttctcttttttttttttgtatattattgtttacaataaatatacattgcattaaaaagaaa

SEQ ID NO: 283717 - DNA, 1000 bp, Homo Sapiens
atttcaaatttgtgcagtgtcttagttgatgagtgcctctgttttccagaagatttcacaatccccggaaaactggtatggctattcttgaaggccaggttttaataaccacaaacaaaaaggcatgaacctgggtggcttatgagagagtagagaacaacatgaccctggatggctactaagaggatagagaacagttttacaatagacattgcaaactctcatgtttttggaaactagtggcaatatccaaataatgagtagtgtaaaacaaagagaattaatgatgaggttacatgctgcttgcctccaccagatgtccacaacaatatgaagtacagcagaagccccaagcaactttcctttcctggagcttcttccttgtagttctcaggacctgttcaagaaggtgtctcctaggggcagcctgaatgcctccctcaaaggacctgcaggcagagactgaaaattgcagacagaggggcacgtctgggcagaaaacctgttttgtttggctcagacatatagttttttttttttttacaaagtttcaaaaacttaaaaatcaggagattccttcataaaactctagcattctagtttcatttaaaaagttggaggatctgaacatacagagcccacatttccacaccagaactggaactacgtagctagtaagcatttgagtttgcaaactcttgtgaaggggtcaccccagcatgagtgctgagatatggactctctaaggaaggggccgaacgcttgtaattggaatacatggaaatatttgtcttctcaggcctatgtttgcggaatgcattgtcaatatttagcaaactgttttgacaaatgagcaccagtggtactaagcacagaaactcactatataagtcacataggaaacttgaaaggtctgaggatgatgtagattactgaaaaatgcaaattgcaatcatataaataagtgtttttgttgttcattaaatacctttaaatcatg

SEQ ID NO: 283718 - DNA, 1000 bp, Homo Sapiens; identical to SEQ ID NO: 115119

SEQ ID NO: 283719 - DNA, 1000 bp, Homo Sapiens; identical to SEQ ID NO: 220535

SEQ ID NO: 283720 - DNA, 1000 bp, Homo Sapiens; identical to SEQ ID NO: 220537

SEQ ID NO: 283721 - DNA, 1000 bp, Homo Sapiens; identical to SEQ ID NO: 115121

SEQ ID NO: 283722 - DNA, 1000 bp, Homo Sapiens
gccctgccaccaagagaacggagcagactcttgggagatgccaaggaacttgccaacatcctgaaataccacattggtgatgaaatcctggttagcggaggcatcggggccctggtgcggctaaagtctctccaaggtgacaagctggaagtcagcttgaaaaacaatgtggtgagtgtcaacaaggagcctgttgccgagcctgacatcatggccacaaatggcgtggtccatgtcatcaccaatgttctgcagcctccagccaacagacctcaggaaagaggggatgaacttgcagactctgcgcttgagatcttcaaacaagcatcagcgttttccagggcttcccagaggtctgtgcgactagcccctgtctatcaaaagttattagagaggatgaagcattagcttgaagcactacaggaggaatgcaccacggcagctctccgccaatttctctcagatttccacagagactgtttgaatgttttcaaaaccaagtatcacactttaatgtacatgggccgcaccataatgagatgtgagccttgtgcatgtgggggaggagggagagagatgtactttttaaatcatgttccccctaaacatggctgttaacccactgcatgcagaaacttggatgtcactgcctgacattcacttccagagaggacctatcccaaatgtggaattgactgcctatgccaagtccctggaaaaggagcttcagtattgtggggctcataaaacatgaatcaagcaatccagcctcatgggaagtcctggcacagtttttgtaaagcccttgcacagctggagaaatggcatcattataagctatgagttgaaatgttctgtcaaatgtgtctcacatctacacgtggcttggaggcttttatggggccctgtccaggtagaaaagaaatggtatgtagagcttagatttccctattgtgacagagccatggtgtgtttgtaataataaaaccaaagaaacata

SEQ ID NO: 283723 - DNA, 1000 bp, Homo Sapiens
tggaggatgcccaattagggcctagccttaatcaggtcctcagagaatttctaccatttcagagaggccttttggaatgtggcccctgaacaagaattggaagctgccctgcccatgggagctggttagaaatgcagaatcctaggctccaccccatccagttcatgagaatctatatttaacaagatctgcagggggtgtgtctgctcagtaatttgaggacaaccattccagactgcttccaattttctggaatacatgaaatatagatcagttataagtagcaggccaagtcaggcccttattttcaagaaactgaggaattttctttgtgtagctttgctctttggtagaaaaggctaggtacacagctctagacactgccacacagggtctgcaaggtctttggttcagctaagctaggaatgaaatcctgcttcagtgtatggaaataaatgtatcatagaaatgtaacttttgtaagacaaaggttttcctcttctattttgtaaactcaaaatatttgtacatagttatttatttattggagataatctagaacacaggcaaaatccttgcttatgacatcacttgtacaaaataaacaaataacaatgtgctctcgggttgtgtgtctgttcacttttcctccctcagtgccctcattttatgtcattaaatggggctcacaaaccatgcaaatgctatgagatgcatggagggctgccctgtaccccagcacttgtgttgtctggtggtggcaccatctctgattttcaaagctttttccagaggctattattttcactgtagaatgatttcatgctatctctgtgtgcacaaatatttattttctttctgtaaccataacaacttcatatatgaggacttgtgtctctgtgcttttaaatgcataaatgcattataggatcatttgttggaatgaattaaataaacccttcctggggcatctggcgaatcccaaaaaaaaaaaaaaaaa

SEQ ID NO: 283724 - DNA, 1000 bp, Homo Sapiens
tagaagctctctgccatcgatgtattctaatagatttgtaaggctattaatttgaagcaactccttgctcacagtgattcttgcttctctgagacctgctcccagtcgatactgtgggcttcagaagccatgactccccaactctgcctgtatcaccggttgaatggacaactaacccgagctggaccaacacaattctctccagagacttttgattttacttttatgtagagacagggtctcactttgttgcccacgctgatgttgaacttgacgtgaggcctcaagcagtcctcctgtcttggccacccaaagtgctaggattacaggtatgagccattgcgctggccctcttcataggcttttggacttgggaatagaaaagcaaccccgtctctactaaaaatacaaaaaaattagccaggcgtggtggcacgtgcctgtaatcccagctacttgggaggctgaggcaggagaatcacttgaacctaggaggcggaggttgcagtgagctgagatcatgccactgcacgcaagcctgggcaacagagcaagactctgtctcaaaagaaagaaaaagaaaagaaaaaaaagaaaggcaagttgactgctgaaaggggaatctgtgtacgcctgggagctgtggggcagccacattccagcacatggatctgagaaacagaacgctgatctgcagaaagagatgagaaccaaagagaggccacctgcgtcctgggtccattttcatcctccctgaagcccagctgcccagggtggggagaaacaccctgtgtccatgggatagagtcctttccgcttgcagttgtgcccaaagaatcttaaatacaaatgagatatccttaggtagttgatcatttatgtaatatgtgtcttcactggggaatactgacttcctaaaatctcaagatggaagatataccacatgtaaattattttagagcaattaaattgttttcaggattttccaaaaaaaaaaaaa

SEQ ID NO: 283725 - DNA, 1000 bp, Homo Sapiens
acatccagagttctgtgacacatgccccccagattgctgcaaagatcccaaggcattgattgcacttgattaagcttttgtctgtaggtgaaagaacaagtttaggtcgaggactggcccctaggctgctgctgtgacccttgtcccatgtggcttgtttgcctgtccgggactcttcgatgtgcccaggggagcgtgttcctgtctcttccatgccgtcctgcagtccttatctgctcgcctgagggaagagtagctgtagctacaagggaagcctgcctggaagagccgagcacctgtgcccatggcttctggtcatgaaacgagttaatgatggcagaggagcttcctccccacttcgcagcgccacattatccatcctctgagataagtaggctggtttaaccattggaatggacctttcagtggaaaccctgagagtctgagaacccccagaccaacccttccctccctttccccacctcttacagtgtttggacaggagggtatggtgctgctctgtgtagcaagtactttggcttatgaaagaggcagccacgcattttgcactaggaagaatcagtaatcacttttcagaagacttctatggaccacaaatatattacggaggaacagattttgctaagacataatctagttttataactcaatcatgaatgaaccatgtgtggcaaacttgcagtttaaaggggtcccatcagtgaaagaaactgattttttttaacggactgcttttagttaaattgaagaaagtcagctcttgtcaaaaggtctaaactttcccgcctcaatcctaaaagcatgtcaacaatccacatcagatgccataaatatgaactgcaggataaaatggtacaatcttagtgaatgggaattggaatcaaaagagtttgctgtccttcttagaatgttctaaaatgtcaaggcagttgcttgtgtttaactgtgaacaaataaaaatttattgttttgcactaaa

SEQ ID NO: 283726 - DNA, 1000 bp, Homo Sapiens
taagtaagtagaatctgtttttcctattttgtagggctgctgactcctagtccttgaagcctagacacatgacccaggaaatttttcctttgtttcacttttgattatgatgtctgagccaaaaattcaattaagtaaacatactcgcctggatctgaatcattcatttaattactagatctacccagctgttatatcaggccaaaaacagattcgtgtttatataaaagagtaaacgatggttgcaaattttggctatttagagttgctacttcactatgaagagtcacttcaaaacacttcgcttgtctttagggatgatttttgccatttccagtccacggtatgatactaaagctgtcaagagaggtttcttcttttctgaaactgccagctctttccagccctgttgatcactggacataaagcttcttttccccaataattcttctttacttaaaatagtcaggatctttatctacagatgtactctccaggttacctgtgatgatagccccctaatgtcctgctagaaaagtctccaagcagagatgacattacttctgaatgctcataaaccacaccatgaaataaaagctctttgttgttttaagattgtgaagtgtcgttaatgggtccccacagatggtccctgctggactcacctggaatctctccacagccatacccactcatcactatcattgagacctgcacatcttaatagaaatattataaacatcgaaaatcatgacttacctagaagttcgcttgtaactaatgaaattaaacaaatgtgttgccttttgtcatgtgtttctctcctgtgacatttcaaaatatcacatcttgataaataatgtgtttcatcttgaatagctgaactaattgctttggaaacagagtcctagaaaagtgacttcaacagaattgttactaaaatttgcactcacaacatgaaataaattttcttcctatggaataatcgtgaaaaaaaaaa

SEQ ID NO: 283727 - DNA, 615 bp, Homo Sapiens
acagaagtccactcattcttggcaggatggcttctcatcgtctgctcctcctctgccttgctggactggtatttgtgtctgaggctggccctacgggcaccggtgaatccaagtgtcctctgatggtcaaagttctagatgctgtccgaggcagtcctgccatcaatgtggccgtgcatgtgttcagaaaggctgctgatgacacctgggagccatttgcctctgggaaaaccagtgagtctggagagctgcatgggctcacaactgaggaggaatttgtagaagggatatacaaagtggaaatagacaccaaatcttactggaaggcacttggcatctccccattccatgagcatgcagaggtggtattcacagccaacgactccggcccccgccgctacaccattgccgccctgctgagcccctactcctattccaccacggctgtcgtcaccaatcccaaggaatgagggacttctcctccagtggacctgaaggacgagggatgggatttcatgtaaccaagagtattccatttttactaaagcactgttttcacctcatatgctatgttagaagtccaggcagagacaataaaacattcctgtgaaaggc

SEQ ID NO: 283728 - DNA, 1000 bp, Homo Sapiens
ggacctttacggcgtaatcctggaaaccatgacaaatccagaaccccaaggctcccctcttcagctgatgtagaattttgcctgagtttgacccaatatgaatctggttccatggataaagctgccaatttcagctttagaaatacactggaaggatttgctagtccacttactgggatagcggatgcctctcaaagcagcatgcacaatgccttgcacatctatatgaatggaacaatgtcccaggtacagggatctgccaacgatcctatcttccttcttcaccatgcatttgttgacagtatttttgagcagtggctccgaaggcaccgtcctcttcaagaagtttatccagaagccaatgcacccattggacataaccgggaatcctacatggttccttttataccactgtacagaaatggtgatttctttatttcatccaaagatctgggctatgactatagctatctacaagattcagacccagactcttttcaagactacattaagtcctatttggaacaagcgagtcggatctggtcatggctccttggggcggcgatggtaggggccgtcctcactgccctgctggcagggcttgtgagcttgctgtgtcgtcacaagagaaagcagcttcctgaagaaaagcagccactcctcatggagaaagaggattaccacagcttgtatcagagccatttataaaaggcttaggcaatagagtagggccaaaaagcctgacctcactctaactcaaagtaatgtccaggttcccagagaatatctgctggtatttttctgtaaagaccatttgcaaaattgtaacctaatacaaagtgtagccttcttccaactcaggtagaacacacctgtctttgtcttgctgttttcactcagcccttttaacattttcccctaagcccatatgtctaaggaaaggatgctatttggtaatgaggaactgttatttgtatgtgaattaaagtgctcttatttt

SEQ ID NO: 283729 - DNA, 1000 bp, Homo Sapiens; identical to SEQ ID NO: 220541

SEQ ID NO: 283730 - DNA, 1000 bp, Homo Sapiens
tgaagccactttgatccctgttttatcgtttgagtttttgtctcttcccagtttctctgagaagctttctcatcctgaagattacgggggactcatttttaccagccccagagcagtggaagcagcagagttatgtttggagcaaaacaataaaactgaagtctgggaaaggtctctgaaagaaaaatggaatgccaagtcagtgtatgtggttggaaatgctactgcttctctagtgagtaaaattggcctggatacagaaggagaaacctgtggaaatgcagaaaagcttgcagaatatatttgttccagggagtcctcagcactgcctcttctatttccctgtggaaacctcaaaagagaaatcctgccaaaagcgctcaaggacaaagggattgccatggaaagcataactgtgtatcagacagttgcacacccaggaatccaagggaacctgaacagctactattcccagcagggggttccagccagcatcacattttttagtccctctggcctcacatacagtctcaagcacattcaggagttatctggtgacaatatcgatcaaattaagtttgcagccatcggccccactacggctcgcgcgctggccgcccagggccttcctgtaagctgcactgcagagagccccacgccacaagccctggccactggcatcaggaaggctctccagccccatggctgctgctgagtcagccacctagcgctggccccatgcagcctccctgggctgggctggctctggatggagccaggcatcggcaagggctctcgggagctgctgccgtcagactcctgcctcaagcctgagtggaagcacctgaggaccggggatcgggacctgacctggggctggcctcaggcccacgtgcacgtgactgccctctgtggaagccagcttaaaccctagccctgtgagagcttcctgtgcccagcaggaaggaagtcaaataaaccacactgactacctgtgctt

SEQ ID NO: 283731 - DNA, 1000 bp, Homo Sapiens; identical to SEQ ID NO: 220542

SEQ ID NO: 283732 - DNA, 1000 bp, Homo Sapiens; identical to SEQ ID NO: 220543

SEQ ID NO: 283733 - DNA, 1000 bp, Homo Sapiens; identical to SEQ ID NO: 220544

SEQ ID NO: 283734 - DNA, 1000 bp, Homo Sapiens; identical to SEQ ID NO: 115125

SEQ ID NO: 283735 - DNA, 1000 bp, Homo Sapiens; identical to SEQ ID NO: 282204

SEQ ID NO: 283736 - DNA, 1000 bp, Homo Sapiens; identical to SEQ ID NO: 115126

SEQ ID NO: 283737 - DNA, 1000 bp, Homo Sapiens; identical to SEQ ID NO: 220546

SEQ ID NO: 283738 - DNA, 1000 bp, Homo Sapiens; identical to SEQ ID NO: 115127

SEQ ID NO: 283739 - DNA, 1000 bp, Homo Sapiens; identical to SEQ ID NO: 115128

SEQ ID NO: 283740 - DNA, 1000 bp, Homo Sapiens
cccttctaccccagccggctgttcgaccagtttttcggcgagggcctttttgagtatgacctgctgcccttcctgtcgtccaccatcagcccctactaccgccagtccctcttccgcaccgtgctggactccggcatctctgaggttcgatccgaccgggacaagttcgtcatcttcctcgatgtgaagcacttctccccggaggacctcaccgtgaaggtgcaggacgactttgtggagatccacggaaagcacaacgagcgccaggacgaccacggctacatttcccgtgagttccaccgccgctaccgcctgccgtccaacgtggaccagtcggccctctcttgctccctgtctgccgatggcatgctgaccttctgtggccccaagatccagactggcctggatgccacccacgccgagcgagccatccccgtgtcgcgggaggagaagcccacctcggctccctcgtcctaagcaggcattgcctcggctggctcccctgcagccctggcccatcatggggggagcaccctgagggcggggtgtctgtcttcctttgcttcccttttttcctttccaccttctcacatggaatgagggtttgagagagcagccaggagagcttagggtctcagggtgtcccagaccccgacaccggccagtggcggaagtgaccgcacctcacactcctttagatagcagcctggctcccctggggtgcaggcgcctcaactctgctgagggtccagaaggagggggtgacctccggccaggtgcctcctgacacacctgcagcctccctccgcggcgggccctgcccacacctcctggggcgcgtgaggcccgtggggccggggcttctgtgcacctgggctctcgcggcctcttctctcagaccgtcttcctccaacccctctatgtagtgccgctcttggggacatgggtcgcccatgagagcgcagcccgcggcaatcaataaacagcaggtgatacaagc

SEQ ID NO: 283741 - DNA, 1000 bp, Homo Sapiens
aggccgagccagggggctgcagggagtccctccctggagtccgggggaggccctgcccctcctgctcttgggccaagggtgggaggacaggaccaaaaggacagccctgtggctatacccatgagctctggggacactgaggaccctggagtggcctctggttatgtctcctctgcagacctggtattcaccccaaactcaggggcctcgtctgtctccctagttccctctctgggcctcccctcagaccagacccccagcttatgtcctgggctggccagtggaccccctggagccccaggccctgtgaagtcagggtttgagggctatgtggagctccctccaattgagggccggtcccccaggtcaccaaggaacaatcctgtcccccctgaggccaaaagccctgtcctgaacccaggggaacgcccggcagatgtgtccccaacatccccacagcccgagggcctccttgtcctgcagcaagtgggcgactattgcttcctccccggcctggggcccggccctctctcgctccggagtaaaccttcttccccgggacccggtcctgagatcaagaacctagaccaggcttttcaagtcaagaagcccccaggccaggctgtgccccaggtgcccgtcattcagctcttcaaagccctgaagcagcaggactacctgtctctgcccccttgggaggtcaacaagcctggggaggtgtgttgagacccccaggcctagacaggcaaggggatggagagggcttgccttccctcccgcctgaccttcctcagtcatttctgcaaagccaaggggcagcctcctgtcaaggtagctagaggcctgggaaaggagatagccttgctccggcccccttgaccttcagcaaatcacttctctccctgcgctcacacagacacacacacacacacgtacatgcacacatttttcctgtcaggttaacttatttgtaggttctgcattattagaactttctaga

SEQ ID NO: 283742 - DNA, 1000 bp, Homo Sapiens; identical to SEQ ID NO: 220548

SEQ ID NO: 283743 - DNA, 1000 bp, Homo Sapiens; identical to SEQ ID NO: 115130

SEQ ID NO: 283744 - DNA, 1000 bp, Homo Sapiens
cccaaggcaaaggggaggctcagaaggaggtggtgtggggatcccctggccaagagggctgaggtctgaccctgctttaaagggttgtttgactaggttttgctaccccacttccccttattttgacccatcacaggtttttgaccctggatgtcagagttgatctaagacgttttctacaataggttgggagatgctgatcccttcaagtggggacagcaaaaagacaagcaaaactgatgtgcactttatggcttgggactgatttgggggacattgtacagtgagtgaagtatagcctttatgccacactctgtggccctaaaatggtgaatcagagcatatctagttgtctcaacccttgaagcaatatgtattatatactcagagaacagaagtgcaatgtgatgggaggaacgtagcaatatctgctccttttcgagttgtttgagaaatgtaggctattttttcagtgtatatccactcagattttgtgtatttttgatgtacccacactgttctctaaattctgaatctttgggaaaaaatgtaaagcatttatgatctcagaggttaacttatttaagggggatgtacatattctctgaaactaggatgcatgcaattgtgttggaagtgtccttggtcgccttgtgtgatgtagacaaatgttacaaggctgcatgtaaatgggttgccttattatggagaaaaaaatcactccctgagtttagtatggctgtatatttatgcctattaatatttggaattttttttagaaagtatatttttgtatgctttgttttgtgacttaaaagtgttacctttgtagtcaaatttcagataagaatgtacataatgttaccggagctgatttgtttggtcattagctcttaatagttgtgaaaaaataaatctattctaacgcaaaaccactaactgaagttcagatataatggatggtttgtgactatagtgtaaataaatacttttcaacaat

SEQ ID NO: 283745 - DNA, 1000 bp, Homo Sapiens
gcgtgcagcccaacgaggccgtgtacaccaagatgatgaccaagaagccgggcatgttcttcaaccccgaggagtcggagctggacctgacctacggcaacagatacaagaacgtgaagctccctgacgcctacgagcgcctcatcctggacgtcttctgcgggagccagatgcacttcgtgcgcagcgacgagctccgtgaggcctggcgtattttcaccccactgctgcaccagattgagctggagaagcccaagcccatcccctatatttatggcagccgaggccccacggaggcagacgagctgatgaagagagtgggtttccagtatgagggcacctacaagtgggtgaacccccacaagctctgagccctgggcacccacctccacccccgccacggccaccctccttcccgccgcccgaccccgagtcgggaggactccgggaccattgacctcagctgcacattcctggccccgggctctggccaccctggcccgcccctcgctgctgctactacccgagcccagctacattcctcagctgccaagcactcgagaccatcctggcccctccagaccctgcctgagcccaggagctgagtcacctcctccactcactccagcccaacagaaggaaggaggagggcgcccattcgtctgtcccagagcttattggccactgggtctcactcctgagtggggccagggtgggagggagggacaagggggaggaaaggggcgagcacccacgtgagagaatctgcctgtggccttgcccgccagcctcagtgccacttgacattccttgtcaccagcaacatctcgagccccctggatgtcccctgtcccaccaactctgcactccatggccaccccgtgccacccgtaggcagcctctctgctataagaaaagcagacgcagcagctgggacccctcccaacctcaatgccctgccattaaatccgcaaacagccaaaaaaaaaaaaaaaaaaaa

SEQ ID NO: 283746 - DNA, 1000 bp, Homo Sapiens
cccccagtacctgccccttgatgaggcccaccccacgggtggttgtaccaacccttacggcaagtccaagttcttcatcgaggaaatgatccgggacctgtgccaggcagacaagacttggaacgcagtgctgctgcgctatttcaaccccacaggtgcccatgcctctggctgcattggtgaggatccccagggcatacccaacaacctcatgccttatgtctcccaggtggcgatcgggcgacgggaggccctgaatgtctttggcaatgactatgacacagaggatggcacaggtgtccgggattacatccatgtcgtggatctggccaagggccacattgcagccttaaggaagctgaaagaacagtgtggctgccggatctacaacctgggcacgggcacaggctattcagtgctgcagatggtccaggctatggagaaggcctctgggaagaagatcccgtacaaggtggtggcacggcgggaaggtgatgtggcagcctgttacgccaaccccagcctggcccaagaggagctggggtggacagcagccttagggctggacaggatgtgtgaggatctctggcgctggcagaagcagaatccttcaggctttggcacgcaagcctgaggaccctcccctaccaaggaccaggaaaagcagcagctgcctgctctccagcctctggcaggaactcagggccctggagctgctggggccaagccaaggcctcccctacctcaaaccccagctgggcccgcttagcccaccaggcatgaggccaagggctccactgaccaggaggccgaggtctctaactcttatcttccacagggtccaagagttcatcaggacccccaagagtgagtgagggggcaaggctctggcacaaaacctcctcctcccaggcactcatttatattgctctgaaagagctttccaaagtatttaaaaataaaaacaagttttcttacactgggaaaaaaaaaaaaaaaa

SEQ ID NO: 283747 - DNA, 1000 bp, Homo Sapiens
cccccagggagtccttgagcgaaacaatgtgatcactctgaacataacagggaaagctggagccactctggaccttctggtagagaacatgggacgtgtgaactatggtgcatatatcaacgattttaagggtttggtttctaacctgactctcagttccaatatcctcacggactggacgatctttccactggacactgaggatgcagtgcgcagccacctggggggctggggacaccgtgacagtggccaccatgatgaagcctgggcccacaactcatccaactacacgctcccggccttttatatggggaacttctccattcccagtgggatcccagacttgccccaggacacctttatccagtttcctggatggaccaagggccaggtctggattaatggctttaaccttggccgctattggccagcccggggccctcagttgaccttgtttgtgccccagcacatcctgatgacctcggccccaaacaccatcaccgtgctggaactggagtgggcaccctgcagcagtgatgatccagaactatgtgctgtgacgttcgtggacaggccagttattggctcatctgtgacctacgatcatccctccaaacctgttgaaaaaagactcatgcccccacccccgcaaaaaaacaaagattcatggctggaccatgtatgatgatgaaagcctgtgtctttgagggattctaccctgaacatacctcacagatcctccctgtcatgccacatttcactgattggaatgtggaaatggaaaaggaatttaggatgtgcattttcacctgaggtttccctgcatccctgcagtgccaaagccccaccttcagggaccacctggaatgtgtgaggggctgacagcacagtaacgtgcatacatatctgcagggctggaatggaagctttaaaggtggtagtgatttttattttggaagaatcatgttacctttttgttaaataaaatttgcccgaattc

SEQ ID NO: 283748 - DNA, 1000 bp, Homo Sapiens; identical to SEQ ID NO: 115132

SEQ ID NO: 283749 - DNA, 955 bp, Homo Sapiens; identical to SEQ ID NO: 115133

SEQ ID NO: 283750 - DNA, 1000 bp, Homo Sapiens
ggcctttctaaatgtccaggcagcagaggaagccctacccaggattgttgaactgatgggcagggaactgaattgggatgattataagaagcaggaacaacttgaaacagccaggaagtttctatattatgaaatgggctataaatctcgatcagaacagttaacagatcgctctgaaattagcctactgccttcagacattgacaggtataagaagagatttcataagtttgatgcagaccagaaaggctttattaccattgttgatgttcagcgtgtattagagagtatcaatgtccaaatggatgaaaatacactccatgaaattctaaatgaagttgatttgaataaaaatggacaggttgaactcaatgaatttttgcagctgatgagtgctattcaaaaaggaagggtatctggaagccggcttgctatactaatgaaaactgcagaagagaacctcgacagaagagttccaattccagtggaccgtagttgtggaggattgtgagtctgggcagtaaatccacagccaacaaacatagaaacgacaaatcaccatgtaacaaccagagatgactgaaaccactctgaaataatgaatgtggatagctgccttttttaacactagaaaacattccaaaactttaaggtgttggtgtatttgccagctttatttgctgtactttatttgtatttgccattcagtctagcttttaagtatatttttttctttttctcattttcaatgcacattagttttgcatctgttttgtgacctgttagatgtgacacattctctttttgtttattcccttattctaaatgagttctaaaaacataatattttggcaaaaattgaaaaaagctggagacattttgtgacatgcatacagatagcatgtgttattaaaaagagttgcctattgaaatgatcgtgtttctggagaaattaagcttatagacagcatgtgttattaaaaagagttacctattgaaa

SEQ ID NO: 283751 - DNA, 1000 bp, Homo Sapiens; identical to SEQ ID NO: 220551

SEQ ID NO: 283752 - DNA, 1000 bp, Homo Sapiens; identical to SEQ ID NO: 115135

SEQ ID NO: 283753 - DNA, 1000 bp, Homo Sapiens
taacagtgcccttttcatctccagtgtgaatatatggtctgtgtgtctgatgtttgttgctaggacatataccttctcaaaagattgttttatatgtagtactaactaaggtcccataataaaaagatagtatcttttaaaatgaaatgtttttgctatagatttgtattttaaaacataagaacgtcattttgggacctatatctcagtggcacaggtttaagaacgaaggagaaaaaggtagtttgaaccttggtaaattgtaaacagctaataatgaagttattcttgacatgagaaaatcagtaattggaccaggcgcggtggctcttgcctgtagtcccggcactttgggaggccgaggcaggcagatcacaaggtcaggagttcgagaccagcctgaccaacgtggtgaaaccctgtctctactggaaatacggaaattagccgggggtggtgacatgtgcctgtaatcccagctactcaggaggctaaggcaggagaatcgcttgaacccaggaggcggaggttgcagtgagccgagattgcaccactgcactccagcctgggtggcagagtgagactcgtctcaaaaaaaagaaagaaaattagtaattgtaagtacccctgataagcaaattagtaattgtcaatacccctgttaagcaattcctttttgcagtatatttctgaaatgacagaatgctgttttaaaaacaaagaaataaaatcctgctcctgactcggtcaaaatattttttaaagtctattgtttgttgtgcttgctggtactaagaggctatttaaaagtataaaactgctttgtatccatgagggtttcattgtgtgttagcagcagtgagcttctattaaatgtatatgtcatttattttgtttaagtggctttcagcaaacctcagtcatattcttatgcagggtattgcgaaacaacttgtgttctattaatcgtgtcttcaattaaaagaccacagacttctgg

SEQ ID NO: 283754 - DNA, 1000 bp, Homo Sapiens
tccaggaaaagtggaacatacagaagaactttctagtataacagaagtggtgactactgaagaaaatattcctgacgtggtcccgggcagccatctgactccaatagagagagagagttcttcacctttaagtagtaaccagtctgaacctggcagcatcgctttaaactcgtatcactccagaaattgttctgagagtgatcactccagaaatggttttgatactgattccagctgtctggaatcacatagctccttatctgactcagaatttcccccaaataataaaggtgaaataaaaacagaaggacaagagctcataaccgtaataaaagcccccacctcctttggttatgataaaccacatgtgctagtggatctacttgtggatgatagcggtaaagagtccttgattggttatagaccaacagaagattccaaagaattttcatgagatcagctaagttgcaccaactttgaagtctgattttcctggacagttttctgctttaatttcatgaaaagattatgatctcagaaattgtatcttagttggtatcaaccaaatggagtgacttagtgtacatgaaagcgtaaagaggatgtgtggcattttcacttttggcttgtaaagtacagacttttttttttttttaaacaaaaaaagcattgtaacttatgaacctttacatccagataggttaccagtaacggaacatatccagtactcctggttcctaggtgagcaggtgatgccccagggacctttgtagccacttcactttttttcttttctctgccttggtatagcatatgtgttttgtaagtttatgcatacagtaattttaagtaatttcagaagaaattctcgaagcttttcaaaattggacttaaaatctaattcaaactaatagaattaatggaatatgtaaatagaaacgtgtatattttttatgaaacattacagttagagatttttaaataaagaattttaaaactc

SEQ ID NO: 283755 - DNA, 1000 bp, Homo Sapiens; identical to SEQ ID NO: 220552

SEQ ID NO: 283756 - DNA, 1000 bp, Homo Sapiens; identical to SEQ ID NO: 220553

SEQ ID NO: 283757 - DNA, 1000 bp, Homo Sapiens
cactcgcctcagaaaccttccctggatgaatgaggagacccagaacatggcccaggacaaggttgctcaactgcaggtggagatgggggcttcagaatgggccctgaagccagagctggcccgacaagaatacaacgatatacagcttggatcgagcttcctgcagtctgtcctgagctgtgtccggtccctccgagctagaattgtccagagcttcttgcagcctcacccccaacacaggtggaaggtgtccccttgggacgtcaatgcttactattcggtatctgaccatgtggtagtctttccagctggactcctccaacccccattcttccaccctggctatcccagagccgtgaactttggcgctgctggcagcatcatggcccacgagctgttgcacatcttctaccagctcttactgcctgggggctgcctcgcctgtgacaaccatgccctccaggaagctcacctgtgcctgaagcgccattatgctgcctttccattacctagcagaacctccttcaatgactccctcacattcttagagaatgctgcagacgttggggggctagccatcgcgctgcaggcatacagcaagaggctgttacggcaccatggggagactgtcctgcccagcctggacctcagcccccagcagatcttctttcgaagctatgcccaggtgatgtgtaggaagcccagcccccaggactctcacgacactcacagccctccacacctccgagtccacgggcccctcagcagcaccccagcctttgccaggtatttccgctgtgcacgtggtgctctcttgaacccctccagccgctgccagctctggtaacttggttaccaaagatgccacagcacagaaatatcgaccaacacctccctggtcacatccatggaatcagagcaagatttcctttctgcttctgttccaaaaataaaagctggcacttggcttccgcttgtctcttaaaaaaaaaaaaaaaaa

SEQ ID NO: 283758 - DNA, 1000 bp, Homo Sapiens
cctgctacagattgacaatgcccgtctggctgctgatgacttccgcaccaagtttgagacagagcaggccctgcgcctgagtgtggaggccgacatcaatggcctgcgcagggtgctggatgagctgaccctggccagagccgacctggagatgcagattgagaacctcaaggaggagctggcctacctgaagaagaaccacgaggaggagatgaacgccctgcgaggccaggtgggtggtgagatcaatgtggagatggacgctgccccaggcgtggacctgagccgcatcctcaacgagatgcgtgaccagtatgagaagatggcagagaagaaccgcaaggatgccgaggattggttcttcagcaagacagaggaactgaaccgcgaggtggccaccaacagtgagctggtgcagagtggcaagagtgagatctcggagctccggcgcaccatgcaggccttggagatagagctgcagtcccagctcagcatgaaagcatccctggagggcaacctggcggagacagagaaccgctactgcgtgcagctgtcccagatccaggggctgattggcagcgtggaggagcagctggcccagcttcgctgcgagatggagcagcagaaccaggaatacaaaatcctgctggatgtgaagacgcggctggagcaggagattgccacctaccgccgcctgctggagggagaggatgcccacctgactcagtacaagaaagaaccggtgaccacccgtcaggtgcgtaccattgtggaagaggtccaggatggcaaggtcatctcctcccgcgagcaggtccaccagaccacccgctgaggactcagctaccccggccggccacccaggaggcagggagcagccgccccatctgccccacagtctccggcctctccagcctcagccccctgcttcagtcccttccccatgcttccttgcctgatgacaataaagcttgttgactcagctaaaaaaaaaaaaaaa

SEQ ID NO: 283759 - DNA, 1000 bp, Homo Sapiens; identical to SEQ ID NO: 220555

SEQ ID NO: 283760 - DNA, 1000 bp, Homo Sapiens
caaagatcaaaaagcttgttaagactcctagctggcaagcatgtgggaaataggtactctcataacagctgacagaagtacatattgaagaggacaatatggcaatgtccttcaaaattataaaagcactaactctttgatccagtagtttccacttctaggaacttaaccttcagatatattttcaccagatataaaatgacatacgtaagaagttattactgcatcatttgtaatagctaaagattagaaacaattaattgctatggaacccttaaaaaaggtggctctaaattccttaagaaagatatccaaaacaaattaaggggaaaagggagggttgcataacagcatgtaacataacactatttgtctaaagaatggggaaagagaagcggttgtctgttcacctcatccttgccactccgccttatacctcaccatcggagaacttaccatcccccaaatatatcctgctggcactacaccttcgtaactgctgttcccactgcccccacaacactccaatctccaccttcctgccaaccttgagatattgtatgcatatatacatatttcctttgtttaaaatacaaatagcatactatgcatgctgttctgcactttgctttttttttatacttgcaattagagctgcctcatttcattttacagctgtatactattccattgaatggataaaccataatttatttaatcagtccctcactgacagacgtttccattgtttcctgtcttttgctataaataatgctgtaatgaatattcttgtgcatatttcacattaatttatgggattacatctgcaggataaattcttagaaccaatggtggtttgtggggagggtgacagggtggataggtacaggattgggagacttttcactgtatctccttttgtatttttttgaattttgtaccatatgtatcacctattcaaaaaaaataaaatatttttaaatacaaaaaaaaaaaaaaa

SEQ ID NO: 283761 - DNA, 1000 bp, Homo Sapiens
gagttagggactgaccagcagctttagaatcccagccccctgaccactcagagacatgcagagattgggtttttggacttctggggtaagtggtctaagtccagtccagtcctatctgggcttcctggagcagaagcagcaacttgtcctagcacagatggccagccccttagacagaggccctcaagtctttctctttccctggtcccttgtatcccctgcaggctgagtgcatttggagggagtgagtggccctttcggatccagggaggctggtcctatggcctcatgttaaataggcggggcttgccttctggtgttggacaagcttctgagacgtcatgaggagattctgcctttgccaggtgactgtctggggagcgggtctgctcccaaggggcctgagcagtccttggcctgctaaggtcttggaacttgcctgcctttccatccatggccagcagcacctgccctacctgccccacttgtccttagcctggacctctgacagcagcatctctaccttctccccagctcccaggaccacaggctcaggcaggggcctccatgggccccaggggaacactggggacttggcctctctctagggtacatggtgctgggagaggcagcccaggaagtctcatctggggagcaggcagccagcatctgggccttggcctggagcacaaagaccctggctttcattttctctcaggtgaaaggaaattaaggcaacaaaagaagcccggctcctggtcacctaggaagcctcagattccttcccatggagggagggagtggtttgcaggtggccaagttcctctaacttggctcacactcgacatgaaaattcagaattttatactttccctaccctctagagaaataagatcttttttgtcagtttgtttgtatgaaactaaagcctttatttgttaatagttcctgctaaaacaatgaataaaaactcaaggagcaactaaaaaaaaaaaaaaaa

SEQ ID NO: 283762 - DNA, 1000 bp, Homo Sapiens
gctcttgagagtgcatgccatggagactggtttagacaccgcgtggagcctagttgcctgttgtcacggcatcttgcactttaggagactaagaccgtcctggttcgtctgtgtgtggtgtgaccaatggtgtgcccagagcactactctcaaaatcactagtgttagcaagtcgtcccgggctggggagcgttcgccgtagtctttggaagctttggctttagatttaccaagccccgcctccccgctgccagtgccctgctctcccgttcgcctctttctgtttctgtgtgaactttcccggtaatatcactcgttaaataggttttctttaaacttaattaaggaaaaactatttaaaggtaaaggatattttgttgacatcggtggctcgatcatccttaagcaactgaagttaaaattgttgaaggaaaaggcacttaaattggttactttcatgtccagctgtatataagtccagtgtgttcatctagatgacgcaaagaatctcctggtagagaagcgacatgtaaaaaactggtggaaaaaggttttggattttttttccagtggggtggggggagggcaagctggatttacaggtcacggctggactgaatgggcctttttatcttcccactgtatcatggaagtagctgcttgcttgtactgtccatccttcaggcatccctaaagctcactctgaagatgttagagacaaacacaaactcttcgagttaaagttgatcctgacactgacatgaaggcaagccttgatttcgtatgaacgttgctgaagtggtaattgaggaaaacagttccccagattgttaagagttcactgaagatattgacacaattttaaaaaatcagtaaaggaatgtatataatattgctctcgtgttttacagtaagatttgttgctctcagactgtgtaaaacaaaatttattcatgttttctgcatattaaaaaatcttattgtaccaactggtaaaccg

SEQ ID NO: 283763 - DNA, 1000 bp, Homo Sapiens
gtgctggaagagctcattgacatgaaccagcaccatctgaatgccctcggcgtgggccacgcctctctggaccagctctgccaggtgaccagggcccgcggacttcacagcaagctgactggcgcaggcggtggtggctgtggcatcacactcctcaagccagggctggagcagccagaagtggaggccacgaagcaggccctgaccagctgtggctttgactgcttggaaaccagcatcggtgcccccggcgtctccatccactcagccacctccctggacagccgagtccagcaagccctggatggcctctgagaggagcccacgacactgcagccccacccagatgcccctttctggattattctgggggctgcagttcgactctgtgctggccagcgagcgcccagctcctgacactgctggagaggccccagccgcttggcgatgccagccaagctctgcagtcccagcggtgggacctagggaggcatggtctgccctctgcatcctctggagccagccgagcaggaggcctaggagggtcctctgagactccagacctgaggcgagaagggctgcttccctgaagctcccacagtcccatctgcttcaggcccccgccttggcctgtgttcttcctggccgcctgggtccaatgctcaggtgctggggcctggttcccggagaagtgtgccttctctctcccttttcagggacggccccctgtctctcagggccaggcctctccctcctccaggaagccttcccctaccccttgtcgcccctccctcccagagcacctgctgtctgggtggctcactcagcacttggcccttctacctagcgggatggggctcccccaggggctgtcccggaggcggtgggcctggttaaataaggcagtgtggccttggtttatatgcactttcttccgatctgtacctgagaggtttgtggaaaagatggcaaatggggaataaaaagattttgtgtcaac

SEQ ID NO: 283764 - DNA, 1000 bp, Homo Sapiens; identical to SEQ ID NO: 115138

SEQ ID NO: 283765 - DNA, 1000 bp, Homo Sapiens; identical to SEQ ID NO: 115139

SEQ ID NO: 283766 - DNA, 1000 bp, Homo Sapiens
ttgatcttaaaatcactttgggactgggatcccttgctgattgacaaacagactttctgggaccttgatggagtggggaacaagcagtagagtgggactgggggagacccaggccccgggctgagcactgtgaggcctggatgtgaagactcagcccagcgaagctcattcccttacccccggccagtgctgctgcttcagtggaagagatgaagccaaaggacagaatgaaaatccctaccttcagagactctagcccagcccaacaccatctcttcctacctctcagccttctccctccccagggccacttgttgaagtctgagcactttatgtaaatttctaggtgtgagccgtgatcacattttctatttatttccaagtcttctcattgtatggaacatagtactacttatacttacagtagtaagttatacttgtgagcccacagagtggcagacagcatggctctcacagcacagggagaaaaactgaggtacacagaggtacctcagaagctctggatgtctttgggggttttgctaagtgtatcttgataggaaacaacaaaagcaggttgagatggggaagatgacagaacaacagtgttaaatggccatttgcacaggcctttgccacaacagagaagtagtttggtcagctaaaactcagctgcagcctggacagtagagcgagaccccatcttaaaaataaagaaggctgggcgtggtggctcatgcctgtaatcccagcactttgggaggccaaggcaggcagatcacttaaggccaggagttcaagaccacctggccaacatggtgaaaccccgtctctactaaaaatacaaaaaattagcctggcgtaatggcaggcgcctataatcccagctactcaggaggctgaagcagaagaatcacttgaacctaggaggcggaggttgcagtgagtcaagatcgcgccactgcactccagcctgggtgacagagcaagactctgtctt

SEQ ID NO: 283767 - DNA, 1000 bp, Homo Sapiens
ctctaccagatgaaatcccagaacccactggccaagctccatgggtcctctatcttggaaagacaccacttggagtttggcaaaacactgctcagagacgagagcctgaatatctttcaaaacctcaatcgtcgacagcatgagcatgccatccacatgatggacattgcaatcattgccacagacctcgccctgtatttcaagaagaggacgatgttccaaaagatcgtggatcagtctaagacatatgagagtgaacaggagtggacacagtacatgatgctggagcagacacggaaggaaatcgttatggccatgatgatgaccgcctgtgatctctcagccatcaccaaaccctgggaggtgcagagccaggtagctctgctggtggctgctgaattctgggaacaaggtgacctggagcgcacggtgctgcaacagaatcccattcccatgatggacagaaacaaagcagatgaactccctaagcttcaagtcggcttcattgactttgtttgcaccttcgtctacaaggaattctcccgtttccacgaggagatcaccccaatgttggacgggatcaccaacaatcgcaaggagtggaaggcgcttgctgatgagtacgatgccaagatgaaggtgcaggaggagaagaagcagaaacagcagtcggccaagtcagcagccgcaggaaatcagccggggggaaaccccagcccagggggtgcaactacatccaagtcctgctgcatccagtaacaccactggggatgtgctggctggacggcaccaccctttcctgggaagagatgactcaagccagtggaagaccacacaccttgagaagtagaagagtcataggatttgaaagctgttagagaatttagcttccaggactgttcaatcttttggcttccctgggccacattggaagaattgtcttgggtcacacataaaatacagtaacactaatgatagctgttgaacttaaaaaaaaaaa

SEQ ID NO: 283768 - DNA, 1000 bp, Homo Sapiens; identical to SEQ ID NO: 220559

SEQ ID NO: 283769 - DNA, 1000 bp, Homo Sapiens; identical to SEQ ID NO: 115140

SEQ ID NO: 283770 - DNA, 1000 bp, Homo Sapiens; identical to SEQ ID NO: 220560

SEQ ID NO: 283771 - DNA, 1000 bp, Homo Sapiens
cgcaagtatttagcacagtctgatttcttctggctaagaaaagccgttccaaaaacagagtggtttacaaatccgacgactgtcaatgccttctacagtgcatccaccaaccagatccgatttccagcaggagagctccagaagcctttcttttggggaacagaatatcctcgatctctgagttatggtgctataggagtaattgtcggacatgaatttacacatggatttgataataatggtagaaaatatgataaaaatggaaacctggatccttggtggtctactgaatcagaagaaaagtttaaggaaaaaacaaaatgcatgattaaccagtatagcaactattattggaagaaagctggcttaaatgtcaaggggaagaggaccctgggagaaaatattgctgataatggaggcctgcgggaagcttttagggcttacaggaaatggataaatgacagaaggcagggacttgaggagcctcttctaccaggcatcacattcaccaacaaccagctcttcttcctgagttatgctcatgtgaggtgcaattcctacagaccagaagctgcccgagaacaagtccaaattggtgctcacagtccccctcagtttagggtcaatggtgcaattagtaactctgaagaattccagaaagcttttaactgtccacccaattccacgatgaacagaggcatggactcctgccgactctggtagctgggacgctggtttatggcatcctgagacagttgcacagtgccagcggaggctgcactgagccttcatcgcccattgctttaggcctggaggagctttcatttttagtgcattttcattatttgggtaggtgacctgcttggatctagacagcatctgttcaaagttgtagggcttataaagtggaatataagaagaactaagtatgtttctttagaaaatcaaaccaacaaaaataaatccctaggctacttttgttaaaaaaaaaaaaaaaaaa

SEQ ID NO: 283772 - DNA, 1000 bp, Homo Sapiens
tcagatattaaataacagtgtgtgaccccaaaagtacttaccctaaaacatgtgttgcctgaaagcacatgtgtgtatcgctgccttgccatgtcttgttcagaagacacaggggagcagggttagctcacgtgtctttagaactccagtactcacccagggactccagttcacaggccagaaaacatatgcattatgaagttcccctctactccatgcacatagtaagtctgactatggcagtcagacttacttactcccattttcccttcgatatatgactttttctcagtaaatattaacctgaactattccaactccccttgtactcttgctttttcaattctcctgttgcaatgacacataggaaaatcttaaaattcttgggagtgttgtcacacctgaaaattatgagtctctatgatcttggcacaaattgtacatttgagtgtctttgacttggttaaaggaagtttgttcacttcgatgactggatacagaatgaatcccataattgacatgggcgacagtaaaagtgtccccaaagactacactgttgttgaggtggtggtagtgctggtgggtttttgtttaatatttaaacttcttgttgtggaggctgaaaagaaaaaaaataatagaaaggtaaacaaacaaataaatagaaaagatcaacaacccctttggctatctactgagacatgactaggaagaaaacatgactttatcattttgttatagaagctgatatataaggttacacattttcatttatttgtttttctgatttgaaggtataaccttcatgatgaattacttcttcagggtgttaaggcagtgactttagaaacaaatttttttcttgcttttgttttgtttttgagaccgaatctcactctgttgcccaggctggagtgcagtggtgcgatcttggctcactgcaacttctacctccgaggttcaagagattcttgtgcctcagcctcccggatagctgccg

SEQ ID NO: 283773 - DNA, 1000 bp, Homo Sapiens; identical to SEQ ID NO: 115141

SEQ ID NO: 283774 - DNA, 1000 bp, Homo Sapiens; identical to SEQ ID NO: 115142

SEQ ID NO: 283775 - DNA, 1000 bp, Homo Sapiens
agtgtttttactacagttgttttttgaaaacatggtagaattggagagtaaaaactgaatggaaggtttgtatattgtcagatattttttcagaaatatgtggtttccacgatgaaaaacttccatgaggccaaacgttttgaactaataaaagcataaatgcaaacacacaaaggtataattttatgaatgtctttgttggaaaagaatacagaaagatggatgtgctttgcattcctacaaagatgtttgtcagatgtgatatgtaaacataattcttgtatattatggaagattttaaattcacaatagaaactcaccatgtaaaagagtcatctggtagatttttaacgaatgaagatgtctaatagttattccctatttgttttcttctgtatgttagggtgctctggaagagaggaatgcctgtgtgagcaagcatttatgtttatttataagcagatttaacaattccaaaggaatctccagttttcagttgatcactggcaatgaaaaattctcagtcagtaattgccaaagctgctctagccttgaggagtgtgagaatcaaaactctcctacacttccattaacttagcatgtgttgaaaaaaaaagtttcagagaagttctggctgaacactggcaacgacaaagccaacagtcaaaacagagatgtgataaggatcagaacagcagaggttcttttaaaggggcagaaaaactctgggaaataagagagaacaactactgtgatcaggctatgtatggaatacagtgttattttctttgaaattgtttaagtgttgtaaatatttatgtaaactgcattagaaattagctgtgtgaaataccagtgtggtttgtgtttgagttttattgagaattttaaattataacttaaaatattttataatttttaaagtatatatttatttaagcttatgtcagacctatttgacataacactataaaggttgacaataaatgtgcttatgttt

SEQ ID NO: 283776 - DNA, 981 bp, Homo Sapiens; identical to SEQ ID NO: 115143

SEQ ID NO: 283777 - DNA, 1000 bp, Homo Sapiens
ttttgactctgctccatccattcaggaacttcctgtccagtcggccatcacagagccccgggatggagagactgtagaatcaggggaggtgaccatcaagggctatgcatggagtggtggtggcagggctgtgatccgggtggatgtgtctctggatgggggcctaacctggcaggtggctaagctggatggagaggaacagcgccccaggaaggcctgggcatggcgtctgtggcagttgaaagcccctgtgccagctggacaaaaggaactgaacattgtttgtaaggctgtggatgatggttacaatgtgcagccagacaccgtggccccaatctggaacctgcgaggtgttctcagcaatgcctggcatcgtgtccatgtctatgtctccccatgagcatggaaaggagccacctccacccctttccccacccattagcctcactgcttcagaaaaatctttcccacctttcaacttcttggatcacaactctggccttcctaagccatacccaagtacacatatagcacatttcacccaaggaccttccctctttggacactatgttacatacccctcttggcctttgaacctgtgccaggaagtgtgagctgttacagcaaggggctagaagtgaaaaaagtaattctggagacaagcactattttctcttcctaccccacctccatttctaatgcctactgccatcaaggccttgttttgcttttctttttggattgttcagagaaatgtgtgtggcatgtgtaagaaaagtgtatatactatcttatactacctctccaggttgccagagagttgcgaggagagcaaggggcacaaccgtctccctttatagttctacttttctaataaatagtctgtttaagatcataaaaaaaaaaaaaaaaaaaaaaaaaaaaaaaaaaaaaaaaaaaaaaaaaaaaaaaaaaaaaaaaaaaaaaaaaaaaaaaaaaaaaaaaaaaaaaaaaaaaaaaa

SEQ ID NO: 283778 - DNA, 1000 bp, Homo Sapiens
tacactcaccaacatgtcttcaagtaaacagtgtcctctacaagcctggtgatgcccacacaccacttacttcgtgcgcaacaacaaggaccctgttttccacaccatcaccctctgggcagctgtcatggaaaagcccagtgacctgaccagcacctgcgagaggtccctgcttacctgacggacgtcctgctggcacctcagacaatccactctcaggagcgcagcccgaagcccagtttcccttctatgcagtattgccacaatgcctctcccacgatgtcaaggactcctgtctgtcctggaggtgggagacaaggaacctccgaagaggaagcaagaaagccgtactgtctatgttgtgatccttcatcgaacaaactgatgcgaaaacttgaatctgttactgaaatgaggagagaaggacatgtgctattgaactgagccaaacacactgtaaatatccacagactccctcccctgcccccatcccaaatgatcttgagatttcttttaaagaagtaaatttgtccaatggctgtaaactataaactactgtaattaagtgcaatttcccctctgtgtcctctcccctctgccctgtatataatactaaagtgtctattagttttctttgtaaaggtcagagtcaaaatttcaaaagtgatctgtcccctctcccctcatggagaaacatcctaagtgggaagtgaagccccttgtcctctcccgcgaggcctggacacttatggggacagcataccttggactgactaccagctaactccagtctcctgacattaagacacacctctggatccctggaggggctgaatgtagtgtgtcagagtaacatgccagcttcctgtgggccaggagctcagccgtgcactccctaagaaaccccagggcagggaaactggctgtttgatagcagaagaaaaagttgcagtctcagaaagccttccattaaaacaatttattttatcactaaaaaaaa

SEQ ID NO: 283779 - DNA, 1000 bp, Homo Sapiens
aggaccgcccggtggagccgctggacctggccgtgttctgggtggagtttgtgatgaggcacaagggcgcgccacacctgcgccccgcagcccacgacctcacctggtaccagtaccattccttggacgtgattggtttcctcttggccgtcgtgctgacagtggccttcatcacctttaaatgttgtgcttatggctaccggaaatgcttggggaaaaaagggcgagttaagaaagcccacaaatccaagacccattgagaagtgggtgggaaataaggtaaaattttgaaccattccctagtcatttccaaacttgaaaacagaatcagtgttaaattcattttattcttattaaggaaatactttgcataaattaatcagccccagagtgctttaaaaaattctcttaaataaaaataatagactcgctagtcagtaaagatatttgaatatgtatcgtgccccctctggtgtctttgatcaggatgacatgtgccatttttcagaggacgtgcagacaggctggcattctagattacttttcttactctgaaacatggcctgtttgggagtgcgggattcaaaggtggtcccacggctgcccctactgcaaatggcagttttaatcttatcttttggcttctgcagatggttgcaattgatccttaaccaataatggtcagtcctcatctctgtcgtgcttcataggtgccaccttgtgtgtttaaagaagggaagctttgtacctttagagtgtaggtgaaatgaatgaatggcttggagtgcactgagaacagcatatgatttcttgctttggggaaaaagaatgatgctatgaaattggtgggtggtgtatttgagaagataatcattgcttatgtcaaatggagctgaatttgataaaaacccaaaatacagctatgaagtgctgggcaagtttactttttttctgatgtttcctacaactaaaaataaattaataaatttatataaattct

SEQ ID NO: 283780 - DNA, 1000 bp, Homo Sapiens; identical to SEQ ID NO: 115144

SEQ ID NO: 283781 - DNA, 1000 bp, Homo Sapiens
attcagctggagatggagaatgtggcttagatcagtcccttgtttctttagagatgtccgagatccttccagatgaatcaaaattcaatatgtaccggctctactttggaagctcttatgaatcagaacttggaaatggaacctcttctgatttgagctcacaatgtctctctgcaccaagctccatgactcaggatttgcctggagttcctgggaaagaccagttgttttcacagcctccagtgttaaggacagcttcacaagagggttgccaagaacttacacaagaacaaagagatcaactgagggcagatatcagtattatcaaaggcagataccggagccaaagtggagaggacgaatccatgaaccaaccaggaccaatcaaaaccagactggctattagtcagtcacatttaatgactgcacttggtcacacaagaccatccattagtgaagatgactggaagaattttgctgagctatatgaaagctttcaaaatccaaagaggagaaaaaatcaaagtggaacaatgtttcgacctggacagaaagtaactttagcataaaatatacttctttttgatttggttctgttaagttttttgatggcttttccatatgttgtaacaggaaaaaaatggtgtctatgaatttcttcttaatttaacaaatttggttaatttataaaatcacagattggtaaatgctataattatgtaatgatcaggattgagattaatactgtagtataaattgggacattataacagattccatattttatttcctaaaatctaaattcagtctttaatgaaataatattagccaaatggtggaactaatttatttcttttgaggaaaagataataaagaatgtaattaaatttaaatttcttggaattcccagttgtatattcatcacctttgtagcatttgacaaattttatgcttagcagcttcttcactgttttgaaataaaatatcctattacctactg

SEQ ID NO: 283782 - DNA, 1000 bp, Homo Sapiens
cagacgcagcgggtcatggccaacgtgcgggagcgccagcgcacccagtcgctgaacgaggcgttcgccgcgctgcggaagatcatccccacgctgccctcggacaagctgagcaagattcagaccctcaagctggcggccaggtacatcgacttcctctaccaggtcctccagagcgacgagctggactccaagatggcaagctgcagctatgtggctcacgagcggctcagctacgccttctcggtctggaggatggagggggcctggtccatgtccgcgtcccactagcaggcggagccccccaccccctcagcagggccggagacctagatgtcattgtttccagagaaggagaaaatggacagtctagagactctggagctggataactaaaaataaaaatatatgccaaagattttcttggaaattagaagagcaaaatccaaattcaaagaaacagggcgtggggcgcacttttaaaagagaaagcgagacaggcccgtggacagtgattcccagacgggcagcggcaccatcctcacacctctgcattctgatagaagtctgaacagttgtttgtgttttttttttttttttttttgacgaagaatgtttttatttttatttttttcatgcatgcattctcaagaggtcgtgccaatcagccactgaaaggaaaggcatcactatggactttctctattttaaaatggtaacaatcagaggaactataagaacacctttagaaataaaaatactgggatcaaactggcctgcaaaaccatagtcagttaattctttttttcatccttcctctgaggggaaaaacaaaaaaaaacttaaaatacaaaaaacaacattctatttatttattgaggacccatggtaaaatgcaaatagatccggtgtctaaatgcattcatatttttatgattgttttgtaaatatctttgtatatttttctgcaataaataaatataaaaaatttagagaaaaa

SEQ ID NO: 283783 - DNA, 1000 bp, Homo Sapiens
gaggctctgagggtctgaaaagggcatctcaatggcatgggtgggtggggagtcagtcatgtcactgaaattgaatgggggaggcccaatgaggtggctcatgcctgtaatcccagcactttgggaagctgaggcaggaggatcacctgaggtcaggagttcgagagcagcctggccaacatggcaaaaccccttatttactaaaaatacaaaaacttagccgggcatggtggcatgtgcctgtattcccagctactcatgaggctgaggcaggagaatggcgtgaacccgggagtggagcttgcaatgagccaagattgcgccactgcactccagcctgggtgacagagcaagactccgtctcaaaaaaaaaaaaaaaaaaaaagaaattaattgggggagtcatggtcaggggtgagacctgaaggacctccccctgtgtggccctggacacagcccaccctctgtgagccgtttccaattctaaaacagactcaatgtccccctcacccccacctcaaggtcaggatgcgaacacactgagtgaggagtggacgctgtccattgccacggccatgagggctggagaccagaacagcatggcccgaagcgtgcggggccccggatgacttggggacaccccagaatcccctggggagaacccttcctgcgcgctttcattttttgacctcatcactgagaaaggctcaatttggtgctcacgtgtccttaacacctgatctggcccaagctgcgtgccctttaagccaagagagcctcttgtggaccccgcctgcccgaatgaaatccgaacagttggggctgttatggcaagtggggctggtttttcatttccattggttatttaaagtttcctttaaaataaacgattttaagttataaaaggtgaatctattgaaagaagaacatcaaagaaataaacaggagttcagcggagtagcagaagacaaggcatgtagggggagccattctgtcccag

SEQ ID NO: 283784 - DNA, 1000 bp, Homo Sapiens; identical to SEQ ID NO: 220562

SEQ ID NO: 283785 - DNA, 1000 bp, Homo Sapiens; identical to SEQ ID NO: 220564

SEQ ID NO: 283786 - DNA, 753 bp, Homo Sapiens
gttgtggctgtggagcggaagtgggtctcaaccactataaatcctctctgtgcccgtccggagctggtgaggacagcctgccagagtctggtctctggacactatgggcacacgactcctcccagctctgtttcttgtcctcctggtattgggatttgaggtccaggggacccaacagccccagcaagatgagatgcctagcccgaccttcctcacccaggtgaaggaatctctctccagttactgggagtcagcaaagacagccgcccagaacctgtacgagaagacatacctgcccgctgtagatgagaaactcagggacttgtacagcaaaagcacagcagccatgagcacttacacaggcatttttactgaccaagttctttctgtgctgaagggagaggagtaacagccagaccccccatcagtggacaaggggagagtcccctactcccctgatcccccaggttcagactgagctcccccttcccagtagctcttgcatcctcctcccaactctagcctgaattcttttcaataaaaaatacaattcaagttgcttctcatggatggcactgcttttctgaggactcaagggccaagatggaggggctgactcagtccagccaacatttaatgagcacctactttatgtatggagctctaacccatgggtccatgggaataaagcagtgaatagtaacaataaataatcgtaacaaaaaaaaaaaaaaaaaaaaaaaaaaaaaaaaa

SEQ ID NO: 283787 - DNA, 1000 bp, Homo Sapiens
tgctgtaacacaagtagatgcctgaacttgaattaatccacacatcagtaatgtattctatctctctttacattttggtctctatactacattattaatgggttttgtgtactgtaaagaatttagctgtatcaaactagtgcatgaatagattctctcctgattatttatcacatagccccttagccagttgtatattattcttgtggtttgtgacccaattaagtcctactttacatatgctttaagaatcgatgggggatgcttcatgtgaacgtgggagttcagctgcttctcttgcctaagtattcctttcctgatcactatgcattttaaagttaaacatttttaagtatttcagatgctttagagagattttttttccatgactgcattttactgtacagattgctgcttctgctatatttgtgatataggaattaagaggatacacacgtttgtttcttcgtgcctgttttatgtgcacacattaggcattgagacttcaagcttttctttttttgtccacgtatctttgggtctttgataaagaaaagaatccctgttcattgtaagcacttttacggggcgggtggggaggggtgctctgctggtcttcaattaccaagaattctccaaaacaattttctgcaggatgattgtacagaatcattgcttatgacatgatcgctttctacactgtattacataaataaattaaataaaataaccccgggcaagacttttctttgaaggatgactacagacattaaataatcgaagtaattttgggtggggagaagaggcagattcaattttctttaaccagtctgaagtttcatttatgatacaaaagaagatgaaaatggaagtggcaatataaggggatgaggaaggcatgcctggacaaacccttcttttaagatgtgtcttcaatttgtataaaatggtgttttcatgtaaataaatacattcttggaggagcaaaaaaaaaaaaaaa

SEQ ID NO: 283788 - DNA, 1000 bp, Homo Sapiens
actatgcctctcaccacacccactaccctcagttcagtgggcagagctttgcagagcgttcaggccgcgggccatttggggactccctgatggagctggatgcagctgtggggaccctgatgacagccataggggacctggggctgcttgaagagacgctggtcatcttcactgcagacaatggacctgagaccatgcgtatgtcccgaggcggctgctccggtctcttgcggtgtggaaagggaacgacctacgagggcggtgtccgagagcctgccttggccttctggccaggtcatatcgctcccggcgtgacccacgagctggccagctccctggacctgctgcctaccctggcagccctggctggggccccactgcccaatgtcaccttggatggctttgacctcagccccctgctgctgggcacaggcaagagccctcggcagtctctcttcttctacccgtcctacccagacgaggtccgtggggtttttgctgtgcggactggaaagtacaaggctcacttcttcacccagggctctgcccacagtgataccactgcagaccctgcctgccacgcctccagctctctgactgctcatgagcccccgctgctctatgacctgtccaaggaccctggtgagaactacaacctgctggggggtgtggccggggccaccccagaggtgctgcaagccctgaaacagcttcagctgctcaaggcccagttagacgcagctgtgaccttcggccccagccaggtggcccggggcgaggaccccgccctgcagatctgctgtcatcctggctgcaccccccgcccagcttgctgccattgcccagatccccatgcctgagggcccctcggctggcctgggcatgtgatggctcctcactgggagcctgtgggggaggctcaggtgtctggagggggtttgtgcctgataacgtaataacaccagtggagacttgcacatctgaaaaaaaaaaaaaaaaa

SEQ ID NO: 283789 - DNA, 1000 bp, Homo Sapiens
ctctatcgaaaagccaacaaatcctccaagttagtatcagccaatcgcctttttggagacaaatcccttaccttcaatgagacctaccaggacatcagtgagttggtatatggagccaagctccagcccctggacttcaaggaaaatgcagagcaatccagagcggccatcaacaaatgggtgtccaataagaccgaaggccgaatcaccgatgtcattccctcggaagccatcaatgagctcactgttctggtgctggttaacaccatttacttcaagggcctgtggaagtcaaagttcagccctgagaacacaaggaaggaactgttctacaaggctgatggagagtcgtgttcagcatctatgatgtaccaggaaggcaagttccgttatcggcgcgtggctgaaggcacccaggtgcttgagttgcccttcaaaggtgatgacatcaccatggtcctcatcttgcccaagcctgagaagagcctggccaaggtagagaaggaactcaccccagaggtgctgcaagagtggctggatgaattggaggagatgatgctggtggtccacatgccccgcttccgcattgaggacggcttcagtttgaaggagcagctgcaagacatgggccttgtcgatctgttcagccctgaaaagtccaaactcccaggtattgttgcagaaggccgagatgacctctatgtctcagatgcattccataaggcatttcttgaggtaaatgaagaaggcagtgaagcagctgcaagtaccgctgttgtgattgctggccgttcgctaaaccccaacagggtgactttcaaggccaacaggcctttcctggtttttataagagaagttcctctgaacactattatcttcatgggcagagtagccaacccttgtgttaagtaaaatgttcttattctttgcacctcttcctatttttggtttgtgaacagaagtaaaaataaatacaaactacttccatctcacattaaaa

SEQ ID NO: 283790 - DNA, 1000 bp, Homo Sapiens
taccacaggaaccacaagactgcacatcaaaatatgccccattcaacatctagtgagcagtcaggaaagagaacttccagatcctggaaatcagggttagtattgtccaggtctaccaaaaatctcaatatttcagataatcacaatacatcccttacctgggaaagggctgttataatctttcacaggggacaggatggttcccttgatgaagaagttgatatgccttttcccaactccagaaagtgacaagctcacagacctttgaactagagtttagctggaaaagtatgttagtgcaaattgtcacaggacagcccttctttccacagaagctccaggtagagggtgtgtaagtagataggccatgggcactgtgggtagacacacatgaagtccaagcatttagatgtataggttgatggtggtatgttttcaggctagatgtatgtacttcatgctgtctacactaagagagaatgagagacacactgaagaagcaccaatcatgaattagttttatatgcttctgttttataattttgtgaagcaaaattttttctctaggaaatatttattttaataatgtttcaaacatatattacaatgctgtattttaaaagaatgattatgaattacatttgtataaaataatttttatatttgaaatattgactttttatggcactagtatttttatgaaatattatgttaaaactgggacaggggagaacctagggtgatattaaccaggggccatgaatcaccttttggtctggagggaagccttggggctgatcgagttgttgcccacagctgtatgattcccagccagacacagcctcttagatgcagttctgaagaagatggtaccaccagtctgactgtttccatcaagggtacactgccttctcaactccaaactgactcttaagaagactgcattatatttattactgtaagaaaatatcacttgtcaataaaatccatacatttgtgt

SEQ ID NO: 283791 - DNA, 1000 bp, Homo Sapiens
accttccccctgaaaagtgagcagcaacgtaaaaacgtatgtgaagcctctcttgaatttctagttagcaatcttaaggctctttaaggttttctccaatattaaaaaatatcaccaaagaagtcctgctatgttaaaaacaaacaacaaaaaacaaagcaacaaaaaaaaaaattaaaaaaaaaaacagaaatagagctctaagttatgtgaaatttgatttgagaaactcggcatttcctttttaaaaaagcctgtttctaactatgaatatgagaacttctaggaaacatccaggaggtatcatataactttgtagaacttaaatacttgaatattcaaatttaaaagacactgtatcccctaaaatatttctgatggtgcactactctgaggcctgtatggcccctttcatcaatatctattcaaatatacaggtgcatatatacttgttaaagctcttatataaaaaagccccaaaatattgaagttcatctgaaatgcaaggtgctttcatcaatgaaccttttcaaaacttttctatgattgcagagaagctttttatatacccagcataacttggaaacaggtatctgacctattcttatttagttaacacaagtgtgattaatttgatttctttaattccttattgaatcttatgtgatatgattttctggatttacagaacattagcacatgtaccttgtgcctcccattcaagtgaagttataatttacactgagggtttcaaaattcgactagaagtggagatatattatttatttatgcactgtactgtatttttatattgctgtttaaaacttttaagctgtgcctcacttattaaagcacaaaatgttttacctactccttatttacgacacaataaaataacatcaatagatttttaggctgaattaatttgaaagcagcaatttgctgttctcaaccattctttcaaggcttttcattcgacacaataaaataacatcaatag

SEQ ID NO: 283792 - DNA, 1000 bp, Homo Sapiens
accaagtctatgctgggcggagaaggagaagaagtattgctgtcaagccgtgagctagccatggcaggacagctcctggaccaggtctcataatgcatgtggcacttaggtccaaggtctccagagggtgaaagctggagtctgtcaatgtcctactgagacagcacagccaacctagctagcaacatttgttttagtctgaacaatatatacttatagaattcagtcaaagatacacaatctgaaacagcttcatggggtggactctaacagtagttgcaatgttttagaatgagacttacttctctgctatctagatctgaactccttggcttctttacttagttcaagccccagcctaggaaagccagttacataaaagttggctcaggagtcttagagctttacctaaatatgagcccagaaaacggaggatgggggtggggcgccttcctggaggtgacacttgatgggggtgtgttctggttactgttctaaggctgtgccatcagctccttcctcccctgttcattctgcattctctagtcagttggctaagaagtgactcttgcaactaaaaaaattaagaaattcacttcccctctaggaggtgatgatagggtttctaatggttatatgtatatcacattcccatttgcttagaaagtctgattgtagctatgattgtccgtaggcccatactagagttcatggatatgttatactgaaccaggccagagcaaacagaaaaagaaggttgagggcaatggacaaggaaggaataaagggagaagagggaaaacagaaaacctgatgctggggacacagcatcagctcaagacgtcaccctccattctgcactcagaaaatggcacttgggggactgggcgcagttggtctttaaccacttttcaatgtctaaaaacatttgtttgtggtctataagatgaaacatcatttcaatcgtaaaatttcccattaaagaagtttttttttctaa

SEQ ID NO: 283793 - DNA, 1000 bp, Homo Sapiens; identical to SEQ ID NO: 115147

SEQ ID NO: 283794 - DNA, 1000 bp, Homo Sapiens; identical to SEQ ID NO: 220566

SEQ ID NO: 283795 - DNA, 1000 bp, Homo Sapiens; identical to SEQ ID NO: 115148

SEQ ID NO: 283796 - DNA, 1000 bp, Homo Sapiens
actggcagccatgcacaccctctttatgcgagagcacaaccggctggccaccgagctgagacgcctgaatccccggtggaatggagacaaactgtacaatgaggctcggaagatcatgggggccatggtccagatcatcacctaccgagactttctgcccctggttctgggcaaggcccgggccaggagaaccctggggcactacagggggtactgctccaatgtggacccacgggtggccaatgtcttcaccctggccttccgctttggccacacaatgctccagcccttcatgttccgcttggacagtcagtaccgggcctccgcacccaactcgcatgtcccacttagctctgccttctttgccagctggcggatcgtgtatgaagggggcatcgaccccatcctccggggcctcatggccacccctgccaagctgaaccgtcaggatgccatgttagtggatgagctccgggaccggctgtttcggcaagtgaggaggattgggctggacctggcagctctcaacatgcaacgaagccgggaccacggccttccagggtacaatgcttggaggcgcttctgtgggctctcccagccccggaatttggcacagcttagccgggtgctgaaaaaccaggacttggcaaggaagttcctgaatttgtatggaacacctgacaacattgacatctggattggggccatcgctgagcctcttttgccgggggctcgagtggggcctcttctggcttgtctgttcgagaaccagttcagaagagcccgagacggagacaggttctggtggcagaaacgaggtgttttcaccaaaagacagcgcaaggccctgagcagaatttccttgtctcgaattatatgtgacaataccggtatcaccacggtttcaagggacatcttcagagccaacatctaccctcggggctttgtgaactgcagccgtatccccaggttgaacctatcagcctggcgagggacatga

SEQ ID NO: 283797 - DNA, 1000 bp, Homo Sapiens
aacggcaaggcctgcattcccacagggccctacccctgtgggaaacagaccctggaacgcaggaagaggtcagtggcccaggccaccagcagcagcggggaggcccctgacagcatcacatggaagccatatgatgcagccgacctggaccccaccgagaaccccttcgacctgcttgacttcaaccagacgcagcctgagaggggcgacaacaacctcaccaggatcgtgggaggccaggaatgcaaggacggggagtgtccctggcaggccctgctcatcaatgaggaaaacgagggtttctgtggtggaaccattctgagcgagttctacatcctaacggcagcccactgtctctaccaagccaagagattcaaggtgagggtaggggaccggaacacggagcaggaggagggcggtgaggcggtgcacgaggtggaggtggtcatcaagcacaaccggttcacaaaggagacctatgacttcgacatcgccgtgctccggctcaagacccccatcaccttccgcatgaacgtggcgcctgcctgcctccccgagcgtgactgggccgagtccacgctgatgacgcagaagacggggattgtgagcggcttcgggcgcacccacgagaagggccggcagtccaccaggctcaagatgctggaggtgccctacgtggaccgcaacagctgcaagctgtccagcagcttcatcatcacccagaacatgttctgtgccggctacgacaccaagcaggaggatgcctgccagggggacagcgggggcccgcacgtcacccgcttcaaggacacctacttcgtgacaggcatcgtcagctggggagagggctgtgcccgtaaggggaagtacgggatctacaccaaggtcaccgccttcctcaagtggatcgacaggtccatgaaaaccaggggcttgcccaaggccaagagccatgccccggaggtcataacgtcctctccattaaagtgagatcccactc

SEQ ID NO: 283798 - DNA, 1000 bp, Homo Sapiens
ttcttcaatccgaggacctttggctcgggagaggcagactgtgggctgcgacctctgttcgagaagaagtcgctggaggacaaaaccgaaagagagctcctggaatcctacatcgacgggcgcattgtggagggctcggatgcagagatcggcatgtcaccttggcaggtgatgcttttccggaagagtccccaggagctgctgtgtggggccagcctcatcagtgaccgctgggtcctcaccgccgcccactgcctcctgtacccgccctgggacaagaacttcaccgagaatgaccttctggtgcgcattggcaagcactcccgcacaaggtacgagcgaaacattgaaaagatatccatgttggaaaagatctacatccaccccaggtacaactggcgggagaacctggaccgggacattgccctgatgaagctgaagaagcctgttgccttcagtgactacattcaccctgtgtgtctgcccgacagggagacggcagccagcttgctccaggctggatacaaggggcgggtgacaggctggggcaacctgaaggagacgtggacagccaacgttggtaaggggcagcccagtgtcctgcaggtggtgaacctgcccattgtggagcggccggtctgcaaggactccacccggatccgcatcactgacaacatgttctgtgctggttacaagcctgatgaagggaaacgaggggatgcctgtgaaggtgacagtgggggaccctttgtcatgaagagcccctttaacaaccgctggtatcaaatgggcatcgtctcatggggtgaaggctgtgaccgggatgggaaatatggcttctacacacatgtgttccgcctgaagaagtggatacagaaggtcattgatcagtttggagagtaggggccactcatattctgggctcctggaaccaatcccgtgaaagaattatttttgtgtttctaaaactatggttcccaataaaagtgactctcagcgg

SEQ ID NO: 283799 - DNA, 1000 bp, Homo Sapiens; identical to SEQ ID NO: 115149

SEQ ID NO: 283800 - DNA, 1000 bp, Homo Sapiens; identical to SEQ ID NO: 220571

SEQ ID NO: 283801 - DNA, 1000 bp, Homo Sapiens
tgggaaagattgtcaagacattgccaataagggagctaaacagagcgggctttactttattaaacctctgaaagctaaccagcaattcttagtctactgtgaaatcgatgggtctggaaatggatggactgtgtttcagaagagacttgatggcagtgtagatttcaagaaaaactggattcaatataaagaaggatttggacatctgtctcctactggcacaacagaattttggctgggaaatgagaagattcatttgataagcacacagtctgccatcccatatgcattaagagtggaactggaagactggaatggcagaaccagtactgcagactatgccatgttcaaggtgggacctgaagctgacaagtaccgcctaacatatgcctacttcgctggtggggatgctggagatgcctttgatggctttgattttggcgatgatcctagtgacaagtttttcacatcccataatggcatgcagttcagtacctgggacaatgacaatgataagtttgaaggcaactgtgctgaacaggatggatctggttggtggatgaacaagtgtcacgctggccatctcaatggagtttattaccaaggtggcacttactcaaaagcatctactcctaatggttatgataatggcattatttgggccacttggaaaacccggtggtattccatgaagaaaaccactatgaagataatcccattcaacagactcacaattggagaaggacagcaacaccacctggggggagccaaacaggctggagacgtttaaaagaccgtttcaaaagagatttacttttttaaaggactttatctgaacagagagatataatatttttcctattggacaatggacttgcaaagcttcacttcattttaagagcaaaagaccccatgttgaaaactccataacagttttatgctgatgataatttatctacatgcatttcaataaaccttttgtttcctaagactagaaaaa

SEQ ID NO: 283802 - DNA, 1000 bp, Homo Sapiens; identical to SEQ ID NO: 115150

SEQ ID NO: 283803 - DNA, 1000 bp, Homo Sapiens
atctggaagaccacacgaagctgcccctgatcttccacctgggacgggacccaggggagaggttccccctcagctttgccagcgccgagtaccaggaggccctcagcaggatcacctcggtcgtccagcagcaccaggaggccttggtccccgcgcagccccagctcaacgtgtgcaactgggcggtcatgaactgggcacctccgggctgtgaaaagttagggaagtgtctgacacctccagaatccattcccaagaagtgcctctggtcccactagcacctgcgcagactcaggccaggcctagaatctccggttggccctgcaagtgcctggaggaaggatggctctggcctcggtcctcccccaaccctgcccaagccagacagacagcacctgcagacgcagggggactgcacaattccacctgcccaggacctgaccctggcgtgtgcttggccctcctcctcgcccacggcgcctcagatttcaggaccctcctcctcgcccacggcgcctcagacctcaggaccctgccgtctcacgcctttgtgaaccccaaatatctgagaccagtctcagtttattttgccaaggttaaggatgcacctgtgacagcctcaggaggtcctgacaacaggtgcctgaggtggctggggatacagtttgcctttatacatcttagggagacacaagatcagtatgtgtatggcgtacattggttcagtcagccttccactgaatacacgattgagtctggcccagtgaatccgcatttttatgtaaacagtaagggaacggggcaatcatataagcgtttgtctcaggggagccccagagggatgacttccagttccgtctgtcctttgtccacaaggaatttccctggacgctaattatgagggaggcgtgtagcttcttatcattgtaactatgttatttagaaataaaacgggaggcaggtttgcctaattcccagcttgaaaaaaaaaaaaaaaaaa

SEQ ID NO: 283804 - DNA, 1000 bp, Homo Sapiens
gacgtgatcaagcaggctgactatgtgccgagcgatcaggacctgcttcgctgccgtgtcctgacttctggaatctttgagaccaagttccaggtggacaaagtcaacttccacatgtttgacgtgggtggccagcgcgatgaacgccgcaagtggatccagtgcttcaacgatgtgactgccatcatcttcgtggtggccagcagcagctacaacatggtcatccgggaggacaaccagaccaaccgcctgcaggaggctctgaacctcttcaagagcatctggaacaacagatggctgcgcaccatctctgtgatcctgttcctcaacaagcaagatctgctcgctgagaaagtccttgctgggaaatcgaagattgaggactactttccagaatttgctcgctacactactcctgaggatgctactcccgagcccggagaggacccacgcgtgacccgggccaagtacttcattcgagatgagtttctgaggatcagcactgccagtggagatgggcgtcactactgctaccctcatttcacctgcgctgtggacactgagaacatccgccgtgtgttcaacgactgccgtgacatcattcagcgcatgcaccttcgtcagtacgagctgctctaagaagggaacccccaaatttaattaaagccttaagcacaattaattaaaagtgaaacgtaattgtacaagcagttaatcacccaccatagggcatgattaacaaagcaacctttcccttcccccgagtgattttgcgaaacccccttttcccttcagcttgcttagatgttccaaatttagaaagcttaaggcggcctacagaaaaaggaaaaaaggccacaaaagttccctctcactttcagtaaaaataaataaaacagcagcagcaaacaaataaaatgaaataaaagaaacaaatgaaataaatattgtgttgtgcagcattaaaaaaaatcaaaataaaaattaaatgtgagcaaag

SEQ ID NO: 283805 - DNA, 575 bp, Homo Sapiens
actcttctggtccccacagactcagagagaacccaccatggtgctgtctcctgccgacaagaccaacgtcaaggccgcctggggtaaggtcggcgcgcacgctggcgagtatggtgcggaggccctggagaggatgttcctgtccttccccaccaccaagacctacttcccgcacttcgacctgagccacggctctgcccaggttaagggccacggcaagaaggtggccgacgcgctgaccaacgccgtggcgcacgtggacgacatgcccaacgcgctgtccgccctgagcgacctgcacgcgcacaagcttcgggtggacccggtcaacttcaagctcctaagccactgcctgctggtgaccctggccgcccacctccccgccgagttcacccctgcggtgcacgcctccctggacaagttcctggcttctgtgagcaccgtgctgacctccaaataccgttaagctggagcctcggtagccgttcctcctgcccgctgggcctcccaacgggccctcctcccctccttgcaccggcccttcctggtctttgaataaagtctgagtgggcggc

SEQ ID NO: 283806 - DNA, 626 bp, Homo Sapiens
acatttgcttctgacacaactgtgttcactagcaacctcaaacagacaccatggtgcatctgactcctgaggagaagtctgccgttactgccctgtggggcaaggtgaacgtggatgaagttggtggtgaggccctgggcaggctgctggtggtctacccttggacccagaggttctttgagtcctttggggatctgtccactcctgatgctgttatgggcaaccctaaggtgaaggctcatggcaagaaagtgctcggtgcctttagtgatggcctggctcacctggacaacctcaagggcacctttgccacactgagtgagctgcactgtgacaagctgcacgtggatcctgagaacttcaggctcctgggcaacgtgctggtctgtgtgctggcccatcactttggcaaagaattcaccccaccagtgcaggctgcctatcagaaagtggtggctggtgtggctaatgccctggcccacaagtatcactaagctcgctttcttgctgtccaatttctattaaaggttcctttgttccctaagtccaactactaaactgggggatattatgaagggccttgagcatctggattctgcctaataaaaaacatttattttcattgc

SEQ ID NO: 283807 - DNA, 774 bp, Homo Sapiens
agggcaagttaagggaatagtggaatgaaggttcatttttcattctcacaaactaatgaaaccctgcttatcttaaaccaacctgctcactggagcagggaggacaggaccagcataaaaggcagggcagagtcgactgttgcttacactttcttctgacataacagtgttcactagcaacctcaaacagacaccatggtgcatctgactcctgaggagaagactgctgtcaatgccctgtggggcaaagtgaacgtggatgcagttggtggtgaggccctgggcagattactggtggtctacccttggacccagaggttctttgagtcctttggggatctgtcctctcctgatgctgttatgggcaaccctaaggtgaaggctcatggcaagaaggtgctaggtgcctttagtgatggcctggctcacctggacaacctcaagggcactttttctcagctgagtgagctgcactgtgacaagctgcacgtggatcctgagaacttcaggctcttgggcaatgtgctggtgtgtgtgctggcccgcaactttggcaaggaattcaccccacaaatgcaggctgcctatcagaaggtggtggctggtgtggctaatgccctggctcacaagtaccattgagatcctggactgtttcctgataaccataagaagaccctatttccctagattctattttctgaacttgggaacacaatgcctacttcaagggtatggcttctgcctaataaagaatgttcagctcaacttcctgat

SEQ ID NO: 283808 - DNA, 1000 bp, Homo Sapiens; identical to SEQ ID NO: 115151

SEQ ID NO: 283809 - DNA, 1000 bp, Homo Sapiens; identical to SEQ ID NO: 220573

SEQ ID NO: 283810 - DNA, 1000 bp, Homo Sapiens; identical to SEQ ID NO: 220574

SEQ ID NO: 283811 - DNA, 1000 bp, Homo Sapiens; identical to SEQ ID NO: 115152

SEQ ID NO: 283812 - DNA, 1000 bp, Homo Sapiens; identical to SEQ ID NO: 220576

SEQ ID NO: 283813 - DNA, 1000 bp, Homo Sapiens
tgaaggtcttgatttgttttagaatgatgcacatttcatgtattccagtttgtttattacttatttggggttgcatcagaaatgtctggagaataattctttgattatgactgttttttaaactaggaaaattggacattaagcatcacaaatgatattaaaaattggctagttgaatctattgggattttctacaagtattctgcctttgcagaaacagatttggtgaatttgaatctcaatttgagtaatctgatcgttctttctagctaatggaaaatgattttacttagcaatgttatcttggtgtgttaagagttaggtttaacataaaggttattttctcctgatatagatcacataacagaatgcaccagtcatcagctattcagttggtaagcttccaggaaaaaggacaggcagaaagagtttgagacctgaatagctcccagatttcagtcttttcctgtttttgttaactttgggttaaaaaaaaaaaaagtctgattggttttaattgaaggaaagatttgtactacagttcttttgttgtaaagagttgtgttgttcttttcccccaaagtggtttcagcaatatttaaggagatgtaagagctttacaaaaagacacttgatacttgttttcaaaccagtatacaagataagcttccaggctgcatagaaggaggagagggaaaatgttttgtaagaaaccaatcaagataaaggacagtgaagtaatccgtaccttgtgttttgttttgatttaataacataacaaataaccaacccttccctgaaaacctcacatgcatacatacacatatatacacacacaaagagagttaatcaactgaaagtgtttccttcatttctgatatagaattgcaattttaacacacataaaggataaacttttagaaacttatcttacaaagtgtattttataaaattaaagaaaataaaattaagaatgttctcaatcaaaaaaaaaaaaaaa

SEQ ID NO: 283814 - DNA, 1000 bp, Homo Sapiens
ctcattatctaatcaaccaaaacttgatgaactccttcagtcccaaattgaaaaaagaaggagtcaaaatattaaaatggtacagatccccttttctatgaaaaacttaaaaataaattttaagaaacaaaacaaagttgacttagaagagaaggatgaaccttgcttgatccacaatctcaggtttcctgatgcatggctaatgacatccaaaacagaggtaatgttattaaatccatatagagtagaagaagccctgctatttaaaagacttcttgagaatcataaacttcctgcagagccactggaaaagccaattatgttaacagagagtctttttaatggatctcattatttagacgttttatataaaatgacagcagatgaccaaagatacagtggatcaacttacctgtctgatcctcgtcttacagcgaatggtttcaagataaaattgataccaggagtttcaattactgaaaattacttggaaatagaaggaatggctaattgtctcccattctatggagtagcagatttaaaagaaattcttaatgctatattaaacagaaatgcaaaggaagtttatgaatgtagacctcgcaaagtgataagttatttagagggagaagcagtgcgtctatccagacaattacccatgtacttatcaaaagaggacatccaagacattatctacagaatgaagcaccagtttggaaatgaaattaaagagtgtgttcatggtcgcccattttttcatcatttaacctatcttccagaaactacatgattaaatatgtttaagaagattagttaccattgaaattggttctgtcataaaacagcatgagtctggttttaaattatctttgtattatgtgtcacatggttattttttaaatgaggattcactgacttgtttttatattgaaaaaagttccacgtattgtagaaaacgtaaataaactaatatagactattcaaaaaaaaaaaaaaaaaa

SEQ ID NO: 283815 - DNA, 1000 bp, Homo Sapiens; identical to SEQ ID NO: 220577

SEQ ID NO: 283816 - DNA, 1000 bp, Homo Sapiens
agaagctgtacagattctagttaatgttgtgaataacatcaattaatgtaactagttaattactatgattatcacctcctgatagtgaacattttgagattgggcattcagatgatggggtttcacccaaccttggggcaggtttttaaaaattagctaggcatcaaggccagaccagggctgggggttgggctgtaggcagggacagtcacaggaatgcaggatgcagtcatcagacctgaaaaaacaacactgggggagggggacggtgaaggccaagttcccaatgagggtgagattgggcctggggtctcacccctagtgtggggccccaggtcccgtgcctccccttcccaatgtggcctatggagagacaggcctttctctcagcctctggaagccacctgctcttttgctctagcacctgggtcccagcatctagagcatggagcctctagaagccatgctcacccgcccacatttaattaacagctgagtccctgatgtcatccttactcgaagagcttagaaacaaagagtgggaaattccactgggcctaccttccttggggatgttcatgggccccagtttccagtttcccttgccagacaagcccatcttcagcagttgctagtccattctccattctggagaatctgctccaaaaagctggccacatctctgaggtgtcagaattaagctgcctcagtaactgctcccccttctccatataagcaaagccagaagctctagctttacccagctctgcctggagactaaggcaaattgggccattaaaagctcagctcctatgttggtattaacggtggtgggttttgttgctttcacactctatccacaggatagattgaaactgccagcttccacctgatccctgaccctgggatggctggattgagcaatgagcagagccaagcagcacagagtcccctggggctagaggtggaggaggcagtcctgggaatgggaaaaacccca

SEQ ID NO: 283817 - DNA, 1000 bp, Homo Sapiens
atggacctggccacactagagatcacagcccacaatgagcgcaagcccaacccgccgccagggctgctgacctggctcatgtccatcgatgtcaagtaccagatctggaagttcggggtcatcttcacagacaactccttcctgtacctgggctggtatatggtgatgtccctcttgggacactacaacaacttcttctttgctgcccatctcctggacatcgccatgggggtcaagacgctgcgcaccatcctgtcctctgtcacccacaatgggaaacagctggtgatgaccgtgggccttctggcggtggtcgtctacctgtacaccgtggtggccttcaacttcttccgcaagttctacaacaagagcgaggatgaggatgaacctgacatgaagtgtgatgacatgatgacgtgttacctgtttcacatgtacgtgggtgtccgggctggcggaggcattggggacgagatcgaggaccccgcgggtgacgaatacgagctctacagggtggtcttcgacatcaccttcttcttcttcgtcatcgtcatcctgttggccatcatccagggtctgatcatcgacgcttttggtgagctccgagaccaacaagagcaagtgaaggaggatatggagaccaagtgcttcatctgtggaatcggcagtgactactttgatacgacaccgcatggcttcgagactcacacgctggaggagcacaacctggccaattacatgtttttcctgatgtatttgataaacaaggatgagacagaacacacgggtcaggagtcttatgtctggaagatgtaccaagagagatgttgggatttcttcccagctggtgattgtttccgtaagcagtatgaggaccagcttagctgacacacccccagctggccctccacccccacctcaagtgccttattctcacagcaagccccttagtccccaagcccctccccctaaggcagctgggggagaggtgacctagtac

SEQ ID NO: 283818 - DNA, 1000 bp, Homo Sapiens; identical to SEQ ID NO: 115156

SEQ ID NO: 283819 - DNA, 1000 bp, Homo Sapiens
cagcctgggcctatggagagccctgggaccgctacaccactctggcagccacacttctcaggacacaggcctgtgtagctgtgacctgctgagctctgagaggccctggatcagcgtggccttgttctgtcaccaatgtacccaccgggccactccttcctgccccaactccttccagctagtgacccacatgccatttgtactgaccccatcacctactcacacaggcatttcctgggtggctactctgtgccagagcctggggctctaacgcctgagcccagggaggccgaagctaacagggaaggcaggcagggctctcctggcttcccatccccagcgattccctctcccaggccccatgacctccagctttcctgtatttgttcccaagagcatcatgcctctgaggccagcctggcctcctgcctctactgggaaggctacttcggggctgggaagtcgtccttactcctgtgggagcctcgcaacccgtgccaagtccaggtcctggtggggcagctcctctgtctcgagcgccctgcagaccctgcccttgtttggggcaggagtagctgagctcacaaggcagcaaggcccgagcagctgagcagggccggggaactggccaagctgaggtgcccaggagaagaaagaggtgaccccagggcacaggagctacctgtgtggacaggactaacactcagaagcctgggggcctggctggctgagggcagttcgcagccaccctgaggagtctgaggtcctgagcactgccaggagggacaaaggagcctgtgaacccaggacaagcatggtcccacatccctgggcctgctgctgagaacctggccttcagtgtaccgcgtctaccctgggattcaggaaaaggcctggggtgacccggcaccccctgcagcttgtagccagccggggcgagtggcacgtttatttaacttttagtaaagtcaaggagaaatgcggtggaaaaaaaaaaaaa

SEQ ID NO: 283820 - DNA, 1000 bp, Homo Sapiens; identical to SEQ ID NO: 115157

SEQ ID NO: 283821 - DNA, 578 bp, Homo Sapiens
ggtataaaatgaaccaagagcttttagtttgggtcaccacagcatctgctcaccaatgcaaagtaagcatgactgctctctttctgatgtccatgctttttggccttgcatgtgggcaagcgatgtctttttgtattccaactgagtatacaatgcacatcgaaaggagagagtgtgcttattgcctaaccatcaacaccaccatctgtgctggatattgtatgacacgggatatcaatggcaaactgtttcttcccaaatatgctctgtcccaggatgtttgcacatatagagacttcatctacaggactgtagaaataccaggatgcccactccatgttgctccctatttttcctatcctgttgctttaagctgtaagtgtggcaagtgcaatactgactatagtgactgcatacatgaagccatcaagacaaactactgtaccaaacctcagaagtcttatctggtaggattttctgtctaatagtgatataatttgcaatttggttaaatgtgcttgcctgaaataaagctaataaaaatattatgtttcacattatcttctgttcattttgag

SEQ ID NO: 283822 - DNA, 1000 bp, Homo Sapiens
taactgtattttctttcactttattaccttctttctaatacaagcatatgttagaattaaagttctaggcatacttttcaaagctgggaagaccctttcagaatcttttcaatgggttttaattttcagttctatttaaaatggtgaatgacactaaactccatgatatttaaggatagtgtgaagatctttggcatgatttaaaggttgagtatgtgaagatataagtgaactaccatgctttgtttacgtgtaaaggaaaataatgtttgatagtaaatgtccacttaaaatacatgaatgggcatttctaaaatgttaaaacataaactcatttccattcatggatatttgtcaacagatttaaagaaaaccacagttattaattaaagaaaattatgtgtagttataaaccaatgaaattttgattaaccttttcaaattaatgttccagtttgaagaccaatcaaatatattatttagtcaacatatactatttagtctcaggttcaaggctacaacaaaaatcaccatctttgtcaaactttggagagggaaaatcttcactttcttaagcaacaatggatattgcctgtgtttgccactgtgtttccctgcctctcaattcgctgaaaaaggaactacctatccttacatttcacctactaatgtctcttctaacatcttagaggtccatggagaaggcatatggagaacatgttttatactgctctataaatagtattccaatcactgtgcttaatttaaatagcattctcttatcatttatcagccttttatgtattttccaagtaaaatattaacatattacttcattggtcttcttttttatctggttctatatgaatgctattttttcccttctcttctaacatgaaatatattttctctttttgatcttgtgctatgaaacaatcttccaaagaactgtataaggtggtcataagtgaatattttaattaaaattggtaaaaataaa

SEQ ID NO: 283823 - DNA, 1000 bp, Homo Sapiens; identical to SEQ ID NO: 115158

SEQ ID NO: 283824 - DNA, 1000 bp, Homo Sapiens
ctcagatatgagtaaaattagcctaatcagaatgttagttcctgaaaacattgacacgtaccttatccacatggcaattgagatccttaaacatggtcctgacagcggacttcaaccttcatgtgatgtcaacaaaaggagatgttttcccggttctgaagagatctgttcaagttctaagagaagcaaggaagaagtaggcatcaatactgagacttcatctgcagagagaaagagacgattacctgtgtggtttgccaaaggaagtgataccagcaagaaattaatggacaaaacgaaaaggggaggtctttttagttaagctggcaattaccagaacaattatgtttcttgctgtattataagaggatagctatattttatttctgaagagtaaggagtagtattttggcttaaaaatcattctaattacaaagttcactgtttattgaagaactggcatcttaaatcagccttccgcaattcatgtagtttctgggtcttctgggagcctacgtgagtacatcacctaacagaatattaaattagacttcctgtaagattgctttaagaaactgttactgtcctgttttctaatctctttattaaaacagtgtatttggaaaatgttatgtgctctgatttgatatagataacagattagtagttacatggtaattatgtgatataaaatattcatatattatcaaaattctgttttgtaaatgtaagaaagcatagttattttacaaattgtttttactgtcttttgaagaagttcttaaatacgttgttaaatggtattagttgaccagggcagtgaaaatgaaaccgcattttgggtgccattaaatagggaaaaaacatgtaaaaaatgtaaaatggagaccaattgcactaggcaagtgtatattttgtattttatatacaatttctattatttttcaagtaataaaacaatgtttttcatactgaatattaaaaaaaaaaaaaaaaaaaa

SEQ ID NO: 283825 - DNA, 576 bp, Homo Sapiens
actcttctggtccccacagactcagagagaacccaccatggtgctgtctcctgccgacaagaccaacgtcaaggccgcctggggtaaggtcggcgcgcacgctggcgagtatggtgcggaggccctggagaggatgttcctgtccttccccaccaccaagacctacttcccgcacttcgacctgagccacggctctgcccaggttaagggccacggcaagaaggtggccgacgcgctgaccaacgccgtggcgcacgtggacgacatgcccaacgcgctgtccgccctgagcgacctgcacgcgcacaagcttcgggtggacccggtcaacttcaagctcctaagccactgcctgctggtgaccctggccgcccacctccccgccgagttcacccctgcggtgcacgcctccctggacaagttcctggcttctgtgagcaccgtgctgacctccaaataccgttaagctggagcctcggtggccatgcttcttgccccttgggcctccccccagcccctcctccccttcctgcacccgtacccccgtggtctttgaataaagtctgagtgggcggc

SEQ ID NO: 283826 - DNA, 584 bp, Homo Sapiens
acactcgcttctggaacgtctgaggttatcaataagctcctagtccagacgccatgggtcatttcacagaggaggacaaggctactatcacaagcctgtggggcaaggtgaatgtggaagatgctggaggagaaaccctgggaaggctcctggttgtctacccatggacccagaggttctttgacagctttggcaacctgtcctctgcctctgccatcatgggcaaccccaaagtcaaggcacatggcaagaaggtgctgacttccttgggagatgccacaaagcacctggatgatctcaagggcacctttgcccagctgagtgaactgcactgtgacaagctgcatgtggatcctgagaacttcaagctcctgggaaatgtgctggtgaccgttttggcaatccatttcggcaaagaattcacccctgaggtgcaggcttcctggcagaagatggtgactgcagtggccagtgccctgtcctccagataccactgagctcactgcccatgattcagagctttcaaggataggctttattctgcaagcaatacaaataataaatctattctgctgagagatcac

SEQ ID NO: 283827 - DNA, 1000 bp, Homo Sapiens
caccaaggcagcgtgggactccatccagtcatttctgcagtgttgtggtataaatggcacgagtgattggaccagtggcccaccagcatcttgcccctcagatcgaaaagtggagggttgctatgcgaaagcaagactgtggtttcattccaatttcctgtatatcggaatcatcaccatctgtgtatgtgtgattgaggtgttggggatgtcctttgcactgaccctgaactgccagattgacaaaaccagccagaccatagggctatgatctgcagtagttctgtggtgaagagacttgtttcatctccggaaatgcaaaaccatttatagcatgaagccctacatgatcactgcaggatgatcctcctcccatcctttccctttttaggtccctgtcttatacaaccagagaagtgggtgttggccaggcacatcccatctcaggcagcaagacaatctttcactcactgacggcagcagccatgtctctcaaagtggtgaaactaatatctgagcatcttttagacaagagaggcaaagacaaactggatttaatggcccaacatcaaagggtgaacccaggatatgaatttttgcatcttcccattgtcgaattagtctccagcctctaaataatgcccagtcttctccccaaagtcaagcaagagactagttgaagggagttctggggccaggctcactggaccattgtcacaaccctctgtttctctttgactaagtgccctggctacaggaattacacagttctctttctccaaagggcaagatctcatttcaatttctttattagagggccttattgatgtgttctaagtctttccagaaaaaaactatccagtgatttatatcctgatttcaaccagtcacttagctgataatcacagtaagaagacttctggtattatctctctatcagataagattttgttaatgtactattttactcttcaataaataaaacagtttattatctcaa

SEQ ID NO: 283828 - DNA, 1000 bp, Homo Sapiens
gaggtgttttgttttcatttttatttcaagttggacagatcttggagataatttcttacctcacatagatgagaaaactaacacccagaaaggagaaatgatgttataaaaaactcataaggcaagagctgagaaggaagcgctgatcttctatttaattccccacccatgacccccagaaagcaggagggcattgcccacattcacagggctcttcagtctcagaatcaggacactggccaggtgtctggtttgggtccagagtgctcatcatcatgtcatagaactgctgggcccaggtctcctgaaatgggaagcccagcaataccacgcagtccctccactttctcaaagcacactggaaaggccattagaattgccccagcagagcagatctgctttttttccagagcaaaatgaagcactaggtataaatatgttgttactgccaagaacttaaatgactggtttttgtttgcttgcagtgctttcttaattttatggctcttctgggaaactcctccccttttccacacgaaccttgtggggctgtgaattctttcttcatccccgcattcccaatatacccaggccacaagagtggacgtgaaccacagggtgtcctgtcagaggagcccatctcccatctccccagctccctatctggaggatagttggatagttacgtgttcctagcaggaccaactacagtcttcccaaggattgagttatggactttgggagtgagacatcttcttgctgctggatttccaagctgagaggacgtgaacctgggaccaccagtagccatcttgtttgccacatggagagagactgtgaggacagaagccaaactggaagtggaggagccaagggattgacaaacaacagagccttgaccacgtggagtctctgaatcagccttgtctggaaccagatctacacctggactgcccaggtctataagccaataaagcccctgtttacttgaaaaaaaaaa

SEQ ID NO: 283829 - DNA, 1000 bp, Homo Sapiens
cagtttagaggggaaaaaaaaacaattattcctaaataaatggataagtagaattaatggttgaggcaggaccatacagagtgtgggaactgctggggatctagggaattcagtgggaccaatgaaagcatggctgagaaatagcaggtagtccaggatagtctaagggaggtgttcccatctgagcccagagataagggtgtcttcctagaacattagccgtagtggaattaacaggaaatcatgagggtgacgtagaattgagtcttccaggggactctatcagaactggaccatctccaagtatataacgatgagtcctcttaatgctaggagtagaaaatggtcctaggaaggggactgaggattgcggtggggggtggggtggaaaagaaagtacagaacaaaccctgtgtcactgtcccaagttgctaagtgaacagaactatctcagcatcagaatgagaaagcctgagaagaaagaaccaaccacaagcacacaggaaggaaagcgcaggaggtgaaaatgctttcttggccagggtagtaagaattagaggttaatgcagggactgtaaaaccaccttttctgcttcaatatctaattcctgtgtagctttgttcattgcatttattaaacaaatgttgtataaccaatactaaatgtactactgagcttcgctgagttaagttatgaaactttcaaatccttcatcatgtcagttccaatgaggtggggatggagaagacaattgttgcttatgaaagaaagctttagctgtctctgttttgtaagctttaagcgcaacatttcttggttccaataaagcattttacaagatcttgcatgctactcttagatagaagatgggaaaaccatggtaataaaatatgaatgataaaaaaaaaaaaaaaaaaaaaaaaaaaaaaaaaaaaaaaaaaaaaaaaaaaaaaaaaaaaaaaaaaaaaaaaaaaaaaaaaaaaaaaaaaaaaaaaaaaa

SEQ ID NO: 283830 - DNA, 1000 bp, Homo Sapiens
actacccgtcttctatctgggcacacgtgtttcacgttgacaggtttgcttgggacgctagtaaccatgggcttgctgacttagccaaagaagagttaagaagaaaatacacacaagtatacagactgttcctagtttcttagacttatctgcatattggataaaataaatgcaattgtgctcttcatttaggatgctttcattgtctttaagatgtgttaggaatgtcaacagagcaaggagaaaaaaggcagtcctggaatcacattcttagcacacctacacctcttgaaaatagaacaacttgcagaattgagagtgattcctttcctaaaagtgtaagaaagcatagagatttgttcgtatttagaatgggatcacgaggaaaagagaaggaaagtgatttttttccacaagatctgtaatgttatttccacttataaaggaaataaaaaatgaaaaacattatttggatatcaaaagcaaataaaaacccaattcagtctcttctaagcaaaattgctaaagagagatgaaccacattataaagtaatctttggctgtaaggcattttcatctttccttcgggttggcaaaatattttaaaggtaaaacatgctggtgaaccaggggtgttgatggtgataagggaggaatatagaatgaaagactgaatcttcctttgttgcacaaatagagtttggaaaaagcctgtgaaaggtgtcttctttgacttaatgtctttaaaagtatccagagatactacaatattaacataagaaaagattatatattatttctgaatcgagatgtccatagtcaaatttgtaaatcttattcttttgtaatatttatttatatttatttatgacagtgaacattctgattttacatgtaaaacaagaaaagttgaagaagatatgtgaagaaaaatgtatttttcctaaatagaaataaatgatcccattttttggtaaaaaaaaaaaaaaaaaaaaaaaaa

SEQ ID NO: 283831 - DNA, 1000 bp, Homo Sapiens
ataatgttgttatttaaagaacaccctatattttgcatagtaccaatcattttaattattattcttcataacaattttaggaggaccagagctactgactatggctaccaaaaagactctacccatattacagatgggcaaattaaggcataagaaaactaagaaatatgcacaatagcagttgaaacaagaagccacagacctaggatttcatgatttcatttcaactgtttgccttctacttttaagttgctgatgaactcttaatcaaatagcataagtttctgggacctcagttttatcattttcaaaatggagggaataatacctaagccttcctgccgcaacagttttttatgctaatcagggaggtcattttggtaaaatacttcttgaagccgagcctcaagatgaaggcaaagcacgaaatgttattttttaattattatttatatatgtatttataaatatatttaagataattataatatactatatttatgggaaccccttcatcctctgagtgtgaccaggcatcctccacaatagcagacagtgttttctgggataagtaagtttgatttcattaatacagggcattttggtccaagttgtgcttatcccatagccaggaaactctgcattctagtacttgggagacctgtaatcatataataaatgtacattaattaccttgagccagtaattggtccgatctttgactcttttgccattaaacttacctgggcattcttgtttcaattccacctgcaatcaagtcctacaagctaaaattagatgaactcaactttgacaaccatgagaccactgttatcaaaactttcttttctggaatgtaatcaatgtttcttctaggttctaaaaattgtgatcagaccataatgttacattattatcaacaatagtgattgatagagtgttatcagtcataactaaataaagcttgcaacaaaattctctgacaaaaaaaaaaaaaaaa

SEQ ID NO: 283832 - DNA, 1000 bp, Homo Sapiens
gtcgtcacctcttccatcatggtgctagtctgcgccatcaacctctacttcgtggtcagctatctgcccagcctgccccaccctgcctacttcggccttgcagccttgctggccgcagcctacctgggcctcagcacctacctggtctggacctgttgccttgcccacggagccacctttctggcccacagctcccaccaccacttcctgtatgggctccttgaagaggaccagaaaggggagacctctggctaggcccacaccagggcctggctgggagtggcatgtatgacgtgactggcctgctggatgtggagggggcgcgtgcaggcagcaggatggagtgggacagttcctgagaccagccaacctgggggctttagggacctgctgtttcctagcgcagccatgtgattaccctctgggtctcagtgtcctcatctgtaaaatggagacgccaccacccttgccatggaggttaagcactttaacacagtgtctggcacttgggacaaaaacaaacaaacaaacaaaaaacatttcaaaaggtatttattgagcacctgcaggcgtgacctgacagcccaagggtgggtggggtgagggcttgaggacttgggcgggacacaggctccaaactggagcttgaaatagtgtctgatgaatgttaaattatctatctatctatttatttatttatttgagacagggaaagggtctccctctgttgccaaggctggagtgcagtggcgcaatcttaactcattgcaacctccaccttctgggttcaagcgattctctttattcagccccgggagtggcgcgcgccaccacgcccagctaatttgtgtattttcagcagagacggggtttgccatgctggccaggctggtctcgaactgctggattcaagtgatccgcccatctccgtctcccaaagtgctgggaattacaggcgtgagccaccaaaacccggcctgattaaagttaaataaatacg

SEQ ID NO: 283833 - DNA, 1000 bp, Homo Sapiens
atggactgaggtcaaaatctaagaagtttcgcagacctgacatccagtaccctgatgctacagacgaggacatcacctcacacatggaaagcgaggagttgaatggtgcatacaaggccatccccgttgcccaggacctgaacgcgccttctgattgggacagccgtgggaaggacagttatgaaacgagtcagctggatgaccagagtgctgaaacccacagccacaagcagtccagattatataagcggaaagccaatgatgagagcaatgagcattccgatgtgattgatagtcaggaactttccaaagtcagccgtgaattccacagccatgaatttcacagccatgaagatatgctggttgtagaccccaaaagtaaggaagaagataaacacctgaaatttcgtatttctcatgaattagatagtgcatcttctgaggtcaattaaaaggagaaaaaatacaatttctcactttgcatttagtcaaaagaaaaaatgctttatagcaaaatgaaagagaacatgaaatgcttctttctcagtttattggttgaatgtgtatctatttgagtctggaaataactaatgtgtttgataattagtttagtttgtggcttcatggaaactccctgtaaactaaaagcttcagggttatgtctatgttcattctatagaagaaatgcaaactatcactgtattttaatatttgttattctctcatgaatagaaatttatgtagaagcaaacaaaatacttttacccacttaaaaagagaatataacattttatgtcactataatcttttgttttttaagttagtgtatattttgttgtgattatctttttgtggtgtgaataaatcttttatcttgaatgtaataagaatttggtggtgtcaattgcttatttgttttcccacggttgtccagcaattaataaaacataaccttttttactgcctaaaaaaaaaaaaaaaaaaaaaaaaaaaaaaaaaa

SEQ ID NO: 283834 - DNA, 1000 bp, Homo Sapiens
aatagagtctgctcacaatatgctgcttatggggagaagaaatcaaggctcagcaatctcataaagttagcccaaaaagtgcctactgctgatctggaggatgttttgccactagctgaagatattactaacatcctctccaaatgctgtgagtctgcctctgaagattgcatggccaaagagctgcctgaacacacagtaaaactctgtgacaatttatccacaaagaattctaagtttgaagactgttgtcaagaaaaaacagccatggacgtttttgtgtgcacttacttcatgccagctgcccaactccccgagcttccagatgtagagttgcccacaaacaaagatgtgtgtgatccaggaaacaccaaagtcatggataagtatacatttgaactaagcagaaggactcatcttccggaagtattcctcagtaaggtacttgagccaaccctaaaaagccttggtgaatgctgtgatgttgaagactcaactacctgttttaatgctaagggccctctactaaagaaggaactatcttctttcattgacaagggacaagaactatgtgcagattattcagaaaatacatttactgagtacaagaaaaaactggcagagcgactaaaagcaaaattgcctgatgccacacccacggaactggcaaagctggttaacaagcactcagactttgcctccaactgctgttccataaactcacctcctctttactgtgattcagagattgatgctgaattgaagaatatcctgtagtcctgaagcatgtttattaactttgaccagagttggagccacccaggggaatgatctctgatgacctaacctaagcaaaaccactgagcttctgggaagacaactaggatactttctactttttctagctacaatatcttcatacaatgacaagtatgatgatttgctatcaaaataaattgaaatataatgcaaaccataaaaaaaaaaaaaaaaaaaaaaa

SEQ ID NO: 283835 - DNA, 1000 bp, Homo Sapiens
tagatattgcacgggagaatatacaaatagcaaaattgaggccaagggccaagagaatatccgaactttaatttcaggaattgaatgggtttgctagaatgtgatatttgaagcatcacataaaaatgatgggacaataaattttgccataaagtcaaatttagctggaaatcctggatttttttctgttaaatctggcaaccctagtctgctagccaggatccacaagtccttgttccactgtgccttggtttctcctttatttctaagtggaaaaagtattagccaccatcttacctcacagtgatgttgtgaggacatgtggaagcactttaagttttttcatcataacataaattattttcaagtgtaacttattaacctatttattatttatgtatttatttaagcatcaaatatttgtgcaagaatttggaaaaatagaagatgaatcattgattgaatagttataaagatgttatagtaaatttattttattttagatattaaatgatgttttattagataaatttcaatcagggtttttagattaaacaaacaaacaattgggtacccagttaaattttcatttcagataaacaacaaataattttttagtataagtacattattgtttatctgaaattttaattgaactaacaatcctagtttgatactcccagtcttgtcattgccagctgtgttggtagtgctgtgttgaattacggaataatgagttagaactattaaaacagccaaaactccacagtcaatattagtaatttcttgctggttgaaacttgtttattatgtacaaatagattcttataatattatttaaatgactgcatttttaaatacaaggctttatatttttaactttaagatgtttttatgtgctctccaaattttttttactgtttctgattgtatggaaatataaaagtaaatatgaaacatttaaaatataatttgttgtcaaagtaaaaaaaaaaaaaaa

SEQ ID NO: 283836 - DNA, 1000 bp, Homo Sapiens; identical to SEQ ID NO: 115161

SEQ ID NO: 283837 - DNA, 924 bp, Homo Sapiens
cagagccccacgaaggaccagaacaagacagagtgcctcctgccgatccaaacatgagccgcctgcccgtcctgctcctgctccaactcctggtccgccccggactccaagctcccatgacccagacaacgcccttgaagacaagctgggttaactgctctaacatgatcgatgaaattataacacacttaaagcagccacctttgcctttgctggacttcaacaacctcaatggggaagaccaagacattctgatggaaaataaccttcgaaggccaaacctggaggcattcaacagggctgtcaagagtttacagaacgcatcagcaattgagagcattcttaaaaatctcctgccatgtctgcccctggccacggccgcacccacgcgacatccaatccatatcaaggacggtgactggaatgaattccggaggaaactgacgttctatctgaaaacccttgagaatgcgcaggctcaacagacgactttgagcctcgcgatcttttgagtccaacgtccagctcgttctctgggccttctcaccacagagcctcgggacatcaaaaacagcagaacttctgaaacctctgggtcatctctcacacattccaggaccagaagcatttcaccttttcctgcggcatcagatgaattgttaattatctaatttctgaaatgtgcagctcccatttggccttgtgcggttgtgttctcatttttatcccattgagactatttatttatgtatgtatgtatttatttatttattgcctggagtgtgaactgtatttattttagcagaggagccatgtcctgctgcttctgcaaaaaactcagagtggggtggggagcatgttcatttgtacctcgagttttaaactggttcctagggatgtgtgagaataaactagactctgaac

SEQ ID NO: 283838 - DNA, 1000 bp, Homo Sapiens
tgacacggtcaaggctctccgcgtgcggcggctcacagtgggagccgcacaggttcctgctcagctactggtaggcgccctgcgtgtgctagcgtactcccgcctcaaggaactgacgctcgaggacctaaagataaccggcaccatgcctccgctgcctctggaagccacaggacttgcactttccagcttgcgcctacgcaacgtgtcgtgggcgacagggcgttcttggctcgccgagctgcagcagtggctcaagccaggcctcaaggtactgagcattgcccaagcacactcgcctgccttttcctgcgaacaggttcgcgccttcccggcccttaccagcctagacctgtctgacaatcctggactgggcgaacgcggactgatggcggctctctgtccccacaagttcccggccatccagaatctagcgctgcgcaacacaggaatggagacgcccacaggcgtgtgcgccgcactggcggcggcaggtgtgcagccccacagcctagacctcagccacaactcgctgcgcgccaccgtaaaccctagcgctccgagatgcatgtggtccagcgccctgaactccctcaatctgtcgttcgctgggctggaacaggtgcctaaaggactgccagccaagctcagagtgctcgatctcagctgcaacagactgaacagggcgccgcagcctgacgagctgcccgaggtggataacctgacactggacgggaatcccttcctggtccctggaactgccctcccccacgagggctcaatgaactccggcgtggtcccagcctgtgcacgttcgaccctgtcggtgggggtgtcgggaaccctggtgctgctccaaggggcccggggctttgcctaagatccaagacagaataatgaatggactcaaactgccttggcttcaggggagtcccgtcaggacgttgaggacttttcgaccaattcaaccctttgccccacctttattaaaatcttaaac

SEQ ID NO: 283839 - DNA, 1000 bp, Homo Sapiens
tggctgccctgctgcagaatctgtaccagcccaccgggggacagctgctgttggatgggaagccccttccccaatatgagcaccgctacctgcacaggcaggtggctgcagtgggacaagagccacaggtatttggaagaagtcttcaagaaaatattgcctatggcctgacccagaagccaactatggaggaaatcacagctgctgcagtaaagtctggggcccatagtttcatctctggactccctcagggctatgacacagaggtagacgaggctgggagccagctgtcagggggtcagcgacaggcagtggcgttggcccgagcattgatccggaaaccgtgtgtacttatcctggatgatgccaccagtgccctggatgcaaacagccagttacaggtggagcagctcctgtacgaaagccctgagcggtactcccgctcagtgcttctcatcacccagcacctcagcctggtggagcaggctgaccacatcctctttctggaaggaggcgctatccgggaggggggaacccaccagcagctcatggagaaaaaggggtgctactgggccatggtgcaggctcctgcagatgctccagaatgaaagccttctcagacctgcgcactccatctccctcccttttcttctctctgtggtggagaaccacagctgcagagtaggcagctgcctccaggatgagttacttgaaatttgccttgagtgtgttacctcctttccaagctcctcgtgataatgcagacttcctggagtacaaacacaggatttgtaattccttactgtaacggagtttagagccagggctgatgctttggtgtggccagcactctgaaactgagaaatgttcagaatgtacggaaagatgatcagctattttcaacataactgaaggcatatgctggcccataaacaccctgtaggttcttgatatttataataaaattggtgttttgtaaaaaaaaaaaaaaaaaaaaaaa

SEQ ID NO: 283840 - DNA, 1000 bp, Homo Sapiens; identical to SEQ ID NO: 115163

SEQ ID NO: 283841 - DNA, 1000 bp, Homo Sapiens; identical to SEQ ID NO: 220584

SEQ ID NO: 283842 - DNA, 1000 bp, Homo Sapiens
ggcattgcccccttccggggattctggcaggagcggctgcatgacattgagagcaaagggctgcagcccactcccatgactttggtgttcggctgccgatgctcccaacttgaccatctctaccgcgacgaggtgcagaacgcccagcagcgcggggtgtttggccgagtcctcaccgccttctcccgggaacctgacaaccccaagacctacgtgcaggacatcctgaggacggagctggctgcggaggtgcaccgcgtgctgtgcctcgagcggggccacatgtttgtctgcggcgatgttaccatggcaaccaacgtcctgcagaccgtgcagcgcatcctggcgacggagggcgacatggagctggacgaggccggcgacgtcatcggcgtgctgcgggatcagcaacgctaccacgaagacattttcgggctcacgctgcgcacccaggaggtgacaagccgcatacgcacccagagcttttccttgcaggagcgtcagttgcggggcgcagtgccctgggcgttcgaccctcccggctcagacaccaacagcccctgagagccgcctggctttcccttccagttccgggagagcggctgcccgactcaggtccgcccgaccaggatcagccccgctcctcccctcttgaggtggtgccttctcacatctgtccagaggctgcaaggattcagcattattcctccaggaaggagcaaaacgcctcttttccctctctaggcctgttgcctcgggcctgggtccgccttaatctggaaggcccctcccagcagcggtaccccagggcctactgccacccgcttcctgtttcttagtcgaatgttagattcctcttgcctctctcaggagtatcttacctgtaaagtctaatctctaaatcaagtatttattattgaagatttaccataagggactgtgccagatgttaggagaactactaaagtgcctaccccagctcaaaaaaaaaaaaaaaaaa

SEQ ID NO: 283843 - DNA, 1000 bp, Homo Sapiens
agtactcccccagctttcccgacacccggagctctacgtgctcctcaggggaggattccgtcttctctcatgagccgctgcccgaggagccctgcctgccccgacacccagcccagcttgccaatggcggactcaaacgccgctgactgccacccacacgccctccccagactccaccgtcagctgtaaccctcacccacagcccctgctgggcccaccacctgtccgtccctgtcccctttcctgctggcaggagccggctgcctaccaggggccttcctgtgtggcctgccttcaccccactcagctcacctctccctccacctcctctccacctgctggtgagaggtgcaaagaggcagatctttgctgccagccacttcatcccctcccagatgttggaccaacacccctccctgccaccaggcactgcctggagggcagggagtgggagccaatgaacaggcatgcaagtgagagcttcctgagctttctcctgtcggtttggtctgttttgccttcacccataagcccctcgcactctggtggcaggtgccttgtcctcagggctacagcagtagggaggtcagtgcttcgtgcctcgattgaaggtgacctctgccccagataggtggtgccagtggcttattaattccgatactagtttgctttgctgaccaaatgcctggtaccagaggatggtgaggcgaaggccaggttgggggcagtgttgtggccctggggcccagccccaaactgggggctctgtatatagctatgaagaaaacacaaagtgtataaatctgagtatatatttacatgtctttttaaaagggtcgttaccagagatttacccatcgggtaagatgctcctggtggctgggaggcatcagttgctatatattaaaaacaaaaaagaaaaaaaaggaaaatgtttttaaaaaggtcatatattttttgctacttttgctgttttatttttttaaattatgttctaaac

SEQ ID NO: 283844 - DNA, 1000 bp, Homo Sapiens
tctgcctcaaacccacagcctgggtagcaggaggaccttgatgctcctggcacagatgaggagaatctctcttttctcctgcttgaaggacagacatgactttggatttccccaggaggagtttggcaaccagttccaaaaggctgaaaccatccctgtcctccatgagatgatccagcagatcttcaatctcttcagcacaaaggactcatctgctgcttgggatgagaccctcctagacaaattctacactgaactctaccagcagctgaatgacctggaagcctgtgtgatacagggggtgggggtgacagagactcccctgatgaaggaggactccattctggctgtgaggaaatacttccaaagaatcactctctatctgaaagagaagaaatacagcccttgtgcctgggaggttgtcagagcagaaatcatgagatctttttctttgtcaacaaacttgcaagaaagtttaagaagtaaggaatgaaaactggttcaacatggaaatgattttcattgattcgtatgccagctcacctttttatgatctgccatttcaaagactcatgtttctgctatgaccatgacacgatttaaatcttttcaaatgtttttaggagtattaatcaacattgtattcagctcttaaggcactagtcccttacagaggaccatgctgactgatccattatctatttaaatatttttaaaatattatttatttaactatttataaaacaacttatttttgttcatattatgtcatgtgcacctttgcacagtggttaatgtaataaaatgtgttctttgtatttggtaaatttattttgtgttgttcattgaacttttgctatggaacttttgtacttgtttattctttaaaatgaaattccaagcctaattgtgcaacctgattacagaataactggtacacttcatttgtccatcaatattatattcaagatataagtaaaaataaactttctgtaaacca

SEQ ID NO: 283845 - DNA, 803 bp, Homo Sapiens
gcccatagtttattataaaggtgactgcaccctgcagccaccagcactgcctggctccacgtgcctcctggtctcagtatggcgctgtcctgggttcttacagtcctgagcctcctacctctgctggaagcccagatcccattgtgtgccaacctagtaccggtgcccatcaccaacgccaccctggaccagatcactggcaagtggttttatatcgcatcggcctttcgaaacgaggagtacaataagtcggttcaggagatccaagcaaccttcttttacttcacccccaacaagacagaggacacgatctttctcagagagtaccagacccgacaggaccagtgcatctataacaccacctacctgaatgtccagcgggaaaatgggaccatctccagatacgtgggaggccaagagcatttcgctcacttgctgatcctcagggacaccaagacctacatgcttgcttttgacgtgaacgatgagaagaactgggggctgtctgtctatgctgacaagccagagacgaccaaggagcaactgggagagttctacgaagctctcgactgcttgcgcattcccaagtcagatgtcgtgtacaccgattggaaaaaggataagtgtgagccactggagaagcagcacgagaaggagaggaaacaggaggagggggaatcctagcaggacacagccttggatcaggacagagacttggggccatcctgcccctccaacccgacatgtgtacctcagctttttccctcacttgcatcaataaagcttctgtgtttggaacagct

SEQ ID NO: 283846 - DNA, 1000 bp, Homo Sapiens
atgcatttaaatacagtcttccatttgcaagggaaaagtctcttgtaatccgaatctctttttgctttcgaactgctagtcaagtgcgtccacgagctgtttactagggatccctcatctgtccctccgggacctggtgctgcctctacctgacactcccttgggctccctgtaacctcttcagaggccctcgctgccagctctgtatcaggacccagaggaaggggccagaggctcgttgactggctgtgtgttgggattgagtctgtgccacgtgtttgtgctgtggtgtgtccccctctgtccaggcactgagataccagcgaggaggctccagagggcactctgcttgttattagagattacctcctgagaaaaaaggttccgcttggagcagaggggctgaatagcagaaggttgcacctcccccaaccttagatgttctaagtctttccattggatctcattggacccttccatggtgtgatcgtctgactggtgttatcaccgtgggctccctgactgggagttgatcgcctttcccaggtgctacacccttttccagctggatgagaatttgagtgctctgatccctctacagagcttccctgactcattctgaaggagccccattcctgggaaatattccctagaaacttccaaatcccctaagcagaccactgataaaaccatgtagaaaatttgttattttgcaacctcgctggactctcagtctctgagcagtgaatgattcagtgttaaatgtgatgaatactgtattttgtattgtttcaattgcatctcccagataatgtgaaaatggtccaggagaaggccaattcctatacgcagcgtgctttaaaaaataaataagaaacaactctttgagaaacaacaatttctactttgaagtcataccaatgaaaaaatgtatatgcacttataattttcctaataaagttctgtactcaaatgtagccaccaaaaaaaaaaaaaaaaa

SEQ ID NO: 283847 - DNA, 1000 bp, Homo Sapiens
caatcagacgaattctccccccccccccaaaaaaaaaagccatccccccgctctgccccgtcgcacattcggcccccgcgactcggccagagcggcgctggcagaggagtgtccggcaggagggccaacgcccgctgttcggtttgcgacacgcagcagggaggtgggcggcagcgtcgccggcttccagacaccaatgggaatcccaatggggaagtcgatgctggtgcttctcaccttcttggccttcgcctcgtgctgcattgctgcttaccgccccagtgagaccctgtgcggcggggagctggtggacaccctccagttcgtctgtggggaccgcggcttctacttcagcaggcccgcaagccgtgtgagccgtcgcagccgtggcatcgttgaggagtgctgtttccgcagctgtgacctggccctcctggagacgtactgtgctacccccgccaagtccgagagggacgtgtcgacccctccgaccgtgcttccggacaacttccccagataccccgtgggcaagttcttccaatatgacacctggaagcagtccacccagcgcctgcgcaggggcctgcctgccctcctgcgtgcccgccggggtcacgtgctcgccaaggagctcgaggcgttcagggaggccaaacgtcaccgtcccctgattgctctacccacccaagaccccgcccacgggggcgcccccccagagatggccagcaatcggaagtgagcaaaactgccgcaagtctgcagcccggcgccaccatcctgcagcctcctcctgaccacggacgtttccatcaggttccatcccgaaaatctctcggttccacgtccccctggggcttctcctgacccagtccccgtgccccgcctccccgaaacaggctactctcctcggccccctccatcgggctgaggaagcacagcagcatcttcaaacatgtacaaaatcgattggctttaaacacccttcacataccctcccccc

SEQ ID NO: 283848 - DNA, 1000 bp, Homo Sapiens
gcccctctggacacagccccatgtacacggcctcaagggatgtctcacatcctctgtctatttgagacttagaaaaatcctacaaggctggcagtgacagaactaagatgatcatctccagtttatagaccagaaccagagctcagagaggctagatgattgattaccaagtgccggactagcaagtgctggagtcgggactaacccaggtcccttgtcccaagttccactgctgcctcttgaatgcagggacaaatgccacacggctctcaccagtggctagtggtgggtactcaatgtgtacttttgggttcacagaagcacagcacccatgggaagggtccatctcagagaatttacgagcagggatgaaggcctccctgtctaaaatccctccttcatcccccgctggtggcagaatctgttaccagaggacaaagcctttggctcttctaatcagagtgcaagctgggagcacaggcactgcaggagagaatgcccagtgaccagtcactgaccctgtgcagaacctcctggaagcgagctttgctgggagagggggtagctagcctgagagggaaccctccaagggacctcaaaggtgattgtgccaggctctgcgcctgccccacaccctcccttaccctcctccagaccattcaggacacagggaaatcagggttacaaatcttcttgatccacttctctcaggatcccctctcttcctacccttcctcaccacttccctcagtcccaactccttttccctatttccttctcctcctgtctttaaagcctgcctcttccaggaagacccccctattgctgctggggctccccatttgcttactttgcatttgtgcccactctccacccctgctcccctgagctgaaataaaaatacaataaacttactataaagataaaaaaaaaaaaaaaaaaaaaaaaaaaaaaaaaaaaaaaaaaaaaaaaaaaaaaaaaaaaaaaaaaaaaaaaaaaa

SEQ ID NO: 283849 - DNA, 1000 bp, Homo Sapiens; identical to SEQ ID NO: 115165

SEQ ID NO: 283850 - DNA, 1000 bp, Homo Sapiens; identical to SEQ ID NO: 220586

SEQ ID NO: 283851 - DNA, 1000 bp, Homo Sapiens
cttcacccttggggatgaaataatggaagctggttaaagtggatgaggttggaaagagttgccataatgaggtcccacgtggcttcttcgataggagccacaacttggggtgggaagaacttgtccctcaggcttgttgccctctgcagttgatctccaaagttttaaacctgttaaattaattttgacaaataagttaccctcaactcagatcaaaaatgggcagccaagtcttcggtaggaattggagccggtgtaattcctccctaagaggcaacctgttgaatttactctctcagagtaaatggtgggaagggatccctttgtatacttttttaaatactacaaattagtgtcaggcagttcccagaaagagacaagaaatcctagtggcctcccagactgcagggtccccaaggatggaaagggaatgttctgctggttctaccctgtttgttgtgtcttgctatacagaaaaaccacatttcttttatatactgtacgtgggcatatcttgttgttcagtttgggtgtctgctaaagaggaagtgcactggccctctttgaaagggctttacagtgggggcaccaagaccccaaaggcccaggccaggagactgttaaagtgaaaaggcaatctatgactcaccttgctctgccatccctggcagcccccaccggtgtcctgttcctgccacatggagcttgacttcatgccagctataatctcccctgccttcctttaatcccaatttcccctgctcactcttccacagatataaagaacaaacacttagcatcccacactcaccccttctaatcctgaagggaagcccattctaaactcctttcctgcaaacccatttccagctcctagtagctttcctcccaaaggctttctttccaatcctttatagctttggagacgcctccccaattccccagggaaggaaactgttgtgtccaatccccattaaagacaaattgatcagtgcttccc

SEQ ID NO: 283852 - DNA, 1000 bp, Homo Sapiens; identical to SEQ ID NO: 220587

SEQ ID NO: 283853 - DNA, 1000 bp, Homo Sapiens
caggtcggcccgcctgaactctcagaggctagtgttcaacaggccctttctgatgttcattgtggataacaacatcctcttccttggcaaagtgaaccgcccctgaggtggggcttctcctgaaatctacaggcctcagggtgggagatgaagggggctatgctatggcccatctgtatgctggtagctagtgatttacacaggtttagttgactaatgaggcattacaaataatattactctatgatgattgcttccacccacacgactgcaacatacaggtgccttggggaaatgtggagaacattcaatcttgccgtcactattcatcaatgaagattagcactgagatccagagaggctggatgacttgctcaagttcaccagcatggtagtggcaaagagaggtccagagtcctggcccttgatgcccagctcagtgccacaaagctcagtaggagggatgttccagtggatgagggccaccaggaagcacaggtccaaggctggtcccacacttatcagcagcaacaactgtcagttcatcctgcatgggaaaaatgttggaatgggagtctgaaatggggctactgtttcagtcctaacgtgctgtgtgacattgggacaacactttccctctctggacctcagtttccctctgtatacaaggatcagattcttgctgtgacccaagaactcctgaaatcatatagaaaggctggggtgggccctgtcattcgtggttgatttcaatacactcaagtgccattcatcctttaagaaaaacatctggatatcaaggtggaaatggcccatttaatgattgattatatcattttgtggatatagttataatctgatgggcctggctgggagtggaagaagggaagccttttgcaaatagtagagtgtcagttgcaggtgccaatgactaactttttgaattctatgttggcattaacaataaagcattttgcaaacaaaaaaaaaaaaaaaaaaa

SEQ ID NO: 283854 - DNA, 1000 bp, Homo Sapiens
aaagacagtgacctggagtgaaacagaatctacataacctaagcccatatactctgcactgtgtaaaggaaaagggagaaatgtattatacttgagacattgcacctaccccggaaggctggaaatacagaaacagcatggagttgcaagtcctctgaagacaatgagaggatttaggatgagcccgataggtgtggcagaccaaatggacatttctctaaaaaaccagtatatatagtctgttcatatgtaaaattcaatggaagagaggtggaacagtgctgttattttaaacagaaggttgtattattatgttgttttgtttttttactattgcttgattaaatttggcatttaaatagtggtggaaatattttatataattttcattttttggttgtgcagttccttggctactgtttttcttttacttcagttttttaaaaatctcaaatgaaaaagtcttcgatacaatattgttaagctgtattataagtattgttacacagggttatgcaattcccggcctggagcatttttgaaattcaaattgtctgtcctgtggagcaggcagtgattttgttccaaaactttgtatacacatttggagaaaagtactttatattttcagtgttttgtctgattttaatgtccgttcttagccaagctgctagcaggtgttaattggatccctttccttcactgaaatggaagagtttataagcttacgttagtattgtaatatgtaaagtaagcccaacaaaaatttttaaaaatttgatgatccccaatatatctaccattgtatgttaaataaatcaccatttttgtagaaaaaattctacctgagagtaattgtcaatgagtacatgtgtataagttgtatcccactctccccacttttatcttttccagtggtcttctgttaatgtagtgtcttttacaagttaatcattaaatttgttagatcttgttatgggctaaaaaaaaaaaaaaaaaa

SEQ ID NO: 283855 - DNA, 1000 bp, Homo Sapiens
gtttttctcctttccattgtcggatgagaatgatgtttttgacaagctaagtgtcattgcagaagactctgagagcggcaagcagaatcctggtgacagctgcagcctcgggaccccgcctgggcaggggccccaaagctaggctctgagaaggaaacacactcggctgggcacagtgacgtactccatctcacatctgcctcagtgagggatcagggcagcaaacaagggccaagaccatctgagccagccccacatctagaactcccagaccctggacttagccaccagagagctacattttaaaggctgtcttggcaaaaatactccatttgggaactcactgccttataaaggctttcatgatgttttcagaagttggccactgagagtgtaattttcagccttttatatcactaaaataagatcatgttttaattgtgagaaacagggccgagcacagtggctcacgcctgtaataccagcaccttagaggtcgaggcaggcggatcacttgaggtcaggagttcaagaccagcctggccaatatggtgaaacccagtctctactaaaaatacaaaaattagctaggcatgatggcgcatgcctataatcccagctactcgagtgcctgaggcaggagaattgcatgaacccgggaggaggaggaggaggttgcagtgagccgagatagcggcactgcactccagcctgggtgacaaagtgagactccatctcaaaaaaaaaaaaaaaaaaaattgtgagaaacagaaatacttaaaatgaggaataagaatggagatgttacatctggtagatgtaacattctaccagattatggatggactgatctgaaaatcgacctcaactcaagggtggtcagctcaatgctacacagagcacggacttttggattctttgcagtactttgaatttatttttctacctatatatgttttatatgctgctggtgctccattaaagttttactctgtgttgc

SEQ ID NO: 283856 - DNA, 1000 bp, Homo Sapiens; identical to SEQ ID NO: 115167

SEQ ID NO: 283857 - DNA, 1000 bp, Homo Sapiens
tcgggccagacagcaagagcagtgccctggcctgtaccctgcccacactcccagccaaagtctacgtgggtgtgaaacaggagatcgccgagatgcggatacctgccctcaacgcctacatgaagagcctgctcagcctgccggtctgggtgctgatggatgaggacgtccggatcttcttttaccagtcgccctatgactcagagcaggtgccccaggcactccgccggctccgcccgcgcacccggaaagtcaagagcgtgtccccacagggcaacagcgttgaccgcatggcagctccgagagcagaggctctatttgacttcactggaaacagcaaactggagctgaatttcaaagctggagatgtgatcttcctcctcagtcggatcaacaaagactggctggagggcactgtccggggagccacgggcatcttccctctctccttcgtgaagatcctcaaagacttccctgaggaggacgaccccaccaactggctgcgttgctactactacgaagacaccatcagcaccatcaaggacatcgcggtggaggaagatctcagcagcactcccctattgaaagacctgctggagctcacaaggcgggagttccagagagaggacatagctctgaattaccgggacgctgagggggatctggttcggctgctgtcggatgaggacgtagcgctcatggtgcggcaggctcgtggcctcccctcccagaagcgcctcttcccctggaagctgcacatcacgcagaaggacaactacagggtctacaacacgatgccatgagctgacggtgtccctggagcagtgaggggacaccagcaaaaaccttcagctctcagaggagattgggaccaggaaaacctgggaggatgggcagacttcctgtctttgaggctaatggacccgtggggcttgtaatctgtctctttctactatttacatctgatttaaataaaccattccatctgaaaggggcaaaa

SEQ ID NO: 283858 - DNA, 1000 bp, Homo Sapiens
atgggtatttaaacaataaatgtgcagttttaactaacaggatatttaatgacaaccttctggttggtagggacatctgtttctaaatgtttattatgtacaatacagaaaaaaattttataaaattaagcaatgtgaaactgaattggagagtgataatacaagtcctttagtcttacccagtgaatcattctgttccatgtctttggacaaccatgaccttggacaatcatgaaatatgcatctcactggatgcaaagaaaatcagatggagcatgaatggtactgtaccggttcatctggactgccccagaaaaataacttcaagcaaacatcctatcaacaacaaggttgttctgcataccaagctgagcacagaagatgggaacactggtggaggatggaaaggctcgctcaatcaagaaaattctgagactattaataaataagactgtagtgtagatactgagtaaatccatgcacctaaaccttttggaaaatctgccgtgggccctccagatagctcatttcattaagtttttccctccaaggtagaatttgcaagagtgacagtggattgcatttcttttggggaagctttcttttggtggttttgtttattataccttcttaagttttcaaccaaggtttgcttttgttttgagttactggggttatttttgttttaaataaaaataagtgtacaataagtgtttttgtattgaaagcttttgttatcaagattttcatacttttaccttccatggctctttttaagattgatacttttaagaggtggctgatattctgcaacactgtacacataaaaaatacggtaaggatactttacatggttaaggtaaagtaagtctccagttggccaccattagctataatggcactttgtttgtgttgttggaaaaagtcacattgccattaaactttccttgtctgtctagttaatattgtgaagaaaaataaagtacagtgtgagatactg

SEQ ID NO: 283859 - DNA, 1000 bp, Homo Sapiens; identical to SEQ ID NO: 220589

SEQ ID NO: 283860 - DNA, 1000 bp, Homo Sapiens
cgctgtgtcccggcagatccgcagctcgaaaaagaacaagccacagaaacgggctcgctcgtgccaggacacagcagtgtctttcaaaaaatcaaaaccagaagttttatcagcagcaggaaggatgtgggactctgtccaagttcaccgtcaccatcaagccactggctgtggaaggagtttgtccaacagggtcagtgtcacagccacaacttcagaaagcagccatcccgcgtgtcgtccaaacagcagtgcctgcgtcccgctccacggagtcttccagaacacctccctctgaactaatcccggagcaccccacccccagcgagtcccacctggacctcttcaaagtcaaaactcttctctcgggacaaacaaatattcgggactttcgaagccctgaacttgagacaccaagtttgtctccatggaaacacgtagccgctgcagttggacagctgcgtgctggagttctgtccccaaaccaactgcagagaagaaagacgagcctcggcccaggacgcgatttctaacgaaatgcaatagttttctctttttggaaaaatgtttataccaatagttttgtgcgctaattgttattagaacgtttcttatgaatgtgtacattgcagtatattcagtcccaaaattcagtcccaaatgttttgttctcattcacacagaaggtactaatgtcagctcacgtggcctttaaaaacctacttccccgcccgcaggagctcagagcatcgctgggcctgcgccagagtgaggggtgcaggaagacaaagacgcgtgctcactttagaaacgaaaagctgggaataatcacactgtttgtctggtcgtatagcccaaaccttagttgaaatcagacagaaagaatgtctttaaaatatacatctcctctccttggagacactgaagctcacagttaacggattgtaatgcccggcttttcctcactcctggtaaccaatacaagctggtttctgcctta

SEQ ID NO: 283861 - DNA, 1000 bp, Homo Sapiens
ggggttggcttggtttcaataaggaacggggacacttacaaattgctgcttgtccaaatcaggatccactgcaaggaacaacaggccttattccactgctggggattgatgtgtgggagcacgcttactaccttcagtataaaaatgtcaggcctgattatctaaaagctatttggaatgtaatcaactgggagaatgtaactgaaagatacatggcttgcaaaaagtaaaccacgatcgttatgctgagtatgttaagctctttatgactgtttttgtagtggtatagagtactgcagaatacagtaagctgctctattgtagcatttcttgatgttgcttagtcacttatttcataaacaacttaatgttctgaataatttcttactaaacattttgttattgggcaagtgattgaaaatagtaaatgctttgtgtgattgaatctgattggacattttcttcagagagctaaattacaattgtcatttataaaaccatcaaaaatattccatccatatactttggggacttgtagggatgcctttctagtcctattctattgcagttatagaaaatctagtcttttgccccagttacttaaaaataaaatattaacactttcccaagggaaacactcggctttctatagaaaattgcactttttgtcgagtaatcctctgcagtgatacttctggtagatgtcacccagtggtttttgttaggtcaaatgttcctgtatagtttttgcaaatagagctgtatactgtttaaatgtagcaggtgaactgaactggggtttgctcacctgcacagtaaaggcaaacttcaacagcaaaactgcaaaaaggtggtttttgcagtaggagaaaggaggatgtttatttgcagggcgccaagcaaggagaattgggcagctcatgcttgagacccaatctccatgatgacctacaagctagagtatttaaaggcagtggtaaatttcaggaaagcagaagtt

SEQ ID NO: 283862 - DNA, 1000 bp, Homo Sapiens; identical to SEQ ID NO: 115168

SEQ ID NO: 283863 - DNA, 1000 bp, Homo Sapiens
ggcagtactgctatgaactggacgaaaaggcagtgaggcctgggtaccccaagctcatccgagatgtctggggcatcgagggccccatcgatgccgccttcacccgcatcaactgtcaggggaagacctacctcttcaagggtagtcagtactggcgctttgaggatggtgtcctggaccctgattacccccgaaatatctctgacggcttcgatggcatcccggacaacgtggatgcagccttggccctccctgcccatagctacagtggccgggagcgggtctacttcttcaaggggaaacagtactgggagtaccagttccagcaccagcccagtcaggaggagtgtgaaggcagctccctgtcggctgtgtttgaacactttgccatgatgcagcgggacagctgggaggacatcttcgagcttctcttctggggcagaacctctgctggtaccagacagccccagttcattagccgggactggcacggtgtgccagggcaagtggacgcagccatggctggccgcatctacatctcaggcatggcaccccgcccctccttggccaagaaacaaaggtttaggcatcgcaaccgcaaaggctaccgttcacaacgaggccacagccgtggccgcaaccagaactcccgccggccatcccgcgccatgtggctgtccttgttctccagtgaggagagcaacttgggagccaacaactatgatgactacaggatggactggcttgtgcctgccacctgtgaacccatccagagtgtcttcttcttctctggagacaagtactaccgagtcaatcttcgcacacggcgagtggacactgtggaccctccctacccacgctccatcgctcagtactggctgggctgcccagctcctggccatctgtaggagtcagagcccacatggccgggccctctgtagctccctcctcccatctccttcccccagcccaataaaggtcccttagccccgagtttaaa

SEQ ID NO: 283864 - DNA, 1000 bp, Homo Sapiens; identical to SEQ ID NO: 220591

SEQ ID NO: 283865 - DNA, 1000 bp, Homo Sapiens
tggggccccgcactgcatagggccttttgtttgttttttgagatggagtctcgctctgttgcctaggctggagtgcagtgaggcaatctgaggtcactgcaacctccacctcccgggttcaagcaattctcctgcctcagcctcccgattagctgggatcacaggtgtgcaccaccatgcccagctaattatttatttcttttgtatttttagtagagacagggtttcaccatgttggccaggctggtttcgaactcctgacctcaggtgatcctcctgcctcggcctcccaaagtgctgggattacaggtgtgagccaccacacctgacccataggtcttcaataaatatttaatggaaggttccacaagtcaccctgtgatcaacagtacccgtatgggacaaagctgcaaggtcaagatggttcattatggctgtgttcaccatagcaaactggaaacaatctagatatccaacagtgagggttaagcaacatggtgcatctgtggatagaacgccacccagccgcccggagcagggactgtcattcagggaggctaaggagagaggcttgcttgggatatagaaagatatcctgacattggccaggcatggtggctcacgcctgtaatcctggcactttgggaggacgaagcgagtggatcactgaagtccaagagttcgagaccggcctgcgagacatggcaaaaccctgtctcaaaaaagaaagaatgatgtcctgacatgaaacagcaggctacaaaaccactgcatgctgtgatcccaattttgtgtttttctttctatatatggattaaaacaaaaatcctaaagggaaatacgccaaaatgttgacaatgactgtctccaggtcaaaggagagaggtgggattgtgggtgacttttaatgtgtatgattgtctgtattttacagaatttctgccatgactgtgtattttgcatgacacattttaaaaataataaacactatttttagaat

SEQ ID NO: 283866 - DNA, 1000 bp, Homo Sapiens; identical to SEQ ID NO: 115169

SEQ ID NO: 283867 - DNA, 1000 bp, Homo Sapiens
gtatctagtcaggggaaaagactgcatttaggagatagaaaatagtttggattacttaaaggaataaggtgttgcctggaatttctggtttgtaaggtggtcactgttcttttttaaaatatttgtaatatggaatgggctcagtaagaagagcttggaaaatgcagaaagttatgaaaaataagtcacttataattatgctacctactgataaccactcctaatattttgattcattttctgcctatcttctttcacatatgtgtttttttacatacgtccttttccccccagtttgtttccttttattttatagagcagaaccctagtcttttaaaccagtttagagtgaaatatatgctatatcagtttttactttctctagggagaaaaattaatttactagaaaggcatgaaatgatcatgggaagagtggttaagactactgaagagaaatatttggaaaataagatttcgatatcttctttttttttgagatggagtctggctctgtctcccaggctggagtgcagtggcgtaatctcggctcactgcaagctccgcctcctgggttgacaccattttcctgcctcagcctcctgagtagttgggactaccagtagatgggactacaggcacctgccaacacgcccggctaatttttttgtatttttagtagagacggggtttcaccatgttagccaggatggtctggatctcctgacctcgtgatccacccgcctcggcctcccaaagtgctgcgattacaggcatgagccaccgcgcctggccgctttcgatattttctaaactttaattcaaaagcactttgtgctgtgttctatataaaaaacataataaaaattgaaatgaaagaataattgttattataaaagtactagcttacttttgtatggattcagaatatactaaattaactttttaaaacacaacttttaaaaaatgtatcaaaaataataaacgtgttctgatattttta

SEQ ID NO: 283868 - DNA, 1000 bp, Homo Sapiens
tcagtgcatctgggaagatttctacctgaccaacagttccttcagcttccatttcgcccctcatttatccctcaacccccagcccacaggtgtttatacagctcagctttttgtcttttctgaggagaaacaaataagaccataaagggaaaggattcatgtggaatataaagatggctgactttgctctttcttgactcttgttttcagtttcaattcagtgctgtacttgatgacagacacttctaaatgaagtgcaaatttgatacatatgtgaatatggactcagttttcttgcagatcaaatttcacgtcgtcttctgtatactgtggaggtacactcttatagaaagttcaaaaagtctacgctctcctttctttctaactccagtgaagtaatggggtcctgctcaagttgaaagagtcctatttgcactgtagcctcgccgtctgtgaattggaccatcctatttaactggcttcagcctccccaccttcttcagccacctctctttttcagttggctgacttccacacctagcatctcatgagtgccaagcaaaaggagagaagagagaaatagcctgcgctgttttttagtttgggggttttgctgtttccttttatgagacccattcctatttcttatagtcaatgtttcttttatcacgatattattagtaagaaaacatcactgaaatgctagctgcaagtgacatctctttgatgtcatatggaagagttaaaacaggtggagaaattccttgattcacaatgaaatgctctcctttcccctgcccccagaccttttatccacttacctagattctacatattctttaaatttcatctcaggcctccctcaaccccaccacttcttttataactagtcctttactaatccaacccatgatgagctcctcttcctggcttcttactgaaaggttaccctgtaacatgcaattttgcatttgaataaagcctgctttttaagtgttaa

SEQ ID NO: 283869 - DNA, 1000 bp, Homo Sapiens; identical to SEQ ID NO: 115170

SEQ ID NO: 283870 - DNA, 1000 bp, Homo Sapiens
ttacagcactccagccaaaaaatacagcactggcatgattcaccttctcctgcaggtgaccattgatggcaggaactacattgtcgatgctgggtttggacgctcataccagatgtggcagcctctggagttaatttctgggaaggatcagcctcaggtgccttgtgtcttccgtttgacggaagagaatggattctggtatctagaccaaatcagaagggaacagtacattccaaatgaagaatttcttcattctgatctcctagaagacagcaaataccgaaaaatctactcctttactcttaagcctcgaacaattgaagattttgagtctatgaatacatacctgcagacatctccatcatctgtgtttactagtaaatcattttgttccttgcagaccccagatggggttcactgtttggtgggcttcaccctcacccataggagattcaattataaggacaatacagatctaatagagttcaagactctgagtgaggaagaaatagaaaaagtgctgaaaaatatatttaatatttccttgcagagaaagcttgtgcccaaacatggtgatagattttttactatttagaataaggagtaaaacaatcttgtctatttgtcatccagctcaccagttatcaactgacgacctatcatgtatcttctgtacccttaccttattttgaagaaaatcctagacatcaaatcatttcacctataaaaatgtcatcatatataattaaacagctttttaaagaaacataaccacaaaccttttcaaataataataataataataataaaaaatgtattttaaagatggcctgtggttatcttggaaattggtgatttatgctagaaagcttttaatgttggtttattgttgaattcctagaaaagttttattggtagatgagtaaataaaatattgtaaaaaaacttattgtctataaagtatattaaaacattgttggctaataaaaaaaaaaaaaaa

SEQ ID NO: 283871 - DNA, 1000 bp, Homo Sapiens
ctgcaggtgctggtgggtgtggtgaaggatgagggctcgtattttctggtttacggggccccaggcttcagcaaagacaacgagtctctcatcagccgggccgagttcctggccggggtgcgggtcggggttccccaggtaagtgacctggcagccgaggctgtggtcctgcattacacagactggctgcatcccgaggacccggcacgcctgagggaggccctgagcgatgtggtgggcgaccacaatgtcgtgtgccccgtggcccagctggctgggcgactggctgcccagggtgcccgggtctacgcctacgtctttgaacaccgtgcttccacgctctcctggcccctgtggatgggggtgccccacggctacgagatcgagttcatctttgggatccccctggacccctctcgaaactacacggcagaggagaaaatcttcgcccagcgactgatgcgatactgggccaactttgcccgcacaggggatcccaatgagccccgagaccccaaggccccacaatggcccccgtacacggcgggggctcagcagtacgttagtctggacctgcggccgctggaggtgcggcgggggctgcgcgcccaggcctgcgccttctggaaccgcttcctccccaaattgctcagcgccaccgacacgctcgacgaggcggagcgccagtggaaggccgagttccaccgctggagctcctacatggtgcactggaagaaccagttcgaccactacagcaagcaggatcgctgctcagacctgtgaccccggcgggacccccatgtcctccgctccgcccggccccctagctgtatatactatttatttcagggctgggctataacacagacgagccccagactctgcccatccccaccccaccccgacgtcccccggggctcccggtcctctggcatgtcttcaggctgagctcctccccgcgtgccttcgccctctggctgcaaataaactgttacaggcc

SEQ ID NO: 283872 - DNA, 1000 bp, Homo Sapiens
gcaggttcacctgcaggaggaagcccatccaccacttccttggcatcagcaccttctcacagtacacagtggtggatgaaaatgcagtagccaaaattgatgcagcctcgcctctagagaaagtctgtctcattggctgtggattttcaactggttatgggtctgcagtcaatgttgccaaggtcaccccaggctctacctgtgctgtgtttggcctgggaggggtcggcctatctgctattatgggctgtaaagcagctggggcagccagaatcattgcggtggacatcaacaaggacaaatttgcaaaggccaaagagttgggtgccactgaatgcatcaaccctcaagactacaagaaacccatccaggaggtgctaaaggaaatgactgatggaggtgtggatttttcatttgaagtcatcggtcggcttgacaccatgatggcttccctgttatgttgtcatgaggcatgtggcacaagtgtcatcgtaggggtacctcctgattcccaaaacctctcaatgaaccctatgctgctactgactggacgtacctggaagggagctattcttggtggctttaaaagtaaagaatgtgtcccaaaacttgtggctgattttatggctaagaagttttcattggatgcattaataacccatgttttaccttttgaaaaaataaatgaaggatttgacctgcttcactctgggaaaagtatccgtaccattctgatgttttgagacaatacagatgttttcccttgtggcagtcttcagcctcctctaccctacatgatctggagcaacagctgggaaatatcattaattctgctcatcacagattttatcaataaattacatttgggggctttccaaagaaatggaaattgatgtaaaattatttttcaagcaaatgtttaaaatccaaatgagaactaaataaagtgttgaacatcagctggggaattgaagccaataaaccttccttcttaaccatt

SEQ ID NO: 283873 - DNA, 1000 bp, Homo Sapiens
ctggtagcaaaggattgactatttttccagaggagctaataatcggccgtactataaatggaacattctttggtggttggaaaagtgtagattctatcccaaagctggtcactgactataagaataagaaattcaatctggatgcactggtgacccataccctgccttttgacaaaatcagtgaggcatttgacctaatgaaccaaggaaaaagcgtccgaacaatcctcatcttttgaagatgccaggagcaattcagaatactatctgattgaatgtgaacctgcctggttaatttattacctgatttgatgaaccaaggaaagccatgagtttaaacaaatatttacatttaatatgggaacataaaagagctttaaatattatagactttgtacctgttatatatatgaatattccctatgttaaataataataataactagtgtttatgaatagaatcatatcatctttagaaattgtttaaaattagttctgggaagttgaaagtggggaatgaagagataataaataaaactagattggccatatgtttataatttttttagattgggtaatgaatacatggagtttcattatacttttctctccacttttgtctatgttgaaaattttctgggagctaaatgatgagaacacatggacacatgatggggaacaacacacactggggcctgttgagggcagggagtcggcagagagagagcatcaggaagaatagctaatggatgctgggcttcatacctgggtgatgagatgatctgtgcagcaaagcaccatggtacatgtttacctatgtaacaaacctgcacatcctgcacatgtaccctggaacttaataaaagttggaaatttttaaaaagaatgaataagacctggtatttgatagcacaacagggagactatagtcaacagcaatttaattgtatattttaatatgactaaaagagtataatggattgtttgtaacacaaataaa

SEQ ID NO: 283874 - DNA, 1000 bp, Homo Sapiens
ccatcagtgacaaagttaatcaggacccaagtctgcttctgtgatattatcttgaagggaggtactgtgccttgttcatacctgtaccccaaattcctaggatggcatctgcccttcagggggcactaaaatgtattattgaaacagcattctgggcttaaataggtgtatgtatgtgttggttgtgactgtactatttctagtatagtgaactacatactgaatatccaagttctcagcacctacttttgtcaaatcttaacattttgccacttcgagatcacattgccattcctcccctccagaggtaacaattatccacaatttgatgtttatcattcctgtgttgttgtactttcactgtgtataacctaaaccatctactctttagtactgttttatatatttttaagcctcatacttgctcattctacagcttttttcactcattattgtataattatatctgaagctctcgttcattaattttagtcctgtgtagcagaattcaattacgggaactaccataatttatctgttctccagttgaaggcatgaagttgttgccagtttctgtattataacactgtagtggaacattcttctgcattgggctcactgcgtgttacctaagacgtatcacagaataaacacatttagccttatagacattgccaaattgctcttcaaagtaaatgtgagtttttgtgaattacatgagtatggaatggtgttttattatgactttagtttgcattttcctcaattctcgttaaatccttcattctaatggacattttattgtgaagaacctgttcatatcctgtgctcaactttgtattgaattatttttctctgaataatttttaggagttcttttattctagacatcaatcatttgtcagttttatatgttgcaaatatcttctagtctatcttgtgacttttctttttactttatggtattttgttgaataaagttttaatgtagtcacataaa

SEQ ID NO: 283875 - DNA, 1000 bp, Homo Sapiens; identical to SEQ ID NO: 220593

SEQ ID NO: 283876 - DNA, 1000 bp, Homo Sapiens; identical to SEQ ID NO: 220597

SEQ ID NO: 283877 - DNA, 1000 bp, Homo Sapiens; identical to SEQ ID NO: 220598

SEQ ID NO: 283878 - DNA, 1000 bp, Homo Sapiens; identical to SEQ ID NO: 115172

SEQ ID NO: 283879 - DNA, 1000 bp, Homo Sapiens; identical to SEQ ID NO: 115173

SEQ ID NO: 283880 - DNA, 1000 bp, Homo Sapiens; identical to SEQ ID NO: 220599

SEQ ID NO: 283881 - DNA, 1000 bp, Homo Sapiens; identical to SEQ ID NO: 115174

SEQ ID NO: 283882 - DNA, 1000 bp, Homo Sapiens; identical to SEQ ID NO: 115175

SEQ ID NO: 283883 - DNA, 1000 bp, Homo Sapiens
acaactataacgtcagcccagtggagttgccctttggtggatataagaagtcaggatttggcagagagaacggccgtgtgacaatcgaatattattcacagctgaagactgtgtgtgtggagatgggtgatgtggaatctgctttttgaaaacctgcagtgaaacctattgacatggccacgctgtggaatgatgtgaattggccctgtttacagaggcagtacaactgaatgttattttacatccagaattttggcgttcagtataagagaatggttcatgttactctttctctctccatcagcttcctcactgaaaatgtgcattaagtgccttgtagatactaatcaagaaagctgtgattctcctcaaagcgtatttttgtgaaatcttttaagagccagtaacatacttctagagaacaggaaaagagactaggataatacatcttccacacatttggcccactgataatgttaattctctggcgtatttcaaagaacttgttcctggctgatccaagtgcagtggtatttacaactaattgatcacaaccagtttgtagatttctttgttccttctccattcccactgcttcacttgcctagtcttgaagaaaaaaaacaaaaaacaaaaaaaaaccttgttcctttataggttcctggtagaatcagtagagatgatttcagctcattgacatttttttaagctatatccccttgtcattccattgagaaagctgacaactgggatagggaggggattagataatagatggggtcaaattctgtgtgaatgtgaacttgcctagtaagcactttgtctctgttcactactgcgatagaggaaatctatctccctatcttgggtccttgaactacagcctgctgtcttacaccagtggagctaccctttaaatgtacaaattatttgtatgctaatgtaatatggtgaaattaaaataaatcacactgttaattgttaaaaaaaaaaaaaaaaa

SEQ ID NO: 283884 - DNA, 1000 bp, Homo Sapiens; identical to SEQ ID NO: 115176

SEQ ID NO: 283885 - DNA, 1000 bp, Homo Sapiens
ccatctcattgacattggtgttgcagggttcagacttgatgcttccaagcacatgtggcctggagacataaaggcaattttggacaaactgcataatctaaacagtaactggttccctgcaggaagtaaacctttcatttaccaggaggtaattgatctgggtggtgagccaattaaaagcagtgactactttggtaatggccgggtgacagaattcaagtatggtgcaaaactcggcacagttattcgcaagtggaatggagagaagatgtcttacttaaagaactggggagaaggttggggtttcgtaccttctgacagagcgcttgtctttgtggataaccatgacaatcaacgaggacatggggctggaggagcctctattcttaccttctgggatgctaggctgtacaaaatggcagttggatttatgcttgctcatccttacggatttacacgagtaatgtcaagctaccgttggccaagacagtttcaaaatggaaacgatgttaatgattgggttgggccaccaaataataatggagtaattaaagaagttactattaatccagacactacttgtggcaatgactgggtctgtgaacatcgatggcgccaaataaggaacatggttattttccgcaatgtagtggatggccagccttttacaaattggtatgataatgggagcaaccaagtggcttttgggagaggaaacagaggattcattgttttcaacaatgatgactggtcattttctttaactttgcaaactggtcttcctgctggcacatactgtgatgtcatttctggagataaaattaatggcaattgcacaggcattaaaatttacgtttctgatgatggcaaagctcatttttctattagtaactctgctgaagatccatttattgcaattcatgctgaatctaaattgtaaaatttaaaattaaatgcatgtcctcaaaacaaaaaaaaaaaaaaaaaaaaaaaaaaaaaa

SEQ ID NO: 283886 - DNA, 1000 bp, Homo Sapiens
tgaaaccctgtctctactaaaagtacaaaaaattagccagtcatggtggcacacgcctgtaatctcagctactcaggaggctgaggcaggagaattgcttgaacctgtgaggaagaggttgcagtgagctgagatcgtgccattacactccagcctgggcgaaagggtgagactccatctcaaaaaaaaaaaaaatgatttgcttttgacgtcttaggtggcagggctgttccctccaggcaaatgcccttcaaaccgacgatcattgtgcccacttaccctgggctggagagttggtttcaggttcctacaggagatagctttctttcccttactccctatctaacacttttgctctgcaggcagccttgcccattctctaagcctggcttagaaggcactgggaatgtcctgtagagagagacctagataggtcatgcaagtgagaaagacatctgaggaaaatggaagacctaaggcagacaggaaggaagcacaaaagacaagcattgggtcagacccataaaccacctcccaaaggctgtcatttcattgcactggaattttgctttatcagaagcaaggaagtaagggagtcattgccttgggcctgggaatctaagtgggagacaatattaatttggatccgattaattggagattactaactgtggacaaaagtttatctttgcacaatcaataaaaatggcatttttttagtaaattaagagcataaacaatattgctagaggtggcatgtttagtctaccaaaaacaatacttttcaggcactttagaaatatccttttagaagcagcgagtgcatgggctaattatcatcaatctttatgtatttgttaaagaaacatctacaggatctttattggtgaccttttgtaagacattagtttgaggtactacctatgtacttgaaaataataaagtggcatttctttatgaaaaaaaaaaaaaaaaaaaaaaaaaaaaaaaaaaaaaaaaa

SEQ ID NO: 283887 - DNA, 1000 bp, Homo Sapiens
caacaaacagtacgggtatgtggaaggactcgcctaaatcttccaagtccatcaaattcattcctgtttcaacttgagccttgcattcatgcaacttgattcttgtgattgactttttggctcattagctgaattgagctagaaatcacaagaacaaatacactttattaatataaccataaatcaattcattgtgtatgagactgtgtttctagttgcattttcatattgctaccaaaaactagacattattttgtatggaatattaatggaaacatgctgtactaaaatatgcaggtctgattcccagaaatacaacagaagttatatttttaaaggaaaaatcataaccaccctagctttatattttgttgttagtttcttttattttcatttctaacataagtaagacttgattggtttaaaagtcacataaaatgcggcactatttctgaacaaagagagctcatcatcagtcttaatattcagagaaaacttcagagaaattatgttttcatccattaaaattaatttgtgcatcagaaaatgcagccttaaacagtgtccaggagatgggatggtacctcctaggagtacaagtgcctggggtgtaatgagctcctgctcattgtggccagtttagagttctattagaagctatcaatcaccttgcatttcaaaatggtaactttacaactggcagtggcctccttttggttcctcacatattattggtcaagaaaagcatgaaaactgagatgctgaaggtgagaggaaatgttgactggccaaaaatatcttttttcccccactgcgaggttgttttaaagtcagatttgtataaggaaagccaaattttattaaaagagtagaaaaggattgcttaaggtactctggactttctcttggacattgtaaacgtattttgatcagtgttacaagggtatcctgtgctatgctggacattaacaagatcattatcttcatgtttggggaattc

SEQ ID NO: 283888 - DNA, 1000 bp, Homo Sapiens
gacctgctgcacagagtgctgccaacatttatcatctccatctgtttcttcggcctcctagggaacctttttgtcctgttggtcttcctcctgccccggcggcaactgaacgtggcagaaatctacctggccaacctggcagcctctgatctggtgtttgtcttgggcttgcccttctgggcagagaatatctggaaccagtttaactggcctttcggagccctcctctgccgtgtcatcaacggggtcatcaaggccaatttgttcatcagcatcttcctggtggtggccatcagccaggaccgctaccgcgtgctggtgcaccctatggccagccggaggcagcagcggcggaggcaggcccgggtcacctgcgtgctcatctgggttgtggggggcctcttgagcatccccacattcctgctgcgatccatccaagccgtcccagatctgaacatcaccgcctgcatcctgctcctcccccatgaggcctggcactttgcaaggattgtggagttaaatattctgggtttcctcctaccactggctgcgatcgtcttcttcaactaccacatcctggcctccctgcgaacgcgggaggaggtcagcaggacaaggtgcgggggccgcaaggatagcaagaccacagcgctgatcctcacgctcgtggttgccttcctggtctgctgggccccttaccacttctttgccttcctggaattcttattccaggtgcaagcagtccgaggctgcttttgggaggacttcattgacctgggcctgcaattggccaacttctttgccttcactaacagctccctgaatccagtaatttatgtctttgtgggccggctcttcaggaccaaggtctgggaactttataaacaatgcacccctaaaagtcttgctccaatatcttcatcccataggaaagaaatcttccaacttttctggcggaattaaaacagcattgaaccaagaaaaaaaaaaaaaaaaaaaa

SEQ ID NO: 283889 - DNA, 824 bp, Homo Sapiens
gaattcgaatgccaccctcccagatgggggcagagagcaccgcccagcagccagtgggttcccgcgcgtgccgagactctgaggccttgcacccccacgatcccgtacgatggccgtcaagaagatcgcgatcttcggcgccactggccagaccgggctcaccaccctggcgcaggcggtgcaagcaggttacgaagtgacagtgctggtgcgggactcctccaggctgccatcagaggggccccggccggcccacgtggtagtgggagatgttctgcaggcagccgatgtggacaagaccgtggctggccaggacgctgtcatcgtgctgctgggcacccgcaatgacctcagtcccacgacagttatgtccgagggcgcccggaacattgtggcagccatgaaggctcatggtgtggacaaggtcgtggcctgcacctcggctttcctgctctgggaccctaccaaggtgcccccacgactgcaggctgtgactgatgaccacatccggatgcacaaggtgctgcgggaatcaggcctgaagtacgtggctgtgatgccgccacacataggagaccagccactaactggggcgtacacagtgaccctggatggacgagggccctcaagggtcatctccaaacatgacctgggccatttcatgctgcgctgcctcaccaccgatgagtacgacggacacagcacctacccctcccaccagtaccagtagcactctgtccccatctgggagggtggcattctggacatgaggagcaaaggaagggggcaataaatgttgagccaagagcttcaaattactctag

SEQ ID NO: 283890 - DNA, 876 bp, Homo Sapiens
cggggcggatgcggggacagcggcctggctaactcctgccaggcagtgcccttcccggagcgtgccctcgccgctgagctcccctgaacagcagctgcagcagccatggccccgccctgggtgcccgccatgggcttcacgctggcgcccagcctggggtgcttcgtgggctcccgctttgtccacggcgagggtctccgctggtacgccggcctgcagaagccctcgtggcacccgccccactgggtgctgggccctgtctggggcacgctctactcagccatggggtacggctcctacctggtctggaaagagctgggaggcttcacagagaaggctgtggttcccctgggcctctacactgggcagctggccctgaactgggcatggccccccatcttctttggtgcccgacaaatgggctgggccttggtggatctcctgctggtcagtggggcggcggcagccactaccgtggcctggtaccaggtgagcccgctggccgcccgcctgctctacccctacctggcctggctggccttcacgaccacactcaactactgcgtatggcgggacaaccatggctggcgtgggggacggcggctgccagagtgagtgcccggcccaccagggactgcagctgcaccagcaggtgccatcacgcttgtgatgtggtggccgtcacgctttcatgaccactgggcctgctagtctgtcagggccttggcccaggggtcagcagagcttcagaggtggccccacctgagcccccacccgggagcagtgtcctgtgctttctgcatgcttagagcatgttcttggaacatggaattttataagctgaataaagtttttgacttcctttaaaaaaaaaaa

SEQ ID NO: 283891 - DNA, 1000 bp, Homo Sapiens
ctaatcagattggaagattttttggagagattgatcccagcttgatgagacacctggttaatatatcagtttatgcttttaacaaatcttatgattatcagtcagtatgtgagcccggtgctgcaccaaaacaaggagcaggacatcgctcagcatatgtgccatcagtagcagacatattacaaattggctggtgggccactgctgctgcctggtctattctacagcagtttctcttgagtttgacctttccacgactccttgaggcagttgagatggaggatgatgacttcacggcctccctgtccaagcagagctgcattactgaacaaacccagtatttcttcgataacgacagtaaatcattcagtggtgtattagactgtggaaactgttccagaatctttcatggagaaaagcttatgaacaccaacttaatattcataatggttgagagcaaagggacatgtccatgtgacacacgactgctcatacaagcggagcagacttctgacggtccaaatccttgtgacatggttaagcaacccagataccgaaaagggcctgatgtctgctttgataacaatgtcttggaggattatactgactgtggtggtgtttctggattaaatccctccctgtggtatatcattggaatccagtttctactactttggctggtatctggcagcacacaccgcctgttatgaccttctaaaaaccaaatctgcatagttaaactccagaccctgccaaaacatgagccctgccctcaattacagtaacgtagggtcagctataaaatcagacaaacattagctgggcctgttccatggcataacactaaggcgcagactcctaaggcacccactggctgcatgtcagggtgtcagatccttaaacgtgtgtgaatgctgcatcatctatgtgtaacatcaaagcaaaatcctatacgtgtcctctattggaaaatttgggagtttgttgttgcattgttggt

SEQ ID NO: 283892 - DNA, 1000 bp, Homo Sapiens; identical to SEQ ID NO: 115180

SEQ ID NO: 283893 - DNA, 1000 bp, Homo Sapiens
atggaccaagaccacagcagcagtgacagttggaacaacaatgatgctgctgcctccctggagaactccgcctcctccgacgaggaggacattggctccgagacgagagccatctactccatcgtgctcaagcttccgggtcacagcaccatcctcaactccaccaagttaccctcatcggacaacctgcaggtgcctgaggaggagctggggatggtggacttggagaggaaagccgacaagctgcaggcccagaagagcgtggacgatggaggcagttttccaaaaagcttctccaagcttcccatccagctagagtcagccgtggacacagctaagacttctgacgtcaactcctcagtgggtaagagcacggccactctacctctgtccttcaaggaagccactctggccaagaggtttgctctgaagaccagaagtcagatcactaagcggaaaaggatgtccctggtcaaggagaagaaagcggcccagaccctcagtgcgatcttgcttgccttcatcatcacttggaccccatacaacatcatggttctggtgaacaccttttgtgacagctgcatacccaaaaccttttggaatctgggctactggctgtgctacatcaacagcaccgtgaaccccgtgtgctatgctctgtgcaacaaaacattcagaaccactttcaagatgctgctgctgtgccagtgtgacaaaaaaaagaggcgcaagcagcagtaccagcagagacagtcggtcatttttcacaagcgcgcacccgagcaggccttgtagaatgaggttgtatcaatagcagtgacaaaacgcacacatcaacccacagaccttaggaggaggaaggcgagggcggggtgacttctggtgatgataaaaatggttttatcacccagatgtgaaagaagctgcctgtttactgatccattgaataaacccattttaatagaaaaagtcaataccaattcagcaaaaaaaaaaaaaa

SEQ ID NO: 283894 - DNA, 1000 bp, Homo Sapiens; identical to SEQ ID NO: 115181

SEQ ID NO: 283895 - DNA, 1000 bp, Homo Sapiens
ggcaggaagtccctgagaagcctcatgggagtcagggagccctggggtttccacacaggcccatgccctccgtcctggcagggcaggcagagctcagcacagcctcacccctgcaggcggtatccagaggtgagggaggcctgaaatgtttccaggcatgaccctggagcccggcagtgcaccccctaaagatggcgcacccggcagccccccagtgtccccaggggcacacttccccttgggatgggcacaggctgccccacccctccatgattccaagggcccagaggggcggggccaggatggcgtgtcccctgcctgtgagtgacatcggttcaggaggagacagtcaggaagcctcctgctgagtggtccacattctgctgcccccagaccccatccagccaggggtggggatggggttgggctctgcgtcccactgagtctcattcctctgtccccgagccgagctctcctgggccagggtctcgtcaggaggtgcctgagagcagaatgaataattgaggttaggaacccggcatgccgagtgccccagaaatgccgctgtgtccccgcgggcagtgacgtgagtggggaggagactcaggcccacattgcccacacctgcctctgaactgctgctggtcacccccacccccgggtgcctgtgaccggggtcctgaggctggggcttttgtgccaggagtgggtgggacacagagacccccgtgccaaatcctgggcatccccagccccctggcccctcccacatcccccgtgtattcaggaccccatctgctgagctctgacctgcccccgctctgccatcagcccctgctgctcctcggccagagctcccaggacgcagggagaccctgggagagtgaggtcatcccggggccatggaagctggcaggagacactggtctcagaggagggatagagacgcagatttcagatgtaagaagcccgatccacattgcataagtggacccagctg

SEQ ID NO: 283896 - DNA, 1000 bp, Homo Sapiens
tagtggaccgcctcttcctgtggactttcatcatcttcaccagcgttgggaccctagtcatcttcctggacgccacgtaccacttgccccctccagacccctttccttgaagactggagggttgagacccaggccccctgccagttgaagtgagagtttggtgatactgtcaagccctatccttctctgcctcttaactccttcacgaggaatctgggcctcttatttcgtttctggggactgcattggactgagggctgggtaggcaggtgtcttggacccacctgaaatgcagtatcatctgatttactctttgggatcttgaagaagctcttttgggtatcaacacctaggtcgccagtgaaatagaacacagaacaggaactagattataagccttatgaggtcaagaaatgtgacttggccgggcgcggtggctcacgcctgtaatcccagcactttgggaggccaaggcgggcggatcacctgaggtcgggagtttgagaccagcccgaccaacatggagaaaccctgtctctactaaaaatacaaaattagccaggtgtggtggtacatgcctgtaatcccagctactagggaggctgaggcaggagaatcactcgaacccgggaggcagaggttgcagtgagtcaagatcacgccattgcactccagcctgggcaacaagagcgaaactccatctcaaaaaaaaaaaagtgtcttgttcactgcagcatgcccagtgccacgcacaggtgctgacctatagtaagtgcttaacatttgttgaataggggaaagaaatttccggaagtaaatacagcaattaataatgtttataagctgggcatggtcgctcaggccagtaatcccagtgacttaggaggctgaggtgggaggattacttgaaacccacagtttgagaccagcctgggcaacatagtgagaccctgtctctaaaaaaataaaaatagaaataaagtagtgcttattgtttgca

SEQ ID NO: 283897 - DNA, 1000 bp, Homo Sapiens
agtgtcgttgaggactggaagtacgtggctatggtggtggaccggctgttcctgtgggtgttcatgtttgtgtgcgtcctgggcactgtggggctcttcctaccgcccctcttccagacccatgcagcttctgaggggccctacgctgcccagcgtgactgagggccccctgggttgtggggtgagaggatgtgagtggccgggtgggcactttgctgcttctttctgggttgtggccgatgaggcctaagtaaatatgtgagcattggccatcaaccccatcaaaccagcccaagccgtggaacaggcaaggatgggggcctgggctgtcctctctgaatgccttggagggatcccaggaagccccagtaggagggagcttcagacagttcaattctggcctgtcttccttccctgcaccgggcaatggggataaagatgacttcgtagcagcacctactatgcttcaggcatggtgccggcctgcctctccatcaccatctctctccacttccccttgtccagttcctcacacacttctagattcttcccagctcagaggcttggcatttgccatatcatcatctttttttttttcttttaaacggagtcttgctatatcgcccaggctcaagtgattctcctgcctgaacctcccaagtagctgggattacagaaagccgccaccgtgcccagctaatttttgtatttttgttggccaggctgatttcgaactcctgacctcagatgacccacctgcctcggcctcccaaagtgctgggattacaggtgtgagccactatgcctggccttccctatcttctacctgaaccttcttcctcttcccccagggcttcccaagctctttccacagccacatcagtcagggcatggctccaatccattctttgctccaatgtcacctcctctgagaggccttccctaaccacccaatcattctaaagcagcctccctacagtcacgttaccctgcctccttc

SEQ ID NO: 283898 - DNA, 1000 bp, Homo Sapiens; identical to SEQ ID NO: 220608

SEQ ID NO: 283899 - DNA, 1000 bp, Homo Sapiens
aggcggcggagccatcaagagcctcagagagcggattctcccttggagcaaccagagggcagccccctgactcaggatgacagacaggtggaactgccagtgtagagggaattctaagctggacgcacagaacagtctctccgtgggaggagacattatggggcgtccaccaccacccctccctggccatcctcctggaatgtggtctgccctccaccagagctcctgcctgccaggactggaccagagcagccaggctggggcccctctgtctcaacccgcagacccttgactgaatgagagaggccagaggatgctccccatgctgccactatttattgtgagccctggaggctcccatgtgcttgaggaaggctggtgagcccggctcaggaccctcttccctcaggggctgcaccctcctctcactcccttccatgccggaacccaggccagggacccaccggcctgtggtttgtgggaaagcagggtggacgctgaggagtgaaagaaccctgcacccagagggcctgcctggtgccaaggtatcccagcctggacaggcatggacctgtctccagagagaggagcctgaagttcgtggggcgggacagcgtcggcctgatttcccgtaaaggtgtgcagcctgagagacgggaagaggaggcctctggacctgctggtctgcactgacagcctgaagggtctacaccctcggctcacctaagtgccctgtgctggttgccaggcgcagaggggaggccagccctgccctcaggacctgcctgacctgccagtgatgccaagagggggatcaagcactggcctctgcccctcctccttccagcacctgccagagcttctccaggaggccaagcagaggctcccctcatgaaggaagccattgcactgtgaacactgtacctgcctgctgaacagcctgcccccgtccatccatgagccagcatccgtccgtcctccactctccagcctctcccca

SEQ ID NO: 283900 - DNA, 1000 bp, Homo Sapiens
ctacgcctggctgatttttgtagttttagtggagatggggtttcaccatgttggccaggcttgtctcgaactcctgaccccaagttatccacctgccttggcttcccaaagtcctgggattacaggtgtgagccaccacatccagcctaacttacattcttaaagtgtcgaatgacttctagtgtagaattgtgcaaccatcaccagaattaattttattattcttattatttttgagacagagtcttactctgttgccaggctggagtgcagtggcgcgatctcagctcactacaacctccgcctcccatgttcaagcgattctcctgcctcagcctcccgagtagctgggactataggcatgcgccaccatggccagctaatttttgtatttttagtagagacgaggtttcactgtgttggccaggatggtctccatctcttgacctcgtgatccacccgcctcagcctcccaaagtgctgggattaacaggtatgaaccaccgcgcccagcctttttgttttttttttttttgagacagagtcttcctctgtctcctaagctggagtgcagtggcatcatctcagctcactgcaacctctgcctcccaggttcaagtgcttctccagcctcagcctcccaagtagctgagactacaggcacacaccaccacgcctggctaatttttgtatttttagtagagacgggtttcaccatgttggctagactagtctcaaactcctgacctcaagtgatctgcccgcctcgacctctctcaaagtgctggcattacaggtgtgagccacggtgcccggcccacaattaattttagaacattttcatcacccctaaaagaaaccctgcacccattagcagtccctccacatttccccctagcctgcctcccctgcctcaccagccctggcaactgctaatctactttctgtgtctatggatttgccttctctaaacatttcatataaatggaattacacaatg

SEQ ID NO: 283901 - DNA, 1000 bp, Homo Sapiens
tagccaagaaggtggagcacaaccagcgcacgctggatcccaattccccacgggacttcattgactcctttctcatccgcatgcaggaggaggagaagaaccccaacacggagttctacttgaaaaacctggtgatgaccacgttgaacctcttcattgggggcaccgagaccgtcagcaccaccctgcgctatggcttcttgctgctcatgaagcacccagaggtggaggccaaggtccatgaggagattgacagagtgatcggcaagaaccggcagcccaagtttgaggaccgggccaagatgccctacatggaggcagtgatccacgagatccaaagatttggagacgtgatccccatgagtttggcccgcagagtcaaaaaggacaccaagtttcgggatttcttcctccctaagggcaccgaagtgttccctatgctgggctctgtgctgagagaccccagtttcttctccaacccccaggacttcaatccccagcacttcctgaatgagaaggggcagtttaagaagagtgatgcttttgtgcccttttccatcggaaagcggaactgtttcggagaaggcctggccagaatggagctctttctcttcttcaccaccgtcatgcagaacttccgcctcaagtcctcccagtcacctaaggacattgacgtgtcccccaaacacgtgggctttgccacgatcccacgaaactacaccatgagcttcctgccccgctgagcgagggctgtgccggtgcaggtctggtgggcggggccagggaaagggcagggccaagaccgggcttgggagaggggcgcagctaagactgggggcaggatggcggaaaggaaggggcgtggtggctagagggaagagaagaaacagaagcggctcagttcaccttgataaggtgcttccgagctgggatgagaggaaggaaacccttacattatgctatgaagagtagtaataatagcagctcttatttcctgagc

SEQ ID NO: 283902 - DNA, 1000 bp, Homo Sapiens
tcatagccaagaaggtggagcacaaccagcgcacgctggatcccaattccccacaggacttcatcgactcctttctcatccacatgcaggaggaggagaagaaccccaacacggagttctacttgaagaacctgatgatgagcacgttgaacctcttcattgcaggcaccgagacggtcagcaccaccctgcgctatggcttcttgctgctcatgaagcacccagaggtggaggccaaggtccatgaggagattgacagagtgatcggcaagaaccggcagcccaagtttgaggaccggaccaagatgccctacatggaggcagtgatccacgagatccaaagatttggagacgtgatccccatgagtttggcccgcagggttaaaaaggacaccaagtttcgggattttttcctccctaagggcaccgaagtgttccctatgctgggctccgtgctgagagaccccagcttcttctccaaccctcaggacttcaatccccagcatttcctggatgacaaggggcagtttaagaagagtgatgcttttgtgcccttttccatcggaaagcggaactgtttcggagaaggcctggccagaatggagctctttctcttcttcaccaccgtcatgcagaacttccgcctcaagtcctcccagtcacctaaggacattgacgtgtcccccaaacacgtggtctttgccacgatcccacgaaactacaccatgagcttcctgccccgctgagcgagggctgtgccggtgcaggtctggtgggcggggccagggaaaggcggggtcagggcggggttcgcggaagaggcgggtataagaatggggggaagatgcgggaaaggaaggggcgtggtggctagagggaagagaagaaacagaagcggctcagttcaccttgataaggtgcttccgagctgggatgagaggaagggaaaccttacattatgctatgaagagtagtaataatagcagctcttatttcctga

SEQ ID NO: 283903 - DNA, 1000 bp, Homo Sapiens
gatgtccagcagaaagtgcagaaggaaattgatacagttttacccaataaggcaccacccacctatgatactgtgctacagttggagtatcttgacatggtggtgaatgaaacactcagattattcccagttgctatgagacttgagagggtctgcaaaaaagatgttgaaatcaatgggatgtttattcccaaaggggtggtggtgatgattccaagctatgttcttcatcatgacccaaagtactggacagagcctgagaagttcctccctgaaaggttcagtaaaaagaacaaggacaacatagatccttacatatacacaccctttggaagtggacccagaaactgcattggcatgaggtttgctctcgtgaacatgaaacttgctctagtcagagtccttcagaacttctccttcaaaccttgtaaagaaacacagatccccctgaaattacgctttggaggacttcttctaacagaaaaacccattgttctaaaggctgagtcaagggatgagaccgtaagtggagcctgatttccctaaggacttctggtttgctctttaagaaagctgtgccccagaacaccagagacctcaaattactttacaaatagaaccctgaaatgaagacgggcttcatccaatgtgctgcataaataatcagggattctgtacgtgcattgtgctctctcatggtctgtatagagtgttatacttggtaatatagaggagatgaccaaatcagtgctggggaagtagatttggcttctctgcttctcataggactatctccaccacccccagttagcaccattaactcctcctgagctctgataacataattaacatttctcaataatttcaaccacaatcattaataaaaataggaattattttgatggctctaacagtgacatttatatcatgtgttatatctgtagtattctatagtaagctttatattaagcaaatcaataaaaacctctttacaaaagta

SEQ ID NO: 283904 - DNA, 1000 bp, Homo Sapiens
ctgttttaaagtgtaaaatttagtggcgtgtggttcattcacaaagctgtacaaccaccaccatctagttccaaacattttctttttttctgagatggagtctcactctgtcacccaggttcgagttcagtggtgccatctctgtccactgcaacctccacatcctgggttcaagtgattctcctgcctcagcctctggaggagctggtatcacaggcgtcccccaccacgcctggctaaattttgtatttttaggtggtcttgaactcctgatgtcaggtgattctcctagctccaaatgttttcattatctctcccccaacaaaacccatacctatcaagctgtcactccccataccccattctctttttcatctcggcccctgtcaatctggtttttgtcactatggacttaccaattctgaatatttcccataaacagaatcatacaatatttgattttttttttttttttgaaactaagccttgctctgtctcccaggctggagtgctatggtgcaatttttgttcactgcaacctctgccttccaagatcaagagattctccagtctcagctcccaagtagctgggattacaggcatgtactaccatgcctggctaattttcttgtagttttagtagggacatgttggccaggctggtggtgagctcctggcctcaggtgatccacccacctcagtgttccaaagtgctgatattacaggcataatatgtgatcttttgtgtctggttgctttcatgttgaatgctatttttgaggttcatgcctgttgtagaccacagtcacacactgctgtagtcttccccagtcctcattcccagctgcctcttcctactgcttccgtctatcaaaaagcccccttggcccaggttccctgagctgtgggattctgcactggtgctttggattccctgatatgttccttcaaatctgctgagaattaaataaacatctctaaagcctgacctccccacgtc

SEQ ID NO: 283905 - DNA, 1000 bp, Homo Sapiens
aaccaaaagtcagaattcaatattgaaaacttggttggcactgtagctgatctatttgttgctggaacagagacaacaagcaccactctgagatatggactcctgctcctgctgaagcacccagaggtcacagctaaagtccaggaagagattgatcatgtaattggcagacacaggagcccctgcatgcaggataggagccacatgccttacactgatgctgtagtgcacgagatccagagatacagtgaccttgtccccaccggtgtgccccatgcagtgaccactgatactaagttcagaaactacctcatccccaagggcacaaccataatggcattactgacttccgtgctacatgatgacaaagaatttcctaatccaaatatctttgaccctggccactttctagataagaatggcaactttaagaaaagtgactacttcatgcctttctcagcaggaaaacgaatttgtgcaggagaaggacttgcccgcatggagctatttttatttctaaccacaattttacagaactttaacctgaaatctgttgatgatttaaagaacctcaatactactgcagttaccaaagggattgtttctctgccaccctcataccagatctgcttcatccctgtctgaagaatgctagcccatctggctgctgatctgctatcacctgcaactctttttttatcaaggacattcccactattatgtcttctctgacctctcatcaaatcttcccattcactcaatatcccataagcatccaaactccattaaggagagttgttcaggtcactgcacaaatatatctgcaattattcatactctgtaacacttgtattaattgctgcatatgctaatacttttctaatgctgactttttaatatgttatcactgtaaaacacagaaaagtgattaatgaatgataatttagtccatttcttttgtgaatgtgctaaataaaaagtgttattaattgctggttca

SEQ ID NO: 283906 - DNA, 1000 bp, Homo Sapiens
catctgaatttactattgaaagcttggaaaacactgcagttgacttgtttggagctgggacagagacgacaagcacaaccctgagatatgctctccttctcctgctgaagcacccagaggtcacagctaaagtccaggaagagattgaacgtgtgattggcagaaaccggagcccctgcatgcaagacaggagccacatgccctacacagatgctgtggtgcacgaggtccagagatacattgaccttctccccaccagcctgccccatgcagtgacctgtgacattaaattcagaaactatctcattcccaagggcacaaccatattaatttccctgacttctgtgctacatgacaacaaagaatttcccaacccagagatgtttgaccctcatcactttctggatgaaggtggcaattttaagaaaagtaaatacttcatgcctttctcagcaggaaaacggatttgtgtgggagaagccctggccggcatggagctgtttttattcctgacctccattttacagaactttaacctgaaatctctggttgacccaaagaaccttgacaccactccagttgtcaatggatttgcctctgtgccgcccttctaccagctgtgcttcattcctgtctgaagaagagcagatggcctggctgctgctgtgcagtccctgcagctctctttcctctggggcattatccatctttgcactatctgtaatgccttttctcacctgtcatctcacattttcccttccctgaagatctagtgaacattcgacctccattacggagagtttcctatgtttcactgtgcaaatatatctgctattctccatactctgtaacagttgcattgactgtcacataatgctcatacttatctaatgtagagtattaatatgttattattaaatagagaaatatgatttgtgtattataattcaaaggcatttcttttctgcatgatctaaataaaaagcattattatttgctg

SEQ ID NO: 283907 - DNA, 1000 bp, Homo Sapiens
ctccctggctccagctttacaataattttcccagctttctacactacttgcctggaagccacagaaaagtcataaaaaatgtggctgaagtaaaagagtatgtgtctgaaagggtgaaggagcaccatcaatctctggaccccaactgtccccgggacctcaccgactgcctgctcgtggaaatggagaaggaaaagcacagtgcagagcgcttgtacacaatggacggtatcaccgtgactgtggccgacctgttctttgcggggacagagaccaccagcacaactctgagatatgggctcctgattctcatgaaataccctgagatcgaagagaagctccatgaagaaattgacagggtgattgggccaagccgaatccctgccatcaaggataggcaagagatgccctacatggatgctgtggtgcatgagattcagcggttcatcaccctcgtgccctccaacctgccccatgaagcaacccgagacaccattttcagaggatacctcatccccaagggcacagtcgtagtgccaactctggactctgttttgtatgacaaccaagaatttcctgatccagaaaagtttaagccagaacacttcctgaatgaaaatggaaagttcaagtacagtgactatttcaagccattttccacaggaaaacgagtgtgtgctggagaaggcctggctcgcatggagttgtttcttttgttgtgtgccattttgcagcattttaatttgaagcctctcgttgacccaaaggatatcgacctcagccctatacatattgggtttggctgtatcccaccacgttacaaactctgtgtcattccccgctcatgagtgtgtggaggacaccctgaaccccccgctttcaaacaagttttcaaattgtttgaggtcaggatttctcaaactgattcctttctttgcatatgagtatttgaaaataaatattttcccagaatataaataaatcatcacatgattatttt

SEQ ID NO: 283908 - DNA, 1000 bp, Homo Sapiens
ccccagatctccccgggacttcatccagtgcttcctcaccaagatggcagaggagaaggaggacccactgagccacttccacatggataccctgctgatgaccacacataacctgctctttggcggcaccaagacggtgagcaccacgctgcaccacgccttcctggcactcatgaagtacccaaaagttcaagcccgcgtgcaggaggagatcgacctcgtggtgggacgcgcgcggctgccggcgctgaaggaccgcgcggccatgccttacacagacgcggtgatccacgaggtgcagcgctttgcagacatcatccccatgaacttgccgcaccgcgtcactagggacacggcctttcgcggcttcctgatacccaagggcaccgatgtcatcaccctccttaacaccgtccactacgaccccagccagttcctgacgccccaggagttcaaccccgagcattttttggatgccaatcagtccttcaagaagagtccagccttcatgcccttctcagctgggcgccgtctgtgcctgggagagtcgctggcgcgcatggagctctttctgtacctcaccgccatcctgcagagcttttcgctgcagccgctgggtgcgcccgaggacatcgacctgaccccactcagctcaggtcttggcaatttgccgcggcctttccagctgtgcctgcgcccgcgctaacgccccggcccttccagattcgcctgtgagcgatgaggcccgcccatgcgggttgctacgtccccttcttggtccacagtctgccctcatccctctggcagtcacgctgtcttccctgcatgctgtgcctgccgcgtgcccttcccccatccctccaatctgtgccccgtctgcagggcagaggcagatgtggcatgtctttttgtacccacagagcttgttctatggcacgcccttttctaggctttttgtatcatttcttagtacattgtaatagattcaaaccagtcttgg

SEQ ID NO: 283909 - DNA, 1000 bp, Homo Sapiens
cacctttattttattttttttcaaaatgaagatacacattacagccaggtgtggtagcaggcacctgtagtcttagctactcgagaggccaaagaaggaggatggcttgagcccaggagttcaagaccagcctggacagcttagtgagatcccgtctccgaagaaaagatatgtattctaattggcagattgttttttcctaaggaaactgctttatttttataaaactgcctgacaattatgaaaaaatgttcaaattcacgttctagtgaaactgcattatttgttgactagatggtggggttcttcgggtgtgatcatatatcataaaggatatttcaaatgattatgattagttatgtcttttaataaaaaggaaatatttttcaacttcttctatatccaaaattcagggctttaaacatgattatcttgatttcccaaaaacactaaaggtggttttattttcccttcatgttttaacttattgttgctgaaaactctatgtccggctttaactatcttctctatatttttatttcattcacattaatgagaagagttttctcagagattaaaaaaggtagtttttctgtcattgttaaatacacattatcactgaaaaaatgtagcttttatgatgtatgttttaaagttaaaactggatggaaatagccatttggaagctttggttatgaaacatgtggagtgtattaagtgcagcttgacattatgttttatttaaatgctttttatcgctaaatgacttgcagatgaaaaaaactaaggtgactcgagtgtttaaatgcctgtgtacaacaatgctttgataaaatattttaaggtatgagttatcagctctatgtcaattgatatttctgtgtagtatttatatttaaattatatttacctttttgcttattttacaaatattaagaaaatattctaacatttgataattttgaaatgattcatctttcagaaataaaagtatgaatct

SEQ ID NO: 283910 - DNA, 1000 bp, Homo Sapiens
accaagacctggaaggaccatgtggctgcatgggacgtgattttcagtaaagctgacatatacacccagaacttctactgggaattgagacagaaaggaagtgttcaccacgattaccgtggcatgctctacagactcctgggagacagcaagatgtccttcgaggacatcaaggccaacgtcacagagatgctggcaggaggggtggacacgacgtccatgaccctgcagtggcacttgtatgagatggcacgcaacctgaaggtgcaggatatgctgcgggcagaggtcttggctgcgcggcaccaggcccagggagacatggccacgatgctacagctggtccccctcctcaaagccagcatcaaggagacactaagacttcaccccatctccgtgaccctgcagagatatcttgtaaatgacttggttcttcgagattacatgattcctgccaagacactggtgcaagtggccatctatgctctgggccgagagcccaccttcttcttcgacccggaaaattttgacccaacccgatggctgagcaaagacaagaacatcacctacttccggaacttgggctttggctggggtgtgcggcagtgtctgggacggcggatcgctgagctagagatgaccatcttcctcatcaatatgctggagaacttcagagttgaaatccaacacctcagcgatgtgggcaccacattcaacctcattctgatgcctgaaaagcccatctccttcaccttctggccctttaaccaggaagcaacccagcagtgatcagagaggatggcctgcagccacatgggaggaaggcccaggggtggggcccatggggtctctgcatcttcagtcgtctgtcccaagtcctgctcctttctgcccagcctgctcagcaggttgaatgggttctcagtggtcaccttcctcagctcagctgggccactcctcttcacccaccccatggagacaataaacagctgaaccatcg

SEQ ID NO: 283911 - DNA, 1000 bp, Homo Sapiens; identical to SEQ ID NO: 220610

SEQ ID NO: 283912 - DNA, 1000 bp, Homo Sapiens; identical to SEQ ID NO: 220612

SEQ ID NO: 283913 - DNA, 1000 bp, Homo Sapiens
caagatcgcctttatccccttcagctacctcgtcgatcagtggcgctggagggtatttgatggaagcatcaccaaggagaactataaccaggagtggtggagcctcaggctgaagtaccagggcctctgccccccagtgcccaggactcaaggtgactttgacccaggggccaagttccacattccttctagcgtgccttacatcaggtactttgtcagcttcatcatccagttccagttccacgaggcactgtgccaggcagctggccacacgggccccctgcacaagtgtgacatctaccagtccaaggaggccgggcagcgcctggcgaccgccatgaagctgggcttcagtaggccgtggccggaagccatgcagctgatcacgggccagcccaacatgagcgcctcggccatgttgagctacttcaagccgctgctggactggctccgcacggagaacgagctgcatggggagaagctgggctggccgcagtacaactggacgccgaactccgctcgctcagaagggcccctcccagacagcggccgcgtcagcttcctgggcctggacctggatgcgcagcaggcccgcgtgggccagtggctgctgctcttcctgggcatcgccctgctggtagccaccctgggcctcagccagcggctcttcagcatccgccaccgcagcctccaccggcactcccacgggccccagttcggctccgaggtggagctgagacactcctgaggtgacccggctgggtcggccctgcccaagggcctcccaccagagactgggatgggaacactggtgggcagctgaggacacaccccacaccccagcccaccctgctcctcctgccctgtccctgtccccctcccctcccagtcctccagaccaccagccgccccagccccttctcccagcacacggctgcctgacactgagccccacctctccaagtctctctgtgaatacaattaaaggtcctgccctccc

SEQ ID NO: 283914 - DNA, 1000 bp, Homo Sapiens
ttcattcaactttaatccccacaaatggctattggtgaattttgactgttctgccatgtgggtgaaaaagagaacagacttaacgggagcctttagactggaccccacttacctgaagcacagccatcaggattcagggcttatcactgactaccggcattggcagataccactgggcagaagatttcgctctttgaaaatgtggtttgtatttaggatgtatggagtcaaaggactgcaggcttatatccgcaagcatgtccagctgtcccatgagtttgagtcactggtgcgccaggatccccgctttgaaatctgtgtggaagtcattctggggcttgtctgctttcggctaaagggttccaacaaagtgaatgaagctcttctgcaaagaataaacagtgccaaaaaaatccacttggttccatgtcacctcagggacaagtttgtcctgcgctttgccatctgttctcgcacggtggaatctgcccatgtgcagcgggcctgggaacacatcaaagagctggcggccgacgtgctgcgagcagagagggagtaggagtgaagccagctgcaggaatcaaaaattgaagagagatatatctgaaaactggaataagaagcaaataaatatcatcctgccttcatggaactcagctgtctgtggcttcccatgtctttctccaaagttatccagagggttgtgattttgtctgcttagtatctcatcaacaaagaaatattatttgctaattaaaaagttaatcttcatggccatagcttttattcattagctgtgatttttgttgattaaaacattatagattttcatgttcttgcagtcatcagaagtggtaggaaagcctcactgatatattttccagggcaatcaatgttcacgcaacttgaaattatatctgtggtcttcaaattgtcttttgtcatgtggctaaatgcctaataaacaattcaagtgaaatactaaaaaaaaaaaaaaaaa

SEQ ID NO: 283915 - DNA, 1000 bp, Homo Sapiens; identical to SEQ ID NO: 220613

SEQ ID NO: 283916 - DNA, 1000 bp, Homo Sapiens; identical to SEQ ID NO: 220614

SEQ ID NO: 283917 - DNA, 1000 bp, Homo Sapiens
atgccatagagacggtgagtatcaataacaatggggccgcgatgttttccagccatcatgagccacgaggctccatctccaaggagtgcaatctggtttacctgatcccacatgctgtgggctcctctgaggacctgaaaaaggaggaggcagctggcatcgccagacccttggagaagctgtccccagccctatcggtcatattggactatgacactgacgtctctctggagaagatccaacccatcacacaaaacggtcagcacccaacctgaactcgcagatgaatcctgccacacatgctcatcccaaaagctagaggagattgctctggggtttgctattaagaaactaaggtacggtgagactctgaggtgtcaggagagccctctgctgctttccaacacacaattaactccgtttccaaatacattccagtgtattttctgtgttgttcatagtcaatcaaacagggacactacaaacatggggagccataagggacatgtctttggcttcagaattgtttttagaaatttattcttatcttaggatttaccaaatagggcaaagaatcaacagtgaacagcttcacttaaaatcaaatttttctgggaagaaaatgagatgggttgagtttgctgtatacaaacaggtgctaacactgttcccagcaaagttttcagattgtaaaggtaggtgcatgccttcataaattatttctaaaacattaattgaggcttacagtaggagtgagaaatttttttccagaattgagagatgttttgttgatattggttctatttatttattgtatatatggatatttttaatttatgatataataaatatatatttatcatatttaataggataaattaatgagttttatccaagaccttacaaccacatttctggccatttaactagcactttataagccaatgaagcaaacacacagactctgtgagattctaaatgttcatgtgtaacttctaga

SEQ ID NO: 283918 - DNA, 1000 bp, Homo Sapiens
acgggctgtgctgaacactgcagcttgaatgagaatatcactgtcccagacaccaaagttaatttctatgcctggaagaggatggaggtcgggcagcaggccgtagaagtctggcagggcctggccctgctgtcggaagctgtcctgcggggccaggccctgttggtcaactcttcccagccgtgggagcccctgcagctgcatgtggataaagccgtcagtggccttcgcagcctcaccactctgcttcgggctctgggagcccagaaggaagccatctcccctccagatgcggcctcagctgctccactccgaacaatcactgctgacactttccgcaaactcttccgagtctactccaatttcctccggggaaagctgaagctgtacacaggggaggcctgcaggacaggggacagatgaccaggtgtgtccacctgggcatatccaccacctccctcaccaacattgcttgtgccacaccctcccccgccactcctgaaccccgtcgaggggctctcagctcagcgccagcctgtcccatggacactccagtgccagcaatgacatctcaggggccagaggaactgtccagagagcaactctgagatctaaggatgtcacagggccaacttgagggcccagagcaggaagcattcagagagcagctttaaactcagggacagagccatgctgggaagacgcctgagctcactcggcaccctgcaaaatttgatgccaggacacgctttggaggcgatttacctgttttcgcacctaccatcagggacaggatgacctggagaacttaggtggcaagctgtgacttctccaggtctcacgggcatgggcactcccttggtggcaagagcccccttgacaccggggtggtgggaaccatgaagacaggatgggggctggcctctggctctcatggggtccaagttttgtgtattcttcaacctcattgacaagaactgaaaccaccaaaaaaaaaaaa

SEQ ID NO: 283919 - DNA, 1000 bp, Homo Sapiens
ctgtcactcagctttgcttccgacacctctgtttcctcttcccctttctcctcgtatgtgtgtttacctaaactatatgccataaacctcaagttattcattttattttgttttcattttggggtgaagattcagtttcagtcttttggatataggtttccaattaagtacatggtcaagtattaacagcacaagtggtaggttaacattagaataggaattggtgttggggggggggtttgcaagaatattttattttaattttttggatgaaatttttatctattatatattaaacattcttgctgctgcgctgcaaagccatagcagatttgaggcgctgttgaggactgaattactctccaagttgagagatgtctttgggttaaattaaaagccctacctaaaactgaggtggggatggggagagcctttgcctccaccattcccacccaccctccccttaaaccctctgcctttgaaagtagatcatgttcactgcaatgctggacactacaggtatctgtccctgggccagcagggacctctgaagccttctttgtggccttttttttttttcatcctgtggtttttctaatggactttcaggaattttgtaatctcataactttccaagctccaccacttcctaaatcttaagaactttaattgacagtttcaattgaaggtgctgtttgtagacttaacacccagtgaaagcccagccatcatgacaaatccttgaatgttctcttaagaaaatgatgctggtcatcgcagcttcagcatctcctgttttttgatgcttggctccctctgctgatctcagtttcctggcttttcctccctcagccccttctcacccctttgctgtcctgtgtagtgatttggtgagaaatcgttgctgcacccttcccccagcaccatttatgagtctcaagttttattattgcaataaaagtgctttatgccggcttttctcaaaaaaaaaaaaaaaaaa

SEQ ID NO: 283920 - DNA, 944 bp, Homo Sapiens
tcaagattaaacgacaaggacagacatggctcagcggatgacaacacagctgctgctccttctagtgtgggtggctgtagtaggggaggctcagacaaggattgcatgggccaggactgagcttctcaatgtctgcatgaacgccaagcaccacaaggaaaagccaggccccgaggacaagttgcatgagcagtgtcgaccctggaggaagaatgcctgctgttctaccaacaccagccaggaagcccataaggatgtttcctacctatatagattcaactggaaccactgtggagagatggcacctgcctgcaaacggcatttcatccaggacacctgcctctacgagtgctcccccaacttggggccctggatccagcaggtggatcagagctggcgcaaagagcgggtactgaacgtgcccctgtgcaaagaggactgtgagcaatggtgggaagattgtcgcacctcctacacctgcaagagcaactggcacaagggctggaactggacttcagggtttaacaagtgcgcagtgggagctgcctgccaacctttccatttctacttccccacacccactgttctgtgcaatgaaatctggactcactcctacaaggtcagcaactacagccgagggagtggccgctgcatccagatgtggttcgacccagcccagggcaaccccaatgaggaggtggcgaggttctatgctgcagccatgagtggggctgggccctgggcagcctggcctttcctgcttagcctggccctaatgctgctgtggctgctcagctgacctccttttaccttctgatacctggaaatccctgccctgttcagccccacagctcccaactatttggttcctgctccatggtcgggcctctgacagccactttgaataaaccagacaccgcacatgtgtcttgagaattatttgg

SEQ ID NO: 283921 - DNA, 1000 bp, Homo Sapiens; identical to SEQ ID NO: 115186

SEQ ID NO: 283922 - DNA, 1000 bp, Homo Sapiens
ctgccctaattgaatttgcaactgttaattacttcaccaaaagaggatggacttgggatgggaagagtgtagtaaatgacaagaaaaaagaaaaggcttccgttatgatacagaacaacgcttatgcagtggctgttgccaattatgccccgaatctttcaaaagatccagttctctccaccatctccaagagtgcaaccacgccagaacccaacaagaagccagaaaacaagccagctgaagcaaagaaaactttcaacagtgttagcaaaattgacagaatgtccagaatagtttttccagttttgtttggtacctttaatttagtttactgggctacatatttaaacagagaacctgtattaggggtcagtccttgaattgagacccatgttatctttgggatgtatagcaacattaaatttggtttgttttgctatgtacagtctgactaataactgctaatttgtgatccaacatgtacagtatgtatatagtgacatagcttaccagtagacctttaatggagacatgcatttgctaactcatggaactgcagacagaaagcactccatgcgaaaacagccattgccttttttaaagatttaccctaggacctgatttaaagtgaatttcaagtgacctgattaatttcctattcttccaaatgagatgaaaatggggatcctgtacaaccctttgtggacccttttggtttagctcttaagtaggggtattttctactgttgcttaattatgatggaagataacattgtcattcctagatgaatcctttgaagtaacaaacattgtatctgacatcagctctgttcatgagtgctcagagtccctgctaatgtaattggaagcttggtacacataagaaaaactagagatttgaaatctagctatgaattactctatatagtatctatagccatgtacatattacagcatgacaagctcgaaataattatgagtcagcccgaaagatgttaat

SEQ ID NO: 283923 - DNA, 1000 bp, Homo Sapiens
catgcaaaggtgtatctatgcgataatactttgaatgtctgtagtttgaaatagaaggttaattttttccactggcttatccttaatgaaggaaatcccctgataattactttgattctgaaaatgttgaaaactccagaagaaataaagcttttctttgatttctcagctgaagtgttgtacaaactgaggaatatgaagtccattcccttctttcttctcttgaataattttaaaattgtttgtttagttgtacaattgaaaatattccttattatagaagtaaaaaaacaataatgcatatttcctcatatcataaaaactaaatttgttatcatctgagcttcaatattcttgctcaattagaatagtaaatataaagtgtgatatttataacagttcaaggtttgataggagatagaggtgttttgattttatgggaaaattacttcctcaagaacacatttcttgaggttttagtaatcacatttgactccctgaaattggcaattttattcaatgtaggaatattatcatggtatattatagtgaggagcacatagtcattattattttgtttttgcaaatttattttgaaaaaaaggagcattatcaaatattggtttactattttaaagtaattcatcaggaaatgattttttaaacactgtccctttaagtaaatgtcccttgcttttcaaagctcaacttattacttatggtaatagagttactttgcttcttaaaacaaagtttatactagagcatagcattgtagaattattcaggtctcaatttctcactggaaaatgagtctttaaaatagtaaggatttaaatttctataaaatttaatcacagatacttatattttaagataaatgtgttggagctaaactctggaattattaaaatataaaacattatatccctctaatgtattttttctatttaaatttaaaacaataaacataaatatctttggaaaaaaaaaaaaaaaa

SEQ ID NO: 283924 - DNA, 1000 bp, Homo Sapiens
gctgcatgaggagctggaactggctgaacggagaagacaccaccatccaggaaacggtgaaagtgaacacgaggatgcagtgcttctcggtgacggagagaggctctttctaccccgggagcggcttcgccttctacagcctggactacatgcggacccctctggacgtcgggactgaatcaacctgggaagtagaagtcgtggctcacatccgcccagccgcagacacaggcgtgctgtttgcgctctgggcccccgacctccgtgccgtgcctctctctgtggcactggtagactatcactccacgaagaaactcaagaagcagctggtggtcctggccgtggagcatacggccttggccctaatggagatcaaggtctgcgacggccaagagcacgtggtcaccgtctcgctgagggacggtgaggccaccctggaggtggacggcaccaggggccagagcgaggtgagcgccgcgcagctgcaggagaggctggccgtgctcgagaggcacctgcggagccccgtgctcacctttgctggcggcctgccagatgtgccggtgacttcagcgccagtcaccgcgttctaccgcggctgcatgacactggaggtcaaccggaggctgctggacctggacgaggcggcgtacaagcacagcgacatcacggcccactcctgcccccccgtggagcccgccgcagcctaggcccccacgggacgcggcaggcttctcagtctctgtccgagacagccgggaggagcctgggggctcctcaccacgtggggccatgctgagagctgggctttcctctgtgaccatcccggcctgtaacatatctgtaaatagtgagatggacttggggcctctgacgccgcgcactcagccgtgggcccgggcgcggggaggccggcgcagcgcagagcgggctcgaagaaaataattctctattatttttattaccaagcgcttctttctgactctaaaatatggaaaat

SEQ ID NO: 283925 - DNA, 1000 bp, Homo Sapiens
ttgtacaaaataaaattccatttcattgtgacctactcctttcataaatgccaatctgtgagaacttttgaattttcatagcaacattgcattttggatgccatttgattgtaataaaactgtggcaccttaattttgaatggcagcatgatcatgtaatatctgtgctctaataacgatgtatatatgtatagtgaacatattgcttagtaacaaatgaaggacaagcatactacataatataatccatacaattctcttcagttagtgtaaactgcaaatactacagataattctgataataaaatgatatgcacgctgaatcctgctatggtcaccattctaatgtatgtagtatttcaaatttccttccttgtaactttcaaagaaagccatcttattcttgtaattttagatggtattatcacagatttaaaaaggttgtattacatattgtttaaactttgtaagtagaaatatatctgttataattatacaggctctgtggagaaataaagttcaaaatatattaatttgtaaaatcagctcgttttaaagtgtgcttgtgttgtcaaaaatatcagatagtaatacacagtgagcatttttaaacaaagggaaacctatatttatgtaactgtatactgaattctgacaaaataaaaaaagataccttattgacgaaatatttaggataaacaaaattctatttaatccaccttaaaacctaaatgtattttcatggatttcatttgttggtacatattacacaaaacattgtgccttaaaatgagtcatacatcttttaaattggaatgcagtaatagatatgtgattttacatcatttttaagaaaccaaggggaagtaataagttgaaaaagaaatccataactattaaaagattttaacttttttattttattaaaatgcttgcatattttaagtaaaattaaaaaaaaaaaaaaaaaaaaaaaaaaaaaaaaaaaaaaaaaaaaaaa

SEQ ID NO: 283926 - DNA, 1000 bp, Homo Sapiens
aagaaagcctttgtgtagcacttggtattttgcaaagtgcttttaaaacattcttacttaccgtatttcatagaagggaaggaaaaatgtaaggtttaacagtaagcacttgcattgaacatggaggcatgtggtatcatgatattcttcactaaatttagctgtccctaatcacagatcctaaggtaatataatataattttagtgcatttctcctcatcaggaatgctggaggtgcattttaagttttaataataagtgctagaatgaccaaattgcagactaattgtttccatattgtacttaaaatgagtttttaaaagtgaaaaagaaatgactatatacaatcaatgctatttattgtacctctgggcctactcttctaaaaattgtagcttatcgatttttctctgtcaagcttgaactaatgtaaataattgaaataatgtaaagttatattttcatgtttttatagatacaacatgacaagaatacataatgtaagagtatttcaactatggataatgttgattggataatgcacatctcagttacaagcagtactcatagtttaatatccatgtaacggtgcatcaatatattgctatataaatatgtctgtgtgcatataagtgaaaagtggtcaaacaagagtgatgacagctgtctaaaggtttttttattcattttatataaaaactgttatggaaagaccaaaatgtttatgaactattcttatgtaaatttacaattgtcctttactgtacttttttgtttacagtatagtaccttattttctgctgtgttaagtgggtgtcaaactccaagaagacatacactttctataacttctattgaagatattggaatttccaatttttcatgtgtactatgtcagaaaatgctttcgattttatttttaaatctaacatcggatggcttttccggagtgttgtaaaaacttcaatcatacataaaacatgttcttacaaaaggcaaa

SEQ ID NO: 283927 - DNA, 1000 bp, Homo Sapiens
ccaaaaatgcttgcttcaaccccatgagactcgatagtggtggtgaacagaacccaaggtcattggtggcagagtggattcttgaacaaactggaaagtacgttatgatagtgtcccccggtgccttggggacaagagcaggtggattgtgcgtgcatgtgtgttcatgcacacttgcacccatgtgtagtcaggtgcctcaagagaaggcaaccttgactcttttattgtttctttcaatatccccaagcagtgtgattgtttggcttatatacagacagagatggccatgtattacctgaattttggctgtgtctcccttcatccttctggaataaggagaatgaaaattcttgataaagaagattctgtggtctaaacaaaaaaaggcggtgagcaatcctgcaagagcaaggtacataaacaagtcctcagtggttggcaactgtttcaacttgtttgaaccaagaaccttccaggaaggctaaagggaaaccgaatttcacagccatgattcttttgcccacacttgggacgaaaagattctacaaagctcttttgagcatttagactctcgactggccaaggtttggggaagaacgaacggacctttgaagaagtaaggagtcgtgtatggtagggtaagtgagagagggggatgtttcctatgctttgatcccttctcacttaacctgaagctagacgagcaggcttcttccccccaaaactgattacaactgctacagagcagacagttaagagaaatgagcttgacatttaagagaaatgagctgcactccatgagtgcagctctggaggtacgaaaagaggggaagagacttggaaatgggagacgggggcagagagggaccctccaccacctctttgggcctggctgggtgggaatgtgacttgagcccagagtgaacactcttggtagaagcccttctaccttcctgcaacacctgttccctctcagattgtaccattgagccggaac

SEQ ID NO: 283928 - DNA, 1000 bp, Homo Sapiens
agaagcgggaaacagtcatcctaaaatgcaatgtcaaagattccagcatgttgatctctcttacctacgatgtgatcctggtgatcttatgcactgtgtacgccttcaaaacgcggaagtgcccagaaaatttcaacgaagctaagttcataggttttaccatgtacaccacgtgcatcatctggttggccttcctccctatattttatgtgacatcaagtgactacagagtgcagacgacaaccatgtgcatctctgtcagcctgagtggctttgtggtcttgggctgtttgtttgcacccaaggttcacatcatcctgtttcaaccccagaagaatgttgtcacacacagactgcacctcaacaggttcagtgtcagtggaactgggaccacatactctcagtcctctgcaagcacgtatgtgccaacggtgtgcaatgggcgggaagtcctcgactccaccacctcatctctgtgattgtgaattgcagttcagttcttgtgtttttagactgttagacaaaagtgctcacgtgcagctccagaatatggaaacagagcaaaagaacaaccctagtacctttttttagaaacagtacgataaattatttttgaggactgtatatagtgatgtgctagaactttctaggctgagtctagtgcccctattattaacaattcccccagaacatggaaataaccattgtttacagagctgagcattggtgacagggtctgacatggtcagtctactaaaaaacaaaaaaaaaaaacaaaaaaaaaaaaacaaaagaaaaaaataaaaatacggtggcaatattatgtaaccttttttcctatgaagttttttgtaggtccttgttgtaactaatttaggatgagtttctatgttgtatattaaagttacattatgtgtaacagattgattttctcagcacaaaataaaaagcatctgtattaatgtaaagatactgagaataaaaccttcaaggttttcca

SEQ ID NO: 283929 - DNA, 1000 bp, Homo Sapiens; identical to SEQ ID NO: 220619

SEQ ID NO: 283930 - DNA, 1000 bp, Homo Sapiens; identical to SEQ ID NO: 220620

SEQ ID NO: 283931 - DNA, 1000 bp, Homo Sapiens
ttatgacagaagccagtggctgaatgaaaaattcaagctgggcctggactttcccaatctgccctacttgattgatgggactcacaagatcacccagagcaacgccatcctgcggtacattgcccgcaagcacaacctgtgcggggaatcagaaaaggagcagattcgcgaagacattttggagaaccagtttatggacagccgtatgcagctggccaaactctgctatgacccagattttgagaaactgaaaccagaatacctgcaggcactccctgaaatgctgaagctctactcacagtttctggggaagcagccatggtttcttggggacaagatcacctttgtggatttcatcgcttatgatgtccttgagagaaaccaagtatttgagcccagctgcctggatgccttcccaaacctgaaggacttcatctcccgatttgagggcttggagaagatctctgcctacatgaagtccagccgcttcctcccaagacctgtgttcacaaagatggctgtctggggcaacaagtagggccttgaaggccaggaggtgggagtgaggagcccatactcagcctgctgcccaggctgtgcagcgcagctggactctgcatcccagcacctgcctcctcgttcctttctcctgtttattcccatctttactcccaagacttcattgtccctcttcactccccctaaacccctgtcccatgcaggccctttgaagcctcagctacccactatccttcgtgaacatcccctcccatcattacccttccctgcactaaagccagcctgaccttccttcctgttagtggttgtgtctgctttaaagggcctgcctggcccctcgcctgtggagctcagccccgagctgtccccgtgttgcatgaaggagcagcattgactggtttacaggccctgctcctgcagcatggtccctgccttaggcctacctgatggaagtaaagcctcaaccacaaaaaaaaaaaaa

SEQ ID NO: 283932 - DNA, 1000 bp, Homo Sapiens; identical to SEQ ID NO: 115189

SEQ ID NO: 283933 - DNA, 1000 bp, Homo Sapiens
gaagccagtggctgaatgaaaaattcaagctgggcctggactttcccaatctgccctacttgattgatggggctcacaagatcacccagagcaacgccatcctgtgctacattgcccgcaagcacaacctgtgtggggagacagaagaggagaagattcgtgtggacattttggagaaccaggctatggacgtctccaatcagctggccagagtctgctacagccctgactttgagaaactgaagccagaatacttggaggaacttcctacaatgatgcagcacttctcacagttcctggggaagaggccatggtttgttggagacaagatcacctttgtagatttcctcgcctatgatgtccttgacctccaccgtatatttgagcccaactgcttggacgccttcccaaatctgaaggacttcatctcccgctttgagggcttggagaagatctctgcctacatgaagtccagccgcttcctcccaaaacctctgtacacaagggtggctgtctggggcaacaagtaatgccttgaaggccaggaggtgggagtgaggagcccatactcagcctgctgcccaggctgtgcagcgcagctggactctgcatcccagcacctgcctcctcgttcctttctcctgtttattcccatctttacccccaagactttattgggcctcttcacttcccctaaacccctgtcccatgcaggccctttgaagcctcagctacccactttccttcatgaacatccccctcccaacactacccttccctgcactaaagccagcctgaccttccttcctgttagtggttgtatctgctttgaagggcctacctggcccctcgcctgtggagctcagccctgagctgtccccgtgttgcatgacagcattgactggtttacaggccctgctcctgcagcatggcccctgccttaggcctacctgatcaaaataaagcctcagccacaaaaaaaaaaaaaaaaaaaaaaaaa

SEQ ID NO: 283934 - DNA, 737 bp, Homo Sapiens
ggagtttcgccgccgcagtcttcgccaccatgccgccctacaccgtggtctatttcccagttcgaggccgctgcgcggccctgcgcatgctgctggcagatcagggccagagctggaaggaggaggtggtgaccgtggagacgtggcaggagggctcactcaaagcctcctgcctatacgggcagctccccaagttccaggacggagacctcaccctgtaccagtccaataccatcctgcgtcacctgggccgcacccttgggctctatgggaaggaccagcaggaggcagccctggtggacatggtgaatgacggcgtggaggacctccgctgcaaatacatctccctcatctacaccaactatgaggcgggcaaggatgactatgtgaaggcactgcccgggcaactgaagccttttgagaccctgctgtcccagaaccagggaggcaagaccttcattgtgggagaccagatctccttcgctgactacaacctgctggacttgctgctgatccatgaggtcctagcccctggctgcctggatgcgttccccctgctctcagcatatgtggggcgcctcagcgcccggcccaagctcaaggccttcctggcctcccctgagtacgtgaacctccccatcaatggcaacgggaaacagtgagggttggggggactctgagcgggaggcagagtttgccttcctttctccaggaccaataaaatttctaagagagct

SEQ ID NO: 283935 - DNA, 1000 bp, Homo Sapiens
cccagccgcgccgtctacatcttcgccaagaagaatggcatccccttagagctgcgcaccgtggatttggtcaaagggcagcacaagagcaaggagttcttgcagatcaacagcctggggaaactgccgacgctcaaggatggtgatttcatcttgaccgaaagctcggccatcctgatttacctgagctgtaagtaccagacgccggaccactggtatccatctgacctgcaggctcgtgcccgtgttcatgagtacctgggctggcatgccgactgcatccgtggcacctttggtatacccctgtgggtccaggtgttggggccactcattggggtccaggtgcccgaggagaaggtggaacgcaacaggactgccatggaccaggccctgcaatggctggaggacaagttcctgggggacaggcccttcctcgctggccagcaggtgacactggctgatctcatggccctggaggagctgatgcagccggtggctctcggctacgaactgtttgagggacggccacgactggcagcatggcgtggacgagtggaggctttcctgggtgctgagctatgccaggaggcccacagcatcatcttgagcatcctggaacaggcggccaagaaaaccctcccaacaccctcaccagaggcctatcaggctatgctgcttcgaatcgccaggatcccctgaagggtctgggatgggggccaggagattagcaacaaggattcattctgttacttacttgcccctttttatctttccctcttgccccagtcccttctctccagcttcatgtgaagctctgcacagacaagacactcagtgtccttggcagtgctgctactcctcaggtgcagcatacataaccagtaagagactaaatctgcaatatataaagagctcctacaaatcagtaacatgaagaacactcaaaaattggcaaatgtcatcagtgttttaaacagaataaagattccaaacactttga

SEQ ID NO: 283936 - DNA, 1000 bp, Homo Sapiens
caccgctgcaggtcatcaccatgctcaatgcactgtacactcgcttcgaccagcagtgtggagagctggatgtctacaaggtggagaccattggcgatgcctattgtgtagctgggggattacacaaagagagtgatactcatgctgttcagatagcgctgatggccctgaagatgatggagctctctgatgaagttatgtctccccatggagaacctatcaagatgcgaattggactgcactctggatcagtttttgctggcgtcgttggagttaaaatgccccgttactgtctttttggaaacaatgtcactctggctaacaaatttgagtcctgcagtgtaccacgaaaaatcaatgtcagcccaacaacttacagattactcaaagactgtcctggtttcgtgtttacccctcgatcaagggaggaacttccaccaaacttccctagtgaaatccccggaatctgccattttctggatgcttaccaacaaggaacaaactcaaaaccatgcttccaaaagaaagatgtggaagatggcaatgccaattttttaggcaaagcatcaggaatagattagcaacctatatacctatttataagtctttggggtttgactcattgaagatgtgtagagcctctgaaagcactttagggattgtagatggctaacaagcagtattaaaatttcaggagccaagtcacaatctttctcctgtttaacatgacaaaatgtactcacttcagtacttcagctcttcaagaaaaaaaaaaaaaccttaaaaagctacttttgtgggagtatttctattatataaccagcacttactacctgtactcaaaattcagcaccttgtacatatatcagataattgtagtcaattgtacaaactgatggagtcacctgcaatctcatatcctggtggaatgccatggttattaaagtgtgtttgtgatagtgtcgtcaaaaaaaaaaaaaaaaaaaaaaaaaaaaaaaaa

SEQ ID NO: 283937 - DNA, 1000 bp, Homo Sapiens
tacctggggttgctgtcgaggaccctgtgcaagactcggccggtttttctttctccctgatggacagacccaaacatagccgcgcagcatcgtgaagggctggggccttcactcctctgtggctctggaagagcccgatttcctcaggaggcatgtcgggccccaggcctgtggtgctgagcgggccttcgggagctgggaagagcaccctgctgaagaggctgctccaggagcacagcggcatctttggcttcagcgtgtcccataccacgaggaacccgaggcccggcgaggagaacggcaaagattactactttgtaaccagggaggtgatgcagcgtgacatagcagccggcgacttcatcgagcatgccgagttctcggggaacctgtatggcacgagcaaggtggcggtgcaggccgtgcaggccatgaaccgcatctgtgtgctggacgtggacctgcagggtgtgcggaacatcaaggccaccgatctgcggcccatctacatctctgtgcagccgccttcactgcacgtgctggagcagcggctgcggcagcgcaacactgaaaccgaggagagcctggtgaagcggctggctgctgcccaggccgacatggagagcagcaaggagcccggcctgtttgatgtggtcatcattaacgacagcctggaccaggcctacgcagagctgaaggaggcgctctctgaggaaatcaagaaagctcaaaggaccggcgcctgaggcttgctgtctgttctcggcaccccgggcccatacaggaccagggcagcagcattgagccacccccttggcaggcgatacggcagctctgtgcccttggccagcatgtggagtggaggagatgctgcccctgtggttggaacatcctggggtgacccccgacccagcctcgctgggctgtcccctgtccctatctctcactctggacccagggctgacatcctaataaaataactgttggattagaaactcca

SEQ ID NO: 283938 - DNA, 1000 bp, Homo Sapiens; identical to SEQ ID NO: 115190

SEQ ID NO: 283939 - DNA, 1000 bp, Homo Sapiens; identical to SEQ ID NO: 220624

SEQ ID NO: 283940 - DNA, 1000 bp, Homo Sapiens; identical to SEQ ID NO: 220625

SEQ ID NO: 283941 - DNA, 1000 bp, Homo Sapiens
acttagcataatattttctttctttttttttttttttgagacggagtcttgccctctcgccaggctggagtgtagtggcacaatctcagctcactgcaacctccgcatcccgggttcaagagattctgcctcagcctccagagtagctgggactacaaacgtgtgtcaccaggcccagctaatttttgtatttttaataaagacggggtttcatcatgttggccagggtggtctcgatctcttgacctcgtgatccgcccgcctcagcatcccaaagtgctgggattacaggcatgagccactgtgcctggccaacataatgttttcacagttcctctttgttggaagaagtgtgtgacctacaagattcctggttgatacagttcaggtgagaaactgtttgattatagaaaagaccccagactcagagggaaggctctctggtctacctgagatctatatggagcttaaaggagggtgaataagattaatgacctgaattgaaagagaatttggagccaggatgggtctccattctgtgtggcaccttgattggaaaataatatccatgcgtttcttccactgagtctttcttagattaaatctctcccagttgtccgtgaagagaaagacagtatttgcagtgccgatgatatagagtgacttggagagagattcagaagttaggggtagcgggggtaggatggttgggaccagattgactaccctgtacccttccttcttccccaatatgcctgcgccatcttcacattctgaagttgaaacccatgatcacccctttgaggtagattgaccggctttagacgcccaccccccacccaccgcaagctttgagtgggacaccattctgaattttttttctgaatttttttttaacatctctttctcattagagatctgaaaactcattagagatgttgagtcttatcaaataaaaagcatgagacatcatggccaaaaaaaaaaaaaaaaaaaaaaa

SEQ ID NO: 283942 - DNA, 1000 bp, Homo Sapiens
ggcagtggaagagctgctgtatttgaggaaactcatacagtctctatttgatttgcaacactggccaaacatcagtcatttgcttgagcatgcccaaatattacatgaaagtcaagtctacctgccttgcctgttaggtctgttgaagtgcatgttaaaataattatatgaagcagaatgagatgatttaattcttaccgaaatgaaaatggctgaagaaacacagcatgcatttagcatgagttctgcacatacagatggtgtcctgcatgtatgccatgtatgttgcatgaatccatcgatttgtattaatgtagggcagaatagctgatagaagaaggactgaagaaaatccttcagcaatccttaaaaagaccatgcattcagatctgaagtagtgtgagtgttagaaaaaactggaaacatctgatttctgaactatcagggcaagctcatagcacatgttttacaaagaaacaaaatataaatcacagatttccaaaagtactagcaataagttgaatgataatagctcacagcacatttgttaatgattcttgtgtcatcaagtagtagtacttaatagtacccaacctggtaattatcctcaagttgtgtgctattcgtaagttctgtgcagtttggtatgaaacaaatatactcatttggatataaatcttacccttcaatgttaaatctacaaacttttataaatgttttaaagaagtccatgtgataattgtaaaggtgatgaatttaccatcaaacaaatcattttgatgtattattatatatgtatatctgtgtaagacacgtgcaacagactgccttatattattttctgtaattcttctcctttgtcaaatggtattttttgtgaatggttgcaaagtgttgtcttattcctaattcctgtatgttatccactacaggttttatgagacttcctattaatttattaaatttattaaatgttgaaaaaaaaaaaaaaaaaaaaaaa

SEQ ID NO: 283943 - DNA, 1000 bp, Homo Sapiens; identical to SEQ ID NO: 115191

SEQ ID NO: 283944 - DNA, 1000 bp, Homo Sapiens; identical to SEQ ID NO: 115192

SEQ ID NO: 283945 - DNA, 1000 bp, Homo Sapiens
ttggtttttatatttctcgtatttaatatgggtgaacaccaacttttatttggaataataattttcctcctaaacaaaaacacattgagtttaagtctctgactcttgcctttccacctgctttctcctgggcccgctttgcctgcttgaaggaacagtgctgttctggagctgctgttccaacagacagggcctagctttcatttgacacacagactacagccagaagcccatggagcagggatgtcacgtcttgaaaagcctattagatgttttacaaatttaattttgcagattattttagtctgtcatccagaaaatgtgtcagcatgcatagtgctaagaaagcaagccaatttggaaacttaggttagtgacaaaattggccagagagtgggggtgatgatgaccaagaattacaagtagaatggcagctggaatttaaggagggacaagaatcaatggataagcgtgggtggaggaagatccaaacagaaaagtgcaaagttattccccatcttccaagggttgaattctggaggaagaagacacattcctagttccccgtgaacttcctttgacttattgtccccactaaaacaaaacaaaaaacttttaatgccttccacattaattagattttcttgcagtttttttatggcatttttttaaagatgccctaagtgttgaagaagagtttgcaaatgcaacaaaatatttaattaccggttgttaaaactggtttagcacaatttatattttccctctcttgcctttcttatttgcaataaaaggtattgagccattttttaaatgacatttttgataaattatgtttgtactagttgatgaaggagttttttttaacctgtttatataattttgcagcagaagccaaattttttgtatattaaagcaccaaattcatgtacagcatgcatcacggatcaatagactgtacttattttccaataaaattttcaaactttgtactgttaaa

SEQ ID NO: 283946 - DNA, 1000 bp, Homo Sapiens; identical to SEQ ID NO: 220627

SEQ ID NO: 283947 - DNA, 1000 bp, Homo Sapiens
gggcactaaagaacactgaaaaatatggagtggcaatatagaaacacgaactttagctgcatcctccaagaatctatctgcttatgcagtttttcagagtggaatgcttcctagaagttactgaatgcaccatggtcaaaacggattagggcatttgagaaatgcatattgtattactagaagatgaatacaaacaatggaaactgaatgctccagtcaacaaactatttcttatatatgtgaacatttatcaatcagtataattctgtactgatttttgtaagacaatccatgtaaggtatcagttgcaataatacttctcaaacctgtttaaatatttcaagacattaaatctatgaagtatataatggtttcaaagattcaaaattgacattgctttactgtcaaaataattttatggctcactatgaatctattatactgtattaagagtgaaaattgtcttcttctgtgctggagatgttttagagttaacaatgatatatggataatgccggtgagaataagagagtcataaaccttaagtaagcaacagcataacaaggtccaagatacctaaaagagatttcaagagatttaattaatcatgaatgtgtaacacagtgccttcaataaatggtatagcaaatgttttgacatgaaaaaaggacaatttcaaaaaaataaaataaaataaaaataaattcacctagtctaaggatgctaaaccttagtactgagttacattgtcatttatatagattataacttgtctaaataagtttgcaatttgggagatatatttttaagataataatatatgtttaccttttaattaatgaaatatctgtatttaattttgacactatatctgtatataaaatattttcatacagcattacaaattgcttactttggaatacatttctcctttgataaaataaatgagctatgtattaacaaaaaaaaaaaaaaaaaaaaaaaaaaaaaaaaaaaaaaa

SEQ ID NO: 283948 - DNA, 1000 bp, Homo Sapiens; identical to SEQ ID NO: 115193

SEQ ID NO: 283949 - DNA, 1000 bp, Homo Sapiens; identical to SEQ ID NO: 220628

SEQ ID NO: 283950 - DNA, 1000 bp, Homo Sapiens
aagtgaacagctccaaatgtcaccacgggaacggctctttccagtgtggggtgtgtgcctgccaccctggccacatggggcctcgctgtgagtgtggcgaggacatgctgagcacagattcctgcaaggaggccccagatcatccctcctgcagcggaaggggtgactgctactgtgggcagtgtatctgccacttgtctccctatggaaacatttatgggccttattgccagtgtgacaatttctcctgcgtgagacacaaagggctgctctgcggaggtaacggcgactgtgactgtggtgaatgtgtgtgcaggagcggctggactggcgagtactgcaactgcaccaccagcacggactcctgcgtctctgaagatggagtgctctgcagcgggcgcggggactgtgtttgtggcaagtgtgtttgcacaaaccctggagcctcaggaccaacctgtgaacgatgtcctacctgtggtgacccctgtaactctaaacggagctgcattgagtgccacctgtcagcagctggccaagcccgagaagaatgtgtggacaagtgcaaactagctggtgcgaccatcagtgaagaagaagatttctcaaaggatggttctgtttcctgctctctgcaaggagaaaatgaatgtcttattacattcctaataactacagataatgaggggaaaaccatcattcacagcatcaatgaaaaagattgtccgaagcctccaaacattcccatgatcatgttaggggtttccctggctattcttctcatcggggttgtcctactgtgcatctggaagctactggtgtcatttcatgatcgtaaagaagttgccaaatttgaagcagaacgatcaaaagccaagtggcaaacgggaaccaatccactctacagaggatccacaagtacttttaaaaatgtaacttataaacacagggaaaaacaaaaggtagacctttccacagattgctagaactactttatgca

SEQ ID NO: 283951 - DNA, 1000 bp, Homo Sapiens; identical to SEQ ID NO: 220630

SEQ ID NO: 283952 - DNA, 1000 bp, Homo Sapiens
ttggaggaacaaactcttcttggggagagtggccctggcaggtgagcctgcaggtgaagctgacagctcagaggcacctgtgtggagggtcactcataggacaccagtgggtcctcactgctgcccactgctttgatgggcttcccctgcaggatgtttggcgcatctatagtggcattttaaatctgtcagacattacaaaagatacacctttctcacaaataaaagagattattattcaccaaaactataaagtctcagaagggaatcatgatatcgccttgataaaactccaggctcctttgaattacactgaattccaaaaaccaatatgcctaccttccaaaggtgacacaagcacaatttataccaactgttgggtaaccggatggggcttctcgaaggagaaaggtgaaatccaaaatattctacaaaaggtaaatattcctttggtaacaaatgaagaatgccagaaaagatatcaagattataaaataacccaacggatggtctgtgctggctataaagaagggggaaaagatgcttgtaagggagattcaggtggtcccttagtttgcaaacacaacggaatgtggcgtttggtgggcatcacaagctggggtgaaggctgtgcccgcagggagcaacctggtgtctacaccaaagtcgctgagtacatggactggattttagagaaaacacagagcagtgatggaaaagctcagatgcagtcaccagcatgagaagcagtccagagtctaggcaatttttacaacctgagttcaagtcaaattctgagcctggggggtcctcatctgcaaagcatggagagtggcatcttctttgcatcctaaggacgaaagacacagtgcactcagagctgctgaggacaatgtctgctgaagcccgctttcagcacgccgtaaccaggggctgacaatgcgaggtcgcaactgagatctccatgactgtgtgttgtgaaataaaatggtgaaagatc

SEQ ID NO: 283953 - DNA, 1000 bp, Homo Sapiens
agcccagacctggagcccattctgagacacggcattcagtactttaacaacaacactcaacattcctccctcttcatgcttaatgaagtaaaacgggcccaaagacaggtggtggctggattgaactttcgaattacctactcaattgtgcaaacgaattgttccaaagagaattttctgttcttaactccagactgcaagtccctttggaatggtgataccggtgaatgtacagataatgcatacatcgatattcagctacgaattgcttccttctcacagaactgtgacatttatccagggaaggattttgtacaaccacctaccaagatttgcgtgggctgccccagagatatacccaccaacagcccagagctggaggagacactgactcacaccatcacaaagcttaatgcagagaataacgcaactttctatttcaagattgacaatgtgaaaaaagcaagagtacaggtggtggctggcaagaaatattttattgacttcgtggccagggaaaccacatgttccaaggaaagtaatgaagagttgaccgaaagctgtgagaccaaaaaacttggccaaagcctagattgcaacgctgaagtttatgtggtaccctgggagaaaaaaatttaccctactgtcaactgtcaaccactgggaatgatctcactgatgaaaaggcctccaggtttttcacctttccgatcatcacgaataggggaaataaaagaagaaacaactagtcacctaaggtcctgcgagtacaagggtcgacccccaaaggcaggggcagagccagcatctgagagggaggtctcttgaccaatgggcagaatcttcactccaggcacatagccccaaccacctctgccagcaaccttgagaggaaggacaagaagaaagatgggatagaatttaaatagagaagaatgccattttatcactctgcctctgggtgaaataaagatcagtcttgatgttctaactctaaaaa

SEQ ID NO: 283954 - DNA, 1000 bp, Homo Sapiens
acgattgtttggtgaaaagttcagacattttaatgctctgggaggatggggagaactacagaattcggtaaagacatttggggagacacatcctttcaccaaacttgtggttgatctgacagatatagaccctgatgtagcttattcttcagttccctatgagaagggctttgctttacttttttaccttgaacaactgcttggaggaccagagattttcctaggattcttaaaagcttatgttgagaagttttcctataagagcataactactgatgactggaaggatttcctgtattcctattttaaagataaggttgatgttctcaatcaagttgattggaatgcctggctctactctcctggactgcctcccataaagcccaattatgatatgactctgacaaatgcttgtattgccttaagtcaaagatggattactgccaaagaagatgatttaaattcattcaatgccacagacctgaaggatctctcttctcatcaattgaatgagtttttagcacagacgctccagagggcacctcttccattggggcacataaagcgaatgcaagaggtgtacaacttcaatgccattaacaattctgaaatacgattcagatggctgcggctctgcattcaatccaagtgggaggacgcaattcctttggcgctaaagatggcaactgaacaaggaagaatgaagtttacccggcccttattcaaggatcttgctgcctttgacaaatcccatgatcaagctgtccgaacctaccaagagcacaaagcaagcatgcatcccgtgactgcaatgctggtggggaaagacttaaaagtggattaaagacctgcgtattgatgattttagagatttctcttttttaaatggaattcgtaaagaaatataaaacttcagctcacaattaaaactgtctttttagttttggctttttattgttttgttggtgattttactgaaataaagatgagctacttcttc

SEQ ID NO: 283955 - DNA, 1000 bp, Homo Sapiens; identical to SEQ ID NO: 220631

SEQ ID NO: 283956 - DNA, 1000 bp, Homo Sapiens; identical to SEQ ID NO: 115198

SEQ ID NO: 283957 - DNA, 976 bp, Homo Sapiens; identical to SEQ ID NO: 115199

SEQ ID NO: 283958 - DNA, 1000 bp, Homo Sapiens; identical to SEQ ID NO: 115200

SEQ ID NO: 283959 - DNA, 1000 bp, Homo Sapiens
caaatgttgtatttcaaaccagtttcacataagttatttgtcttcttttcaaaataattagctatatttttatataatatgaatatatacataaaaattgtttctataaattgtagaacatagatgctacagtattttttatttaattatattatgaataaaattgttatttcaatagtacccaaccaaagatgcttaaaaaccttctatgttcataaaaaataacaactgagatgttaaaatagtcatacgtctttagatgctattaaagtttcattagtcatatttttgtaaatatgacagaatttgtgaatatatttttaaagcaaaaaacttcaacatgcatatgatatatagttacaacattaattttatgaactggagagctttactttgtggatatatttaaaattcatattatagctcctattaaattccttccatgatagatataaaggactggtttttaagtgcactgcacttctggaatactgaaaaagaatgaaaacaatatgttagattaggtgtaagactttaagaagcgaacaaaaagtaatgtatatctgtaatatataatcaaatgattcatttttctgttagactaggcaaattgttcaaaaataacctttttgtcttttaagtagcagtcactttgcttaagatgctaatagaaaactgtggttaaagatttaccctccctcttggtgaattattacactgtaagaaatgtatatgctactgtgttacatgttgtattagtaaattattagaatccaattaatgattcaattaacatatatcttatccaattcattatgtcaattcattaataaaataccttttatgtagaggctttatgttgcaattaaaaagttgggaaaatgaaaaaaaaaaaaaaaaaaaaaaaaaaaaaaaaaaaaaaaaaaaaaaaaaaaaaaaaaaaaaaaaaaaaaaaaaaaaaaaaaaaaaaaaaaaaaaaaaaaaaaaaaaaaaaaaaaaa

SEQ ID NO: 283960 - DNA, 1000 bp, Homo Sapiens
ataccacttgcacaaatgtatttctttgtcaaagtgtgtacacgctttctgtttgtcctgatgtcctgctgtgaagcagggaccacattgccatttattcattgttccaggcaatgcatttgtccaaacccctctggctctctgatatctctcatttcttgatgttcctattctctgacctcaacaaggaggacactgtctgttgtgtctctttgagactagaactccatgtgtttaaccttcagatccattctctacatgaaccctattctttccaccctggtaagaaggtctggaagacaggtcctaacgaggggtcagagaaggcacagagaaatgaaccagccatgcaggggcagcactgaggaggaaaccccccactctaactgggaggagagtggaaacactcttagtatctcagagtagttaccaatctaagagcatccttcgagtttaagtcaaaactctaggcttaataccaaaaataatacatcatttggaaaaatagcttggagaaaaaaaatcaataaagagtcacataaaatcttaagaaaatggttctattctgtgatatattactaagaaatacagttcttaaacgtgtataactattgtcagacaatttataggtgtttcatctagtcctgggatgaaatacgatgactcatgcaaattcagggagcacactggctgactttaaattggaacattgtaaagtgaaagctgtgaaaggttgtgtgtcctatcaatgagatttattttctaaccaagagctgttcggatgattcagtataaatacgaaaatcacatccaaaaacggtataacccagcttccttaaggcaattttcttctctgaaacaagaatatactcatatgttctttactataatgtatatgatttttatcttgtactttaaaagatgataattatgcattgtatatacgattgtgtgccttgcaataaaatcaaaactgtacctgctgaaaatcacaacagtc

SEQ ID NO: 283961 - DNA, 1000 bp, Homo Sapiens; identical to SEQ ID NO: 220634

SEQ ID NO: 283962 - DNA, 1000 bp, Homo Sapiens
tttttctcctattgttgtactcttatgtgtctgatatacacatttcctagtcttaactttcaggagtttacaattgactaacactccatgattgattcagtcatgaacctcatcccatgtttcatctgtggacaattgcttactttgtgggttcttttaaaagtaacacgaaatcatcatattgcataaaaccttaaagttctgttggtatcacagaagacaaggcagagtttaaagtgaggaattttatatttaaagaactttttggttggataaaaacataatttgagcatccagttttagtatttcactacatctcagttggtgggtgttaagctagaatgggctgtgtgataggaaacaaatgccttacagatgtgcctaggtgttctgtttacctagtgtcttactctgttttctggatctgaagactagtaataaactaggacactaactgggttccatgtgattgccctttcatatgatcttctaagttgatttttttcctcccaagtcttttttaaagaaagtatactgtattttaccaaccccctctcttttcttttagctcctctgtggtgaattaaacgtacttgagttaaaatatttcgattttttttttttttttaatggaaagtcctgcataacaacactgggccttcttaactaaaatgctcaccacttagcctgtttttttatcccttttttaaaatgacagatgattttgttcaggaattttgctgtttttcttagtgctaataccttgcctcttattcctgctacagcagggtggtaatattggcattctgattaaatactgtgccttaggagactggaagtttaaaaatgtacaagtcctttcagtgatgagggaattgattttttttaaaagtctttttcttagaaagccaaaatgtttgtttttttaagattctgaaatgtgttgtgacaacaatgacctatttatgatcttaaatcttttttaaaaaaaaaaaaaaaa

SEQ ID NO: 283963 - DNA, 1000 bp, Homo Sapiens; identical to SEQ ID NO: 115202

SEQ ID NO: 283964 - DNA, 1000 bp, Homo Sapiens
ctgccaagggtggaggggcggcctggagcctccctccctcccctggatctgcaggcactggagaaggagctggtagaccggcatggggaggaggtgacgccggaagatgtgctctcagcagctatgtaccccgatgtgtttgcccacttcaaggacttcactgccacctttggccccctggatagcctgaatactcgcctcttcctgcagggacccaagatcgcagaggagtttgaggtggagctggagcggggcaagacgctgcacatcaaagccctggccgtgagcgacctgaaccgggccggccagaggcaggtcttctttgagctcaatgggcagctgcggtccatcttggtcaaggacacccaggccatgaaggagatgcacttccaccccaaggccctaaaggacgtgaagggccagatcggggcgcccatgcctgggaaggtgatagacatcaaagtggtggcaggggccaaggtggccaagggccagcccctgtgtgtgctcagtgccatgaagatggagactgtggtgacctcacccatggagggtactgtccgcaaggttcatgtgaccaaggacatgacactggaaggtgacgacctcatcctggagatcgagtgatcttgccccagaccggcagcctggccatccccaagccttcaacagaagctgtgctgccacggcaggcccaggccagccagtgcccgaggccaggaaggccgggccgtggaggtcctgtccacagctggacaggagagacaccgcctgcggtggttcattcctttcagccatcgtcctttcctccggcggacagctgcttacatgttcatctcttgccaaataagggtcccctcctcactggagactacaagtggtgggtcaggtggtcctaggacccaggggaggtttaggggtcctatctcctgggggaaggggagatctaagatgtcccaggtcctgggaagtttactcaataaagctggctttcccctgc

SEQ ID NO: 283965 - DNA, 1000 bp, Homo Sapiens; identical to SEQ ID NO: 220636

SEQ ID NO: 283966 - DNA, 1000 bp, Homo Sapiens; identical to SEQ ID NO: 220637

SEQ ID NO: 283967 - DNA, 1000 bp, Homo Sapiens
tgtctttctcctgggcttctatccctgtgaggagaggtgctgtctgctggagcctctagtccaccctctccagtggtcactcttgagtcacatctgtcacttaattatttccttctttatcaaatatttattgctcatctacttcgggccagctttctgcctctgtagtagccctgcacaaagggtggggagtcaggagaccatcccaaaggcatctccctgtcttcctctaccaagcggctctctgcaagagcatggaaatgtgagtggggaaaattttcagcaccaaagcttcactcatacccagttttgtttctgaaactacggtagggggcaggaagaggagcagaaaagaagggctgggcaaggcatagtggcttatgcctgtaatcccggtactttgggaggctgaggtgggaggactgcttaagctcaggagtttgagaccagcctgggcaacatagcaagacccccaccatctctgaaaaaaaaaattagccaggcatggtggtgtgcacctgagaatcccagctactcagaaggttgagacaaaggggatcgcttgagcccaggagttggaggctgaagagagctatgactgcatcactgcactccagcctgggcaacacagcaagatcctgtctaaaaataaaaagaaaagagaaggaaaggaaagagacggggctctgaggccgagcacagtggcccatgcctataatcccagcactttgggaggctgaggcaggtggatcacctgaggttaggagttcgagaccagcctggccaacatggtgaaaccccatctctactaaaaatacaaaaattggctgggcatggtggcgggtgcctgtaatcccagctactggggaggctgaggcaggagaatcacttgaattcaggaggtggaggttgcagtgagccgacatcatgccactgcactccagcctggggctgacagagcaagacactgtctcaaaaaagaaaaaaaaaaaaaaaaaaa

SEQ ID NO: 283968 - DNA, 1000 bp, Homo Sapiens; identical to SEQ ID NO: 220394

SEQ ID NO: 283969 - DNA, 1000 bp, Homo Sapiens
cgactggagacggggagcccgcgagacccgggtctccagggtctgcccaaggaagttgctcatgggagcagacccctagagcaggatttgaggccaggccaaagagaaccccagagatgaaaggcctcctcccactggcttggttcctggcttgtagtgtgcctgctgtgcaaggaggcttgctggacctaaaatcaatgatcgagaaggtgacagggaagaacgccctgacaaactacggcttctacggctgttactgcggctggggcggccgaggaacccccaaggatggcaccgattggtgctgttgggcgcatgaccactgctatgggcggctggaggagaagggctgcaacattcgcacacagtcctacaaatacagattcgcgtggggcgtggtcacctgcgagcccgggcccttctgccatgtgaacctctgtgcctgtgaccggaagctcgtctactgcctcaagagaaacctacggagctacaacccacagtaccaatactttcccaacatcctctgctcctaggcctccccagcgagctcctcccagaccaagacttttgttctgtttttctacaacacagagtactgactctgcctggttcctgagagaggctcctaagtcacagacctcagtctttctcgaagcttggcggacccccagggccacactgtaccctccagcgagtcccaggagagtgactctggtcataggacttggtagggtcccagggtccctaggcctccacttctgagggcagcccctctggtgccaagagctctcctccaactcagggttggctgtgtctcttttcttctctgaagacagcgtcctggctccagttggaacactttcctgagatgcacttacttctcagcttctgcgatcagattatcatcaccaccaccctccagagaattttacgcaagaagagccaaattgactctctaaatctggtgtatgggtattaaataaaattcattctcaaggct

SEQ ID NO: 283970 - DNA, 1000 bp, Homo Sapiens; identical to SEQ ID NO: 115203

SEQ ID NO: 283971 - DNA, 1000 bp, Homo Sapiens
ttcaaattgataaaatatttaggtacaaataacaagactaataatattttcttatttaaaaaaagcatgggaagatttttatttatcaaaatatagaggaaatgtagacaaaatggatataaatgaaaattaccatgttgtaaaaccttgaaaatcagattctaactggatttgtatgcaactaagtatttttctgaacacctatgcaggtcttatttacagtagttactaagggaacacacaaagaattacacaacgttttcctcaagaaaatggtacaaaacacaaccgaggagcgtatacagttgaaaacatttttgttttgattggaaggcagattattttatattagtattaaaaatcaaaccctatgtttctttcagatgaatcttccaaagtggattatattaagcaggtattagatttaggaaaacctttccatttcttaaagtattatcaagtgtcaagatcagcaagtgtccttaagtcaaacaggttttttttgttgttgtttttgctttgtttccttttttagaaagttctagaaaataggaaaacgaaaaatttcattgagatgagtagtgcatttaattattttttaaaaaactttttaagtacttgaattttatatcaggaaaacaaagttgttgagccttgcttcttccgttttgccctttgtctcgctccttattctttttttggggggagggttatttgcttttttatcttcctggcataatttccattttattcttctgagtgtctatgttaacttccctctatcccgcttataaaaaaattctccaacaaaaatacttgttgacttgatgttttatcacttctctaagtaaggttgaaatatccttattgtagctactgtttttaatgtaaaggttaaacttgaaaagaaattcttaatcacggtgccaaaattcattttctaacaccatgtgttagaaaattataaaaaataaaataattttagaaaaaaaaaaaaaaa

SEQ ID NO: 283972 - DNA, 1000 bp, Homo Sapiens; identical to SEQ ID NO: 115204

SEQ ID NO: 283973 - DNA, 1000 bp, Homo Sapiens
cattgtggatcaggttatggtaactctcaatcaggaaggatataaattttgtaaaataagggtacgctctgttaggattccacagattggagacaaatttgctagtcgacatggtcaaaagggtacttgtggtattcagtatagacaagaggatatgcctttcacctgtgaaggtatcacccctgatatcatcatcaatccccatgccatcccctctcgtatgactattggtcacttaattgaatgccttcaagggaaggtatcggctaacaagggtgaaattggtgatgccactccatttaatgatgctgttaacgtgcagaagatttctaatcttttatctgattatggctatcatctcagaggaaatgaggtcctgtacaatgggttcactggtcgaaaaatcacatcacaaatatttattggccccacttattaccagcgtttgaagcatatggtggatgataagattcactctcgtgctaggggacctattcagatcctcaatagacagcccatggagggtagatctcgtgatggtggcctgcgttttggagaaatggaacgagattgtcagattgcccatggagcagcccagtttttaagggaaagattgtttgaggcatcagatccatatcaggttcatgtttgcaatctttgtggaataatggcgattgccaacaccaggacccatacatatgaatgcaggggctgccgcaataaaacccagatttctttggtgcgaatgccttacgcatgcaaactattgtttcaggaacttatgtctatgagtattgcaccgcgaatgatgagtgtttagctattttacaggagtcaacaagataattaaatatcttggtgtcttgtttctattgtgtggctttataaaaatgacaaatatgtactgtgttgtgataaaaagtattttatttgtttaatgatatgcatgcttttcttctgtaaatatataataaatttttgtagatagtcttgatgtgtg

SEQ ID NO: 283974 - DNA, 1000 bp, Homo Sapiens
agcctcccgagacagagcctcagcctgcctggaagatgccgagatcgtgctgcagccgctcgggggccctgttgctggccttgctgcttcaggcctccatggaagtgcgtggctggtgcctggagagcagccagtgtcaggacctcaccacggaaagcaacctgctggagtgcatccgggcctgcaagcccgacctctcggccgagactcccatgttcccgggaaatggcgacgagcagcctctgaccgagaacccccggaagtacgtcatgggccacttccgctgggaccgattcggccgccgcaacagcagcagcagcggcagcagcggcgcagggcagaagcgcgaggacgtctcagcgggcgaagactgcggcccgctgcctgagggcggccccgagccccgcagcgatggtgccaagccgggcccgcgcgagggcaagcgctcctactccatggagcacttccgctggggcaagccggtgggcaagaagcggcgcccagtgaaggtgtaccctaacggcgccgaggacgagtcggccgaggccttccccctggagttcaagagggagctgactggccagcgactccgggagggagatggccccgacggccctgccgatgacggcgcaggggcccaggccgacctggagcacagcctgctggtggcggccgagaagaaggacgagggcccctacaggatggagcacttccgctggggcagcccgcccaaggacaagcgctacggcggtttcatgacctccgagaagagccagacgcccctggtgacgctgttcaaaaacgccatcatcaagaacgcctacaagaagggcgagtgagggcacagcgggccccagggctaccctcccccaggaggtcgaccccaaagccccttgctctcccctgccctgctgccgcctcccagcctggggggtcgtggcagataatcagcctcttaaagctgcctgtagttaggaaataaaacctttcaaatttcaca

SEQ ID NO: 283975 - DNA, 1000 bp, Homo Sapiens; identical to SEQ ID NO: 115206

SEQ ID NO: 283976 - DNA, 1000 bp, Homo Sapiens
aatggccatacgcatcattgacagagcattgaaggaggactttggatttaagcatcgtctctgggtatattctggaaggagaggtgttcattgttgggtctgtgatgaatcagttagaaaactgtcttctgcagtacgttctgggatagttgagtatttgagccttgtaaagggtggtcaagacgttaaaaagaaagttcacctaagtgaaaaaattcacccttttatcagaaaatctataaacataataaaaaaatactttgaagaatatgccttggttaatcaagatattctcgaaaataaagaaagctgggataagattttagcccttgttcctgaaacaattcatgatgaacttcaacaaagcttccaaaagtctcacaattcacttcagcgttgggagcacttgaagaaagtagccagcagatatcagaataacatcaaaaatgacaaatatggaccctggctggagtgggagattatgctccagtactgttttccacggctggatatcaatgtcagcaaaggaatcaatcatctactgaagagcccttttagtgttcatcctaaaacaggtcgcatatctgtgcctattgatttgcagaaagtggaccagtttgatccatttactgttccgaccataagcttcatctgccgtgaattggatgccatttccactaatgaagaggaaaaagaggagaatgaagctgaatctgatgtcaaacatagaaccagagattataagaagaccagtctagcaccttatgtgaaagtttttgaacattttcttgaaaatctggataaatcccgaaaaggagaacttcttaagaagagtgatttacaaaaagatttctgaagacagagctcctcaaaccattgtggatatcttctgccttcaaccacagatcaaatacttcaagagccatttaataaatatggcagaactatatatgtgtcttaaacctcaaagtaaattttccttgagaaataaaaaaaaaaa

SEQ ID NO: 283977 - DNA, 1000 bp, Homo Sapiens; identical to SEQ ID NO: 220642

SEQ ID NO: 283978 - DNA, 1000 bp, Homo Sapiens; identical to SEQ ID NO: 220644

SEQ ID NO: 283979 - DNA, 1000 bp, Homo Sapiens; identical to SEQ ID NO: 220645

SEQ ID NO: 283980 - DNA, 1000 bp, Homo Sapiens; identical to SEQ ID NO: 115207

SEQ ID NO: 283981 - DNA, 1000 bp, Homo Sapiens
tagaacctccattttataaaagaattatcctatcaatggattctttagtggaaggatttatgcttctttgaaaaccagtgtgtgactcactgtagagccatgtttactgtttgactgtgtggcacaggggggcatttggcacagcaaaaagcccacccaggacttagcctcagttgacgatagtaacaatggccttaacatctaccttaacagctacctattacagccgtattctgctgtccgtggagacggtaagatcttaggttccaagattttacttcaaattacaccttcaaaactggagcagcatatagccgaaaaggagcacaactgagcactttaatagtaatttaaaagttttcaagggtcagcaatatgatgactgaaagggaaaagtggaggaaacgcagctgcaactgaagcggagactctaaacccagcttgcaggtaagagctttcacctttggtaaaagaacagctggggaggttcaaggggtttcagcatctctggagttcctttgtatctgacaatctcaggactccaaggtgcaaagcctgctgcatttgcgtgatctcaagacctccagccagaagtcccttccaaatataagagtactcatgtttatttatttccaactgagcagcaacctcctttgtttcacttatgttttttccagtatctgagataatataaagctgggtaattttttatgtaattttttggtatagcaaaactgtgaaaaagccaaattaggcatacaaggagtatgatttaacagtatgacatgatgaaaaaaatacagttgtttttgaaatttaacttttgtttgtaccttcaatgtgtaagtacatgcatgttttattgtcagaggaagaacatgttttttgtattctttttttggagaggtgtgttaggataattgtccagttaatttgaaaaggccccagatgaatcaataaatataattttatagtaaaaaaaaaaaaaaaaaaaaaaaaa

SEQ ID NO: 283982 - DNA, 1000 bp, Homo Sapiens
taaactatgaggactgccttatggatgatttaagtgtctcactaaagcatgaaatgtgaatttttattgttgtacatacgatttaaggtatttaaagtattttcttctctgtgagaaggtttattgttaatacaaggtataataaaattatcgcaacccctctccttccagtataaccagctgaagttgcagatgttagatatttttcataaacaagttcgagtcaaagttgaaaattcatagtaagattgatatctataaaatagatataaatttttaagagaaagaatttagtattatcaaagggataaagaaaaaaatactatttaagatgtgaaaattacagtccaaaatactgttctttccaggctatgtataaaatacatagtgaaaattgtttagtgatattacatttatttatccagaaaactgtgatttcaggagaacctaacatgctggtgaatattttcaactttttccctcactaattggtacttttaaaaacataacataaattttttgaagtctttaataaataacccataattgaagtgtataatataaaaaattttaaaaatctaagcagcttattgtttctctgaaagtgtgtgtagttttactttcctaaggaattaccaagaatatcctttaaaatttaaaaggatggcaagttgcatcagaaagctttattttgagatgtaaaaagattcccaaacgtggttacattagccattcatgtatgtcagaagtgcagaattggggcacttaatggtcaccttgtaacagttttgtgtaactcccagtgatgctgtacacatatttgaagggtctttctcaaagaaatattaagcatgttttgttgctcagtgtttttgtgaattgcttggttgtaattaaattctgagcctgatattgatatggttttaagaagcagttgtaccaagtgaaattattttggagattataataaatatatacattcaaaaaaaaaaaaaaaaaa

SEQ ID NO: 283983 - DNA, 1000 bp, Homo Sapiens; identical to SEQ ID NO: 220647

SEQ ID NO: 283984 - DNA, 1000 bp, Homo Sapiens; identical to SEQ ID NO: 220648

SEQ ID NO: 283985 - DNA, 1000 bp, Homo Sapiens; identical to SEQ ID NO: 220649

SEQ ID NO: 283986 - DNA, 1000 bp, Homo Sapiens; identical to SEQ ID NO: 115208

SEQ ID NO: 283987 - DNA, 1000 bp, Homo Sapiens
caggtctctgtcgagcagcggacgccggtctctgttccgcaggatggggtttgttaaagttgttaagaataaggcctactttaagagataccaagtgaaatttagaagacgacgagagggtaaaactgattattatgctcggaaacgcttggtgatacaagataaaaataaatacaacacacccaaatacaggatgatagttcgtgtgacaaacagagatatcatttgtcagattgcttatgcccgtatagagggggatatgatagtctgcgcagcgtatgcacacgaactgccaaaatatggtgtgaaggttggcctgacaaattatgctgcagcatattgtactggcctgctgctggcccgcaggcttctcaataggtttggcatggacaagatctatgaaggccaagtggaggtgactggtgatgaatacaatgtggaaagcattgatggtcagccaggtgccttcacctgctatttggatgcaggccttgccagaactaccactggcaataaagtttttggtgccctgaagggagctgtggatggaggcttgtctatccctcacagtaccaaacgattccctggttatgattctgaaagcaaggaatttaatgcagaagtacatcggaagcacatcatgggccagaatgttgcagattacatgcgctacttaatggaagaagatgaagatgcttacaagaaacagttctctcaatacataaagaacagcgtaactccagacatgatggaggagatgtataagaaagctcatgctgctatacgagagaatccagtctatgaaaagaagcccaagaaagaagttaaaaagaagaggtggaaccgtcccaaaatgtcccttgctcagaagaaggatcgggtagctcaaaagaaggcaagcttcctcagagctcaggagcgggctgctgagagctaaacccagcaattttctatgattttttcagatatagataataaacttatgaacagcaactaaaaa

SEQ ID NO: 283988 - DNA, 890 bp, Homo Sapiens; identical to SEQ ID NO: 115210

SEQ ID NO: 283989 - DNA, 609 bp, Homo Sapiens; identical to SEQ ID NO: 220650

SEQ ID NO: 283990 - DNA, 1000 bp, Homo Sapiens; identical to SEQ ID NO: 115211

SEQ ID NO: 283991 - DNA, 1000 bp, Homo Sapiens
caaactgtcactttcgtctccagcagagggagctgtaggaatagtgcttccagatgtggtctcccgtgtggggcccagcaatgggggcccctgatgccaagagctctggaggttcttgaaagaggggacacgaaggaggagtgactgggaagcctcccatgccaaggaggtgggaggtgccctggaaatagctgcctcatgccacttaggccatgactggatttaatgtcagtggtgtgccacagtgcagaggctagacaactgaaaggggctaccaaggctgggaaaaaaatgcaattgttgctgtgagtgactttgaaagactctggtgccttgtggtgcccttctgaaattcaaacagtaatgcaaaagtgtctgcattagaatttacggtgtctaaaattcatgtttttaaaagagcttgcctacagatggtttccacacttgaaattgtgccctgcgagttgcatagctggaagttcaatgctcagtcctaccttggctcccattaaacatttggtgctctgtggattgagttgaacgtgttgaggctttgcaatttcacttgtgttaaaggctctggcatttttccatttctatgcaaatttctttgaagcagaattgcttgcatatttcttctctgccgtcacagaaagcagagtttctttcaaacttcactgaggcatcagttgctctttggcaatgtcccttaaccatgattattaactaagtttgtggcttgagtttacaaattctacttgttgcattgatgttcccatgtagtaagtcatttttagtttggttgtgaaaaaaccctgggctgaagttggcatttcagttaaaagaaaaaaagaaactagtcccagatttgaaaacttgtaataaaattgaaactcactggttttctatgtctttttgaactcttgtaatcgagttttgatcatattttctattaaagtggctaacacctggctactcttactgtaaaaaaaaaaaaaaa

SEQ ID NO: 283992 - DNA, 556 bp, Homo Sapiens
tcttttcgccatcttttgtctttccgtggagctgtcgccatgaaggtcgagctgtgcagttttagcgggtacaagatctaccccggacacgggaggcgctacgccaggaccgacgggaaggttttccagtttcttaatgcgaaatgcgagtcggctttcctttccaagaggaatcctcggcagataaactggactgtcctctacagaaggaagcacaaaaagggacagtcggaagaaattcaaaagaaaagaacccgccgagcagtcaaattccagagggccattactggtgcatctcttgctgatataatggccaagaggaatcagaaacctgaagttagaaaggctcaacgagaacaagctatcagggctgctaaggaagcaaaaaaggctaagcaagcatctaaaaagactgcaatggctgctgctaaggcacctacaaaggcagcacctaagcaaaagattgtgaagcctgtgaaagtttcagctccccgagttggtggaaaacgctaaactggcagattagatttttaaataaagattggattataactct

SEQ ID NO: 283993 - DNA, 524 bp, Homo Sapiens; identical to SEQ ID NO: 220651

SEQ ID NO: 283994 - DNA, 1000 bp, Homo Sapiens; identical to SEQ ID NO: 220652

SEQ ID NO: 283995 - DNA, 737 bp, Homo Sapiens; identical to SEQ ID NO: 115217

SEQ ID NO: 283996 - DNA, 1000 bp, Homo Sapiens; identical to SEQ ID NO: 115219

SEQ ID NO: 283997 - DNA, 1000 bp, Homo Sapiens
tattggaaaagcatgccaagatggattattgtaattcagtgtcttttttagtagtcaaatggtaaaatgcagcataagaatataagtcttccaagttagatatgagtgttagctttttataagtctgctcctgccagtttgactttgagatacattggagccaactgtaaactttagtttttaaattacagttagtttttttgtttgtttttgaggcggagtctctgttacccaggctggagtgcagtataccagtcttggcccacttcaacctccacttcttaggttcaagcgattctcctgcctcagcctcctgagtagctgggattacaggcacgcaccaccatacctggctaatttttgtattttgagtagagatggagttttcaccacattggccaggctgttcttgaactgacctcaagcgatccacctgccttggccttccagagtgctgggattacaggtgtgagccaccacgcccagccttgcatttaatatttttataatgtgtctaggctgggtgcggtgactcacgcctgaaatcccagcactttgggtggctgaggcaggtggattacttgaggccaggagattgagaccagtgtggccaacatagcaaaaacccgtctcgacgaaaaatacaaaaaatagcttggtatggtggcacatgcctgtaatcccagctactttggaggctcaggcacaagaatcacttgaacctacgaggcggaggttgcagtgggccaggatcgtgccactgcactttatttagccaggacaacactctgtctccaaaaaaaagtttctgaaggtaaaagatatactaaaggatatacatatactgcctcttctatgatgtttcatttgacctacaccatcagcatcttcaggaaacagtatgaaactaatttcacattaaatgttgcaaacgtctgcaattctccagtttttagtttgcacgtaaggattcgtaggattgatttcagattgacagatg

SEQ ID NO: 283998 - DNA, 368 bp, Homo Sapiens
ctttttcgtccttttccccggttgctgcttgctgtgagtgtctctagggtgatacgtgggtgagaaaggtcctggtccgcgccagagcccagcgcgcctcgtcgccatgcctcggaaaattgaggaaatcaaggacttcctgctcacagcccgacgaaaggatgccaaatctgtcaagatcaagaaaaataaggacaacgtgaagtttaaagttcgatgcagcagatacctttacaccctggtcatcactgacaaagagaaggcagagaaactgaagcagtccctgccccccggtttggcagtgaaggaactgaaatgaaccagacacactgattggaactgtattatattaaaatactaaaaatcct

SEQ ID NO: 283999 - DNA, 401 bp, Homo Sapiens
cttccgccagcttccctcctcttcctttctccgccatcgtggtgtgttcttgactccgctgctcgccatgtcttctcacaagactttcaggattaagcgattcctggccaagaaacaaaagcaaaatcgtcccattccccagtggattcggatgaaaactggaaataaaatcaggtacaactccaaaaggagacattggagaagaaccaagctgggtctataaggaattgcacatgagatggcacacatatttatgctgtctgaaggtcacgatcatgttaccatatcaagctgaaaatgtcaccactatctggagatttcgacgtgttttcctctctgaatctgttatgaacacgttggttggctggattcagtaataaatatgtaaggcctttcttttt

SEQ ID NO: 284000 - DNA, 549 bp, Homo Sapiens
cctttcctgttaggcgagagctgcgaaaggcgagagctgcgaagggccaggtgtcgggcgctgtttctcgttttcatcatatagacaaaacagccctgctgcaaagatggtcaacgtacctaaaacccgaagaaccttctgtaagaagtgtggcaagcatcagcctcacaaagtgacacagtataagaagggcaaggattctttgtatgcccagggaaggaggcgctatgatcggaagcagagtggctatggtgggcagacaaagccaattttccggaagaaggctaagaccacaaagaagattgtgctaaggctggaatgtgttgagcctaactgcagatccaagaggatgctggccattaagagatgcaagcattttgaactgggaggagataagaagagaaagggccaagtgatccagttctaaactttgggatatttttcttcaattttgaagagaaaatggtgaagccatagaaaagttacccgagggaaaataaatacagtgatattcttacgcaaaaaaaaaaaaaaaaaaaaaaaaaaaaa

SEQ ID NO: 284001 - DNA, 1000 bp, Homo Sapiens
gtgcagtttggggcttttcccccttaccatagaagtgcagaggagttcagtatctctgttttaaagacgtatagaatgagcccaattaaagcgaaggtgtttgtgcttgtttgtgtgtatcagctgtaccttgttgagcatgtaatacatcctgtacataagaaattagttctttccatggcaaagctattaccttgtacgatgctctaatcatattgcatttaattttattttgcacagtgaccttgtagccacatgagaaagcactctgtgtttttgttcggtctcagatttatctggttgagttggtgttttgtttggggtttttaattttgcgtgtttgcatagcataaaatcagtagacaacaccactgaggtcgttacgatcaacgatatccacagtctctttttagtctctgttacatgaagttttattccagttacttttcatggaatgacctattttgaacaagtaattttcttgacaagaaagaatgtatagaagtctccctgcaattaatttccaatgtttacattttttaactagactgtggaatttctacagattaatatgaaatggagctcatggtccgtttgtgtgttagatatgctgtagctgaagccctgtttgtcttttaaacactagttggaagctctcaataaaaatgcctgctgctcacagcacagaaaatggggcagggggagcctcaagcacaatctagctgtcctcctaaagactctgtaatgctcactcccctcgcgttctcccggcgctgtcgggaggctgtgctggtggtcgtgtagaggtccttctcctttcacatggtgcagagagcgaggacctctcctcctcgttcagttgcacttcagtattttcacggatatgaatgtaaaatatataaatatataaacctgcggctttaacaactgtaatacaaccttttgaattagttccgtgtatagataattaaattcttcatacaaaagttaaaaaaaaaaa

SEQ ID NO: 284002 - DNA, 1000 bp, Homo Sapiens
gccttccaaacgttcttgggtaaagcagacgtttcccaagaggtagaggaggtcctggctgagagccgcgtgcagaggagcatccgcctggtgtccgtgctggagctgctgagagctccctacgtccgctggcaggtggtcaccgtgattgtcaccatggcctgctaccagctctgtggcctcaatgcaatttggttctataccaacagcatctttggaaaagctgggatccctccggcaaagatcccatacgtcaccttgagtacagggggcatcgagactttggctgccgtcttctctggtttggtcattgagcacctgggacggagacccctcctcattggtggctttgggctcatgggcctcttctttgggaccctcaccatcacgctgaccctgcaggaccacgccccctgggtcccctacctgagtatcgtgggcattctggccatcatcgcctctttctgcagtgggccaggtggcatcccgttcatcttgactggtgagttcttccagcaatctcagcggccggctgccttcatcattgcaggcaccgtcaactggctctccaactttgctgttgggctcctcttcccattcattcagaaaagtctggacacctactgtttcctagtctttgctacaatttgtatcacaggtgctatctacctgtattttgtgctgcctgagaccaaaaacagaacctatgcagaaatcagccaggcattttccaaaaggaacaaagcatacccaccagaagagaaaatcgactcagctgtcactgatggtaagataaatggaaggccttaacaagtttcctcctccacgttggacaattatgtcaaaaacaggattgtctacatggatgatctcacttttcaggaaacttaaaatttacccattattgggaagcttaaatgaattgaagctatgcaagtcttttatattattaaatatttaaaagtaaacctgtactaatctaaaaaaaaaaaaaaaaaaa

SEQ ID NO: 284003 - DNA, 1000 bp, Homo Sapiens
gctggaaagcatattagactaggagtcaagacctggtttctagtcttggttttgccattaatgtgctgcatgatcttgggaaaatcatttaccctaaataagggtggtggactatcttgaagaaccctttcaactctaaaaattgaccctatcaactggagagcccacaaggcatagggaatagagaaaagggaaatgttttcagttttcttttttattttggttatgcttaaatatgaatgtaattaccaaaagatttagaagtgcatgtgctttggaggatttgtattgagcttttacagtattcatttttcaactcaaggcaatggctttctacaccaactctaatccataaacgggtcttatgacatctatgaagtagtagcaagacatgcttagtgtgtatttctctctttgagacactgtaatttctaccagaaatttccagagcattatgtaggtagaaaaaaatgcaagcaagctgttaaagatcttggatcccattatatagtatgtatagctgaaatctgtaattcaatcactttttctcttttatcctctaaccaaaaaattgtttaattttgcatcccaaatgtttttaatctttgtatattttttaaaaatccttttctcctcatcattgccttttttgtggttgtaaatagacttacttgcactttgaagatgagttactccttgtcatcttacaaatatgtgatatggtaattttcataacagatgtcagttttgaaccaagaattggtgatttgtttataagaaaaaaactggcttcatttctgtgaaattgctctttgaaaatttctttttacacgtgtaagccaactgagataccgtgatggtgttgatttctttcaatgatgcttaccatctattttagccactgagccttttattatttgtctatttgtaaagtttatttgtcttaactcatttaataaatatactgtttatctgtttctgaaaaaaaaaaaaaaaaaaa

SEQ ID NO: 284004 - DNA, 1000 bp, Homo Sapiens
agtgccctcgtcgcccacagaggaggaggaggaggaggaggaggaggaggaagaagaggctgaagaagaggaggaggaggaggattccgaggtgcagggggagcagcccaagccggccagccctgctgaggaagacaaaatgccgccctacgacgagcagacgcaggccttcatcgatgctgcccaggaggcccgcaacaagttcgaggaggccgagcggtcgctgaaggacatggaggagtccatcaggaacctggagcaagagatttcttttgactttggccccaacggggagtttgcttacctgtacagccagtgctacgagctcaccaccaacgaatacgtctaccgcctctgccccttcaagcttgtctcgcagaaacccaaactcgggggctctcccaccagccttggcacctggggctcatggattggccccgaccacgacaagttcagtgccatgaagtatgagcaaggcacgggctgctggcagggccccaaccgctccaccaccgtgcgcctcctgtgcgggaaagagaccatggtgaccagcaccacagagcccagtcgctgcgagtacctcatggagctgatgacgccagccgcctgcccggagccaccgcctgaagcacccaccgaagacgaccatgacgagctctagctggatgggcgcagagaacctcaagaaggcatgaagccagcccctgcagtgccgtccacccgcccctctgggcctgcctgtggctctgttgccctcctctgtggcggcaggacctttgtggggcttcgtgccctgctctggggcccaggcggggctggtccacattcccaggccccaacagccttcaaagatgggtaaaggagcttgccctccctgggccccccaccttggtgactcgccccaccacccccagccctgtccctgccacccctcctagtggggactagtgaatgacttgacctgtgacctcaatacaataaatgtgatcccccacccaaa

SEQ ID NO: 284005 - DNA, 1000 bp, Homo Sapiens; identical to SEQ ID NO: 220653

SEQ ID NO: 284006 - DNA, 1000 bp, Homo Sapiens
caaaagacattttgaataccatgatcgatgatgtcccatgcttcgaggaaaaccaaacactttccgcctctcttgcaaaatccattcctcatgctgaccctcctcacgatggctgtgtcagcccagccccttcccttctccaggcccagagaactcttccacaaacaagatgagagccactcgggaaaagagccatagtcaactgggagggcctacatctggatggcggtggaaaaacttgagggtttggggttcaaagtcagcccatcccacctggcaaaatcctcctggaaggaggaccttcaagagcgcatcacctgaatgtcgtgaagaagtatctctgaatgtatccaggagaggaactgcataaccaaaggggtgaccagccctcagatgtgcttattggattccagtacaaacgccaccaaagccagcccactgctctcctacaaggaaggaaagatctgcacgtgtaaaacatggggcagccttggaacatggtgttttttggagtttcctttctcacagttttccatctccccacttctttgatcagtcatgtgtccgtgacctcgttccatgacatcaggatagctgtgtttgcacaccatgctccatgttcattcggagccaggaggggttctcagtggagcctggcttagggaacagggagcgatggaagaatgccaacattagcgttggtcttctcttgtcaggaatgaaggatgcttgcacacatgcaccccctcactctcacacttgcacacatacacacacacacacacgaaatggttggtttgtcaaaactcactgtagtacataaagcttgcactctgcgtcctatatctagcagcatggggtacgtttggcagttcactccattagggggtaaataatttatgaccattcatctgtttttatgaatttttttatctagacaataatgtaaataaagaactcaccatctctgttcatttaatactaaaaaaaaaaaaaaaaa

SEQ ID NO: 284007 - DNA, 1000 bp, Homo Sapiens
cggggaggctgaggcaggagaattgcttgaactcagaaggcggaggctgcagtgagccgagatcgtgccactgcactccagcctggtcaacagagcaagactccatctcgaaaaaaaaaaaaaaaattccccacccctaccaattgttttacttcctcttcctgctcagggagcagatgggcctcactggttgagatggaatagaataactgggctatgagtcaccagcccactttgtgacccagcaagacctttcccctctctgggcatcagtttctcatctgtaagatgaccagagttgcttagatgatctcctagatcctttccagttctcttgatttcgtaaagccaatggcttctccctctttaaggtgctatgccaaccagccctggaggctgggatctgccgctccctccagccaccagggggcaggagtgcactacctgctgtcagtcaccagagtggccgctcagtgcccagcccgccagcctcgctcttggaggctgctctttatcctgcctgtggttttcagctcagagctggacttctatttataagttacctgtatttatatttatatgcccgctctcatggtgaaggctggacaaggtgctcctctggcccctccttcttacctcagatgcctgaacagaacaaggcaaacccgtagcagcctctcaggagctgacaggtcctctttcggggctcaggagggtgggcacacacccagcggcctgcagagtaagcttattacccacaactgtgcccgctttgtgcttctaaggtgcacacctagcctaggtgagacactgcagccaggcaaccaccgacacacgccccttctcaaagccagaggtgagtggggcaggtgcccggggctgggtgagtggaattaggacacacacaggcttgggcttcaagttcatttattgatgcattggttggacacaataaaaccacaattgttatcaaaaaaaaaaaaaaaaaaaaaaaaaaaaa

SEQ ID NO: 284008 - DNA, 1000 bp, Homo Sapiens; identical to SEQ ID NO: 115223

SEQ ID NO: 284009 - DNA, 1000 bp, Homo Sapiens
ggttctttagggtttgagtttcttcttccccttgagcttcagagaggagagttggcatggttaaatctgaatggttacctcactgctgaaaacccagaggggcgtggcacactcgcttgtgtggaaaagcctctaaatgcatcccttcctttctttcctgcttcctttgccttacaattgaagcagcccgtggtaccatcacagtatgcagagacttcctcacctttcatatctagggaccacccccgatgcattggtgagggtgggcacttataaatgcctgctattgttaagccattccagcctcttcctctgaatagaccagacgccctttcacttagttcagtgccagtccttttgccttcccaaccctgctgttaggcctgctgttccctttgctcttgattaggagagatggaaggagatgagctcccataactgaattggcctttggttcatgttttctccccatatgtatatatgccatatgtgaatatgccatatatatgtgccaacaaatctatctacgttgttcttttcaaattagcacgcagataggaattttgagtttcttcttcttttagtaactagtataacaagcactggtatttttgtacaaaaaagaaaaacaaaagattgactattgtggtctgcatgacataaacaaacaaatggtgatatcaaagcaacgtataccccagtccagtgtgtgttgccataatttgcaattcagcttaacagtgcacccaatctatatttgcattttgatattatttaagctctatgtacaaggttttgcatgtatttatatggttcttagggaaaaaaaatgctataaactgcaaatctgaaattcaaatgtgttgttccactgagaccagaagaagaagaggagttttaaaagggataatttgttggagccaataaagctttttgctgatgaacagaaaccaatactgctgtgcactgagaataaaaactcatgcccacttgtaaaaaa

SEQ ID NO: 284010 - DNA, 1000 bp, Homo Sapiens
tcagattccagagtgagacagaactgggtcaaatggtgtctctaccactcacaaaccctgtccctgggccagctgcatcactgcctgtgccttcgtttcttcatctatacaatgaggatgaggcccccccggcccgccatcatggggttgctgtgtgtaaaagcacatggcacatagtaggcacccagcacagggtggctaatgtatttgttgatttctgaacctaaggacttccttcctcctcccctgggcagggatgagacagcaacacaaacactcgagcttccatcttgttgaggaggaaacagaggtacagataggtttctcagcaccgccctcagctctgagacataagtcccaagcatctaaggattcattttgatcttggcatgattccatccttttttatccatccttccctctattcccacttctggggtccagtttccctcctcttaattatttgggaggagttgctcagatctttgtgggccaaggtgggctgggagggctcttccaggaggtaggagttggtatgggccctgaagtcagggaggattaggatgagcaaaaaacaaggtgtatgttggtgggtggcagcacttccagtgggaagagaaggcccggaggtatcaggaggtacaaatgtgatgaagagcaaagctttgggtcaggcacacctgagttcaaataccagcactgcaggacttgtggccagtcacccagccactctaagcctcagtgtgtctgtctataaaatggatattagaagacctgcttggccaggcggagtggctcatgcctgtaatcccagcacttgggaggccaaggagggaggatcacttgagcctgggagttggagaccagcctgggcaacatagcaagactctgtctctgtaaagtaataataataataataagaagaagaagaagaataaagagaagatttataattttaaaaaaaaaaaaaaaaaaaaaaaaaagaaaaaaaaaaaaaaaa

SEQ ID NO: 284011 - DNA, 1000 bp, Homo Sapiens; identical to SEQ ID NO: 115225

SEQ ID NO: 284012 - DNA, 1000 bp, Homo Sapiens
gaagagcaggaggaggcagcggaagaggatgctgaagcagaggctgagaccgaggagaccagggcagaagaagatgaagaagaagaggaagcaaaggaggctgaagatggcccaatggaggagtccaaaccaaagcccaggtcgttcatgcccaacttggtgcctcccaagatccccgatggagagagagtggactttgatgacatccaccggaagcgcatggagaaggacctgaatgagttgcaggcgctgatcgaggctcactttgagaacaggaagaaagaggaggaggagctcgtttctctcaaagacaggatcgagagacgtcgggcagagcgggccgagcagcagcgcatccggaatgagcgggagaaggagcggcagaaccgcctggctgaagagagggctcgacgagaggaggaggagaacaggaggaaggctgaggatgaggcccggaagaagaaggctttgtccaacatgatgcattttgggggttacatccagaagcaggcccagacagagcggaaaagtgggaagaggcagactgagcgggaaaagaagaagaagattctggctgagaggaggaaggtgctggccattgaccacctgaatgaagatcagctgagggagaaggccaaggagctgtggcagagcatctataacttggaggcagagaagttcgacctgcaggagaagttcaagcagcagaaatatgagatcaatgttctccgaaacaggatcaacgataaccagaaagtctccaagacccgcgggaaggctaaagtcaccgggcgctggaaatagagcctggcctccttcaccaaagatctgctcctcgctcgcacctgcctccggcctgcactcccccagttcccgggccctcctgggcaccccaggcagctcctgtttggaaatggggagctggcctaggtgggagccaccactcctgcctgcccccacacccactccacaccagtaataaaaagccaccacacactga

SEQ ID NO: 284013 - DNA, 1000 bp, Homo Sapiens
gcagctgttgaagagcaggaggaggcagcggaagaggatgctgaagcagaggctgagaccgaggagaccagggcagaagaagatgaagaagaagaggaagcaaaggaggctgaagatggcccaatggaggagtccaaaccaaagcccaggtcgttcatgcccaacttggtgcctcccaagatccccgatggagagagagtggactttgatgacatccaccggaagcgcatggagaaggacctgaatgagttgcaggcgctgatcgaggctcactttgagaacaggaagaaagaggaggaggagctcgtttctctcaaagacaggatcgagagacgtcgggcagagcgggccgagcagcagcgcatccggaatgagcgggagaaggagcggcagaaccgcctggctgaagagagggctcgacgagaggaggaggagaacaggaggaaggctgaggatgaggcccggaagaagaaggctttgtccaacatgatgcattttgggggttacatccagaagacagagcggaaaagtgggaagaggcagactgagcgggaaaagaagaagaagattctggctgagaggaggaaggtgctggccattgaccacctgaatgaagatcagctgagggagaaggccaaggagctgtggcagagcatctataacttggaggcagagaagttcgacctgcaggagaagttcaagcagcagaaatatgagatcaatgttctccgaaacaggatcaacgataaccagaaagtctccaagacccgcgggaaggctaaagtcaccgggcgctggaaatagagcctggcctccttcaccaaagatctgctcctcgctcgcacctgcctccggcctgcactcccccagttcccgggccctcctgggcaccccaggcagctcctgtttggaaatggggagctggcctaggtgggagccaccactcctgcctgcccccacacccactccacaccagtaataaaaagccaccacacactga

SEQ ID NO: 284014 - DNA, 1000 bp, Homo Sapiens
gctgaggcaggagaatagcttgaacccgggaggcagaggttgcagtgagccgagatcacaccactgcactccagcctgggtgacagagcgaggctccgtctcaaaaaaaaaaaaaaaaaattgttttagcgctgggtttcccaaggtgggagagacagacccagcctggagctggcccctggcctgtgtgctgacttcttggggtcctcaaaccactgtatttttctgttgagcctgtacttggggagagatcagtagcatttgaggaagtaagagaaaagaatcatggtacctcagggtttctttccctttactcgctggcagccattgtctgtgggcacctcatgtttttccacactctactgggccgtggaggtaacgatcacccaggccagtctcctctgcctgggatgcgccctctgagaggaggcctagcagggcaggctccctctgggcatccctggatgcagcctctggacacatgcctcctttaaagtgtccgggtgcagctcaggttgagtggaggtagaaggagaaacagacatgtttaccacgcgttttccaaagctcctgatctttcccaagattgtaactgaaaactgctgtctcttgttttgttcgttttgggggtggtggtgctggctgggccatgcttgtgaagtgatgtgtgtctctgatttaacggattcactgttttctctgctaattgagagagcgttatttacattatttatttgttttgacacaagtgctttcagtgttttatcctagctaatggcttcttaaaggtaataaaacccttccaacgtaattggtcagataaaactttttttcttgtatgcttaaataaagcaattagtgaagcacttctatccaaaatgacttttttgtccttttttaaaaccaatttactgttactggaaactttttgtacaataaagcaatcacgcagattaaagaacatcctgcaatcctagtattaattttaaaaaaaaaaaaa

SEQ ID NO: 284015 - DNA, 1000 bp, Homo Sapiens; identical to SEQ ID NO: 284014

SEQ ID NO: 284016 - DNA, 1000 bp, Homo Sapiens; identical to SEQ ID NO: 115226

SEQ ID NO: 284017 - DNA, 1000 bp, Homo Sapiens
tatttccacaagcgtttcccggagcacagggcagcggagatccgggagaccctcacgcagggcttagagttctgtcggcggcagcagagggccgatggctcctgggaaggctcctggggagtttgcttcacctacggcacctggtttggcctggaggccttcgcctgtatggggcagacctaccgagatgggactgcctgtgcagaggtctcccgggcctgtgacttcctgctgtcccggcagatggcagacggaggctggggggaggactttgagtcctgcgaggagcggcgttatttgcagagtgcccagtcccagatccataacacatgctgggccatgatggggctgatggccgttcggcatcctgacatcgaggcccaggagagaggagtccggtgtctacttgagaaacagctccccaatggcgactggccgcaggaaaacattgctggggtcttcaacaagtcctgtgccatctcctacacgagctacaggaacatcttccccatctgggccctcggccgcttctcccagctgtaccctgagagagcccttgctggccacccctgagaacatgcctacctgctgggtgccgtctgtgcgttccatggccttcaagtcacaggacgcagcgattccctgccctcttcggtgttattacacaggcaggacttcagtgtcagtatccctgccttcagtcttctttagaaatcacatctgtgttcaatccattgtttagagggagtgtatttttcctgttccacgaagaggactttttgttcacaattggatcacaatgcagaggagtctgttcctcccccgtcggcttctcggtgctgggagggtgacctgtcccagatgactcatcaccctgacatgctcttgacaaaggacaccaccaagaggagatggcagctgtaccggtgcagcctctgtctgagggggatatttgcctcagtgtgattaaaaatcagtcatgaaagaaaaaaaaaaaaaa

SEQ ID NO: 284018 - DNA, 1000 bp, Homo Sapiens; identical to SEQ ID NO: 220657

SEQ ID NO: 284019 - DNA, 1000 bp, Homo Sapiens; identical to SEQ ID NO: 115227

SEQ ID NO: 284020 - DNA, 1000 bp, Homo Sapiens
tcaatattattatggatggacccccagctcagagccttggagtagaaccagtggataaagatgtcattcgtaaacctcctcgcaactggaaagacagcattttgactaaaaacttgatacttaaaatacttgtttcatcaataatcattgtttgtgggactttgtttgtcttctggcgtgagctacgagacaatgtgattacacctcgagacacaacaatgaccttcacatgctttgtgttttttgacatgttcaatgcactaagttccagatcccagaccaagtctgtgtttgagattggactctgcagtaatagaatgttttgctatgcagttcttggatccatcatgggacaattactagttatttactttcctccgcttcagaaggtttttcagactgagagcctaagcatactgggtctggctctgggagaggagtggacagcagctggttgagatacatccccatctggagacaggactgccactgacagaagatgtgagctgtgtctaagtccagtcttgtgcccagccgtgtctgcgccttcactctttggaactctgcatacaacatcttagcaccatcttcctgcagctcttccttacctaaataaagaaacagcccaagggcagtatttctaaaagcactgtaacagcttttcattttctccacatatactacaaattctataaagaaagaaattaatttaaaaaaactaagatgtttttctcttctggcttcataaatgccttgctgtataaattgaaatattgatactgaactgtctttttaatgatgacctaactttattcaacccatcggaatttactttttccctgaaataagatcttttccactggtctactacctgaccataaacatgtctgcatttgaattctctaaaccctaaatctgtgtctatgaaaaatacaaatgactattaaatattattctctttactgttctctttcaccgaaaaaaaaaaaaaaaaaaaaaa

SEQ ID NO: 284021 - DNA, 1000 bp, Homo Sapiens
tgtcaccgccatggctgccccgtgtttgctgcggcaaggacgagccggggcgctgaagactatgctccaggaagcccaggtgtttcgaggacttgcttctacggtttctttgtctgcggaatcagggaagagtgaaaagggtcagccacagaattccaagaagcaaagtccaccaaaaaagccagccccagtgcctgctgagccgtttgacaacactacctacaagaacctgcagcatcatgactacagcacgtacaccttcttagacctcaacctcgaactctcaaaattcaggatgcctcagccctcctcaggccgggagtcacctcgacactgagggccctcggtgtgaagatgaaccttccaccgtcttcactgcatcctggagtgcaaaaataaaatccactcaagagtcacaaggcccgctgtgcataatcggtttcacttttacctttttttttttttttttttttttgagacagggtctcactctgtcacccaggctggagtgcagtggcacattctcggctcactgcaacttccgcctcctgggttcaagtgattctcccacctcagcctcccaagtaggtgggattacaggtactcaccaccaggtccagctaacttttgtatttttagtagagacagggtttcaccatgttggccaggctggtctcgaactcctgacctcagatggtctgcccacctccgcctcccaaagtgctgggattacaggcgtgagccactgcgcccggccactttcacactttttacagtgagtggtgaattagcaacagtaacactgattatccaacatatattttggaatatctactatgtgcaaggaatttttcttaaactctaaggttatgaatcactgggcaaatccatataattagagaattttaagtgctttagagcggtgtgattctactgtgctcagcctagtcaatttcgcattaaactgattatcagctgaaaaaaaaaaaaaaaaaaaaaa

SEQ ID NO: 284022 - DNA, 1000 bp, Homo Sapiens; identical to SEQ ID NO: 220659

SEQ ID NO: 284023 - DNA, 1000 bp, Homo Sapiens; identical to SEQ ID NO: 115228

SEQ ID NO: 284024 - DNA, 1000 bp, Homo Sapiens
taacacctctctgatagctttttagtgaaagaaagaggacctttgttaggcaacagtatccagctagaatttaatcacattgttctgttttcattatatacagcttttcaggtaccttctattcaagatccaccgtgggcgccctgctggcatctgagctgggatggaaattctatgatgctgatgattatcacccggaggaaaatcgaaggaagatgggaaaaggcataccgctcaatgaccaggaccggattccatggctctgtaacttgcatgacattttactaagagatgtagcctctggacagcgtgtggttctagcctgttcagccctgaagaaaacgtacagagacatattaacacaaggaaaagatggtgtagctctgaagtgtgaggagtcgggaaaggaagcaaagcaggctgagatgcagctcctggtggtccatctgagcgggtcgtttgaggtcatctctggacgcttactcaaaagagagggacattttatgccccctgaattattgcagtcccagtttgagactctggagcccccagcagctccagaaaactttatccaaataagtgtggacaaaaatgtttcagagataattgctacaattatggaaaccctaaaaatgaaatgacaatgattttgtatcagtggtccaaacagaactaagcataaatcattgtgccatcacaaacctcgttccagccgccttgcccatactagattctaaatgtttctaaaggcaaaccccaatgtgtcaagacagacttgtttaggtgtaattttaggaattatgctggttcatcaggaagcagagggggagttttaaaagtcaagcttaaattgaagtttaaattcatctataaccaaatcaaatgatcagaggaaattctgtaatcaatgctggaaatcgttacattgtttagaacattcttgctcatgcctgtatttgcacaaataaatgaaacttcgctgtcaaaaaaaaaaaaaaaa

SEQ ID NO: 284025 - DNA, 779 bp, Homo Sapiens
gtgaaactcacccagctttagtaaccaactcgattgcatagactttagataaccatgtgaaggggattctaccatcagaaaagaggccaaacttctatcatcatggtggatgtgaagtgtctgagtgactgtaaattgcagaaccaacttgagaagcttggattttcacctggcccaatactaccttccaccagaaagttgtatgaaaaaaagttagtacagttgttggtctcacctccctgtgcaccacctgtgatgaatggacccagagagctggatggagcgcaggacagtgatgacagcgaaggtgggctgcaagagcaccaagcaccagaatcacatatgggactatcaccaaagagagagactactgcgcggaagaccagactatcgagagctggagagaagaaggtttcccagtgggcttgaagcttgctgtgcttggtattttcatcattgtggtgtttgtctacctgactgtggaaaataagtcgctgtttggttaagtaatttaggagcaaagcaatgctccaagcgaggcctcctgcttcaggaaagaaccaaaacactaccctgaagggccagcctagcctgcagccctcccttgcagggagccttcccttgcactgtgctgctctcacagatcggtgtctgggctcagccaggtggaaggaacctgcctaaccaggcacctgtgttaagagcatgatggttaggaaatcccccaagtcatgtcaactctcattaaaggtgcttccatatttgagcaggcgtcaaac

SEQ ID NO: 284026 - DNA, 1000 bp, Homo Sapiens; identical to SEQ ID NO: 115229

SEQ ID NO: 284027 - DNA, 1000 bp, Homo Sapiens
aggaagaaaattcagactcatttgaatatttgtaaaccatgtaatatataaataaccactttcaattcttttggccctgagctatctccattacttaatagaaaaacttagataaaaaacactttaagactcttctattcacattgaaataaagaattatctagatgataattcagataattcagtttgttcatagaattactttcttatcactctttttctactactttttctcaaatacctctctaatccaagaggcacttccaagaaattccacacattccttatatcccttttttgcttgtctagcaaagcttgtttgtatatatgcaccccattgtaaagcaggtatgcaggtatgtgggtgaaagtgactatgaaaagacttaatgaattctgggatttgtaatggtattgatgggtatctctgtatgtatatcaagagtgggcagaaatgtttggctggtgatggcaaatgactggctttctcttgtggatggactataggaagcactttctgaattatgtaatgatttggaccaaaaagtattttgctgaaatactcaggtaattgagatagcaatggttttatggcatgaattatccaaaaaaatatcagaattacttattattctgtgatttcattagctcattaatgtttaactcacagattgggcatcaccatctagaatttcagtttaagggaggcctgcgcaaagctagttttatttcttaaaggataacagtcatacatagaatactaggaaagccaatattctatttaaaaataaacttctgatgcattttcattcttagcagaaaggtaaatgcttgagaaagcttgagtcaaatttgttaaaagaattttgagttctataaatccaaaaatctgaaacctgaatttatttaaatttataatcctttattttttaataccgtgccattttccacaaaggatttgtggttggtatataattctttaaagatacctggatcagtg

SEQ ID NO: 284028 - DNA, 1000 bp, Homo Sapiens; identical to SEQ ID NO: 115230

SEQ ID NO: 284029 - DNA, 1000 bp, Homo Sapiens
ccaccacagccagcgggctggcctcccaccccagcatccatacacgtaggcctgttgctgagggaaggccctctagggtcatctggtccaggggttctttgcttcagctgcacatcggctgcctctccaggaagcgtgttcaacacatggaatcagggctccacccagacctgccgaggccacactcctggagtatctgcatccagagatctgcacgtttgtaaagctaaggggtggtgcttgggctcaggcctgaggttttgcatctgttcaatagcagaggagagaggggtgtactgtctgtggcccccagcatgggccacataccaacccaccatggagcaaagctgattttaagtggtggtagagatacagtttctcttttaatacttacgtgtttagttgggtgcagtggcttatacctgtaatttcagcacttggggaggccaaggcaggaggcttgcttgaggcaaggagttcaaggctacagtgagctatgattgtgccactgtactccagactggacaacagagtgagaccccatctctaaataataatcattattgttacatatttgttttaacatttttttctcaagtataactagtcctatgatttcatagatgtagcttaggataaggccaaggtagatgttgcctatataaggtttttttaaaaaaggaaaaataggccgggctggtggctcacgcctgtaatcccagcactttggcaggctgaggcgggcagatcacctgagatcaggagttcaagatcagcctgaccaacatggagaagccccatgtctactaaaaataaaaaattagcgaggcgtggtgggcgggcgcctgtaatcccagctacttgggaggctgaggcagaagaatcatttgaacccaggaggcagaggttacagtgagccgagatcgtgctactgcattccaacctgggcaacaagagtgaaactctgtcccaaaaaaaaaaaaaaaaaaaaaaaaaaaaa

SEQ ID NO: 284030 - DNA, 1000 bp, Homo Sapiens; identical to SEQ ID NO: 115231

SEQ ID NO: 284031 - DNA, 1000 bp, Homo Sapiens
agcggccatctgccacgatctggaccatcccggctacaacaacacgtaccagatcaatgcccgcacagagctggcggtccgctacaatgacatctcaccgctggagaaccaccactgcgccgtggccttccagatcctcgccgagcctgagtgcaacatcttctccaacatcccacctgatgggttcaagcagatccgacagggaatgatcacattaatcttggccactgacatggcaagacatgcagaaattatggattctttcaaagagaaaatggagaattttgactacagcaacgaggagcacatgaccctgctgaagatgattttgataaaatgctgtgatatctctaacgaggtccgtccaatggaagtcgcagagccttgggtggactgtttattagaggaatattttatgcagagcgaccgtgagaagtcagaaggccttcctgtggcaccgttcatggaccgagacaaagtgaccaaggccacagcccagattgggttcatcaagtttgtcctgatcccaatgtttgaaacagtgaccaagctcttccccatggttgaggagatcatgctgcagccactttgggaatcccgagatcgctacgaggagctgaagcggatagatgacgccatgaaagagttacagaagaagactgacagcttgacgtctggggccaccgagaagtccagagagagaagcagagatgtgaaaaacagtgaaggagactgtgcctgaggaaagcggggggcgtggctgcagttctggacgggctggccgagctgcgcgggatccttgtgcagggaagagctgccctgggcacctggcaccacaagaccatgttttctaagaaccattttgttcactgatacaaaaaaaaaaaaaggaattcatgatgctgtacagaattttatttttaaactgtcttttaaataatatattcttatacggaaaaaaaaaaaaaaaaaaaaaaaaaaaaaaaaaaaaaaaaaaaaa

SEQ ID NO: 284032 - DNA, 1000 bp, Homo Sapiens; identical to SEQ ID NO: 284031

SEQ ID NO: 284033 - DNA, 1000 bp, Homo Sapiens; identical to SEQ ID NO: 220662

SEQ ID NO: 284034 - DNA, 1000 bp, Homo Sapiens
cccaccccacggacgtgttgcagtgatatcagaattttgcgtgcggtttacccgtgtttaacctctttgcgtctcgcttctgaatcgtatccacttgagcatcactagactgatctattttaacactggtggggggcagcgaggatggacagattcctggtgaaaggggctcaagggggccttttgaggaagcaggaggagcaagagccaactggagaagagccagctgtgttgggaggagacaaagaaagcacaaggaagaggcccaggagagaggccccagggaatggaggccactcagcaggccctagctggcggcacattcgggctgagggcctggactgcagttacacagtcctgtttggcaaagctgaggcagatgagattttccaagagttggagaaagaagtagaatattttacaggagcactggccagagtccaggtattcgggaagtggcacagtgtgcccaggaagcaggcaacgtatggcgacgctgggctgacctacacattttcaggcctcacgctgtctccaaagccctggatcccagttctagagcgcatccgggatcacgtctctggggtgactggacagaccttcaactttgtgctcatcaacaggtataaagatggctgtgaccacatcggggagcaccgagatgatgaaagagaactggcccctgggagccccattgcctctgtctccttcggtgcctgcagagactttgtcttccggcataaggattcccgtgggaaaagcccctccaggagggtggcggtggtcaggctgccgctggcccacgggagcttactaatgatgaaccacccgaccaacacgcactggtaccacagtcttcccgtgagaaagaaggttctggctccacgggtgaatctgacttttcgtaaaattttgcttactaaaaaataaaaacatttttaacagaaaaaaaaaaaaaaaaaaaaaaaaaaaaaaaaaaaaaaaaaaaaaaaaaaaaaaa

SEQ ID NO: 284035 - DNA, 936 bp, Homo Sapiens
atgggaagtttcaacaccagttttgaagatggcttcattttggtgggattctcagattggccgcaactggagcccatcctgtttgtctttatttttattttctactccctaactctctttggcaacaccatcatcatcgctctctcctggctagaccttcggctgcacacacctatgtacttctttctctctcatctgtccctcctggacctctgcttcaccaccagcaccgtgccccagctcctgatcaacctttgcggggtggaccgcaccatcacccgtggagggtgtgtggctcagctcttcatctacctagccctgggctccacagagtgtgtgctcctggtggtgatggcctttgaccgctatgctgctgtctgtcgtccactccactacatggccatcatgcacccccatctctgccagaccctggctatcgcctcctggggtgcgggtttcgtgaactctctgatccagacaggtctcgcaatggccatgcctctctgtggccatcgactgaatcacttcttctgtgagatgcctgtatttctgaagttggcttgtgcggacacagaaggaacagaggccaagatgtttgtggcccgagtcatagtcgtggctgttcctgcagcacttattctaggctcctatgtgcacattgctcatgcagtgctgagggtgaagtcaacggctgggcgcagaaaggcttttgggacttgtgggtcccacctcctagtagttttccttttttatggctcagccatctacacatatctccaatccatccacaattattctgagcgtgagggaaaatttgttgcccttttttatactataattacccccattctcaatcctctcatttatacactaagaaacaaggacgtgaagggggctctgtggaaagtactatggaggggcagggactcagggtag

SEQ ID NO: 284036 - DNA, 1000 bp, Homo Sapiens
ccagaagagaagcctgaaggcccatctgtgccttcacagtggggagaggcctttttcttgtgatgagtgtggaaggagcttcacgtacgtgggggcgctcaagacccacattgcagtgcatgccaaagagaagccctccagcctctaggtcaggccatgcagcagtcacgcagtcggctttcaggaggtgccagcagctctgttggctcaagttgaggcaggttgaaggattcacagggtaagatcgggcacagtggctcccgcctgtaatcccattactttgggaggcccaggtgggaggatcgcttgagcccagaagtttgagaccagcctaggcaacattgcaagactccatctctacaaaaaatataaaagtcagccaggcgttgtggtgcatgcttgtggtcccagctactttgggaggttgaggcaggaggatcgcttgagcccaggaggcagaggctgcagtgagccatgctcacaccactgcactccagcctgggtgacagagcaagatcttgtctcaaaaaagaaaaaaaatcacaaaatactggctacagacacactggacaggtgtgtggtctgcagaactctatggctccttgacaaaagttccaaataatccatagacagtcaaagagacatctccctcaataatcgtcataggaaagacgtgccagttgtggaggaaacattcacactgatctgctagtccaacgatctcttcagtgtcatccaataatcccttcattaaattcagaaactacagcctgagtgaagaaatgttacagccaggaacatattcctcagtcagcttttccattaccaggccattttacttaaatctgtattaaagtcttcagttttctctcatagtggattttcattttctctcagatggtgagagggcttctgtttcttggaatgtttccatattgctaaaaataaatgtcttccactatctcatttgttaaaaaaaaaaaaaaaaaaaaaaaaaaaa

SEQ ID NO: 284037 - DNA, 1000 bp, Homo Sapiens; identical to SEQ ID NO: 220663

SEQ ID NO: 284038 - DNA, 1000 bp, Homo Sapiens
agtgcctttttaggacatcaattataataaaattgttttaaaatattaacaaagatctcaaaaagttgtcatgaacattattcatttatttttaaactggatctaaataagagcttagatggccaaaattagaattaataatatacccatttaaattttgttcataaatttaaaatcttaatcagaattctttataaaatgtgggtcatagatatgacccagtgttactaaaatagaacagggattgtgaaaatccagctcaacatacttaagtatacttggcttagagccaagtatacttgaagaggtgaattattctgacttggacatgcatgctctttgatggataaaataaaaatattcaatttattcttacaaaagaaggtgggtgggtgagtgggttcgttttagtgttctcagattataaagacagctataaagacagcactttccgcacacaaagtgtattttacaaaccttttttatacaaattaatgagctctactttatttaagtgttcatggaatgatgtaaattttaggtccagttgaacaaatattgagtgcctatcatatgcaagactaactccttactaggaatgaaatcacacagtgtcttctgtttgcagtatgtgaactttatgtttgaaaagaaattattatatttaaatttttttgttgtcagagtttatcattgtatactgtaacccagtaaattttgcattcagttttaaaaaatgaagatgtaacttacctgagtctcatttttgaaaatgaaattctgcaaaaattatttaaaaattagttcttggggaaattgattttcaagattcaagtgtataaaaacttatattgaacttttcagcctcgtttttaattagctgatgttaatgataagatacataatacatgtatcttgttgctgaaaatattttttgcatttcaacacattgagttaaaataaagttgttactacttattcaagaaaaaaaaaaaaaaaa

SEQ ID NO: 284039 - DNA, 1000 bp, Homo Sapiens; identical to SEQ ID NO: 220395

SEQ ID NO: 284040 - DNA, 917 bp, Homo Sapiens
aaaagatagatcctgctccaggagccgggaagcctcgccctggccagctgtgctgggcacctcccctgcctgcttcctggcccacttgcaggcaaggtgagggcatgcgaatggctgccactgcctgggcggggctccaagggccacccctccccaccctctgtcccgcagtgaggacgggactctactgccgagaccaggctcacgctgagaggtgggccatgacctccgagacctcttccggaagccactgtgccaggagcaggatgctgcggcgacgggcccaggaagaggacagcaccgtcctgatcgatgtgagcccccctgaggcagagaagaggggctcttacgggagcacagcccacgcctcggagccaggtggacagcaagcggccgcctgcagagctgggagtcctgccaagccccggatcgacttcgtcctcgtttgggaggaggacctgaagctagacaggcagcaggacagtgccgcccgggacagaacagacatgcacaggacctggcgggagacttttctggataatcttcgtgcggctgggctgtgtgtagaccaggtacgtggaggctgtcatgggcagggccctaggccctgcatccactcagtgacccatgaccttgccgcatgaggcctgagggcatggtgtccagagtcccagagcagatcaggccccaaagtcctgctggaccccccagccaccgtgagctcctccgtgtggctagggagctgctgtccagaggcggaggtaaacattgatccctcctgcacactcagctctctcatggaagtcggagccctcagggtcacctgaaaactctgacactacctttgccattcacctgtcccgtctccaacattaaagcttttgggtaggcgaaaaaaaaaaaaaaaaaaaaaaaaa

SEQ ID NO: 284041 - DNA, 1000 bp, Homo Sapiens
aactcaagaattgtatcaccttcagttaaaattaaaatcgaattgtattacagagaacccagcaggcccctacgggcagagaacagataaagagcttatagactggttgcggctgcaaggagctgatgcaaagacaattgaaaagattgttgaagagggttatacactttcggatattcttaatgagatcactaaggaagatctaagataccttcgactacggggtggtctcctctgcagactctggagtgcggtctcccagtacagaagggctcaggaggcctcagaaaccaaagacaaggcttgataccaatcagctaagctgtggcagagtgtcccaccacgctacatgttttgttaaagcttctgttagtgtatacacgaattccgctgtgtttacatatttaaaaatgccattgttcaattaatagtttaagaacttgttttaaatactgtcctgagtttcttttgaaacctgttagttataaacatagaactgtgtgtattgtgaaaacagtgagccttggttttgacctcccggaatattaggaaattcacttgtagtcccagctatgcaggaggctgaggtgggaggattgcttgagcccaggaggtgtggaggctgcagtgagccatgatcacaccactgcactccagcctgggcaacagagcccgaccctgtctcaaaaaaagtacacccttcagcacttgctggaatggtgaaacaaacaaggggtatttaacaaacatggaagctgggacactgcctcagaactggtatggtacttcaatttgagaaacacaaaactgatacgaatgtgccttgtagttaatgtttgatatgaacagaaaatagcttcatatttatactgaatgtgtaagtagagaaaactaagttatgtggcctttgaaatgattacaaaattggaatgattacaaaagtcttattttaaaatggaactgtcctcttgcctgataataaatattgtatcttgtagag

SEQ ID NO: 284042 - DNA, 939 bp, Homo Sapiens
atgaatggaatgaatcactctgtggtatcagaatttgtattcatgggactcaccaactcacgggagattcagcttctactttttgttttctctttgttgttctactttgcgagcatgatgggaaaccttgtcattgtattcactgtaaccatggatgctcatctgcactcccccatgtatttcctcctggctaacctctcaatcattgatatggcattttgctcaattacagcccctaagatgatttgtgatattttcaagaagcacaaggccatctcctttcggggatgtattactcagatcttctttagccatgctcttgggggcactgagatggtgctgctcatagccatggcctttgacagatacatggccatatgtaaacctctccactacctgaccatcatgagcccaagaatgtgtctatactttttagccacttcctctatcattggccttatccactcattggtccaattagtttttgtggtagatttacctttttgtggtcctaatatctttgacagtttttactgtgatctccctcggctcctcagacttgcctgtaccaacacccaagaactggagttcatggtcactgtcaatagtggactcatttctgtgggctcctttgtcttgctggtaatttcctacatcttcattctgttcactgtttggaaacattcttctggtggtctagccaaggccctctctaccctgtcagctcatgtcactgtggtcatcttgttctttgggccactgatgtttttctacacatggccttctcccacatcacacctggataaatatcttgctatttttgatgcatttattactccttttctgaatccagttatctacacattcaggaacaaagacatgaaagtggcaatgaggagactgtgcagtcgtcttgcgcattttacaaagattttgtaa

SEQ ID NO: 284043 - DNA, 1000 bp, Homo Sapiens
attacaggcttgagctcctgcgcccagcccatgctaagtcttttacccagtggtcaaaactggcacaacacaggatttatactggagagcaacctcacaaatgtaatgaaagtggtaaggctttttatcaaatgtccttgtctttggggtcatgagaaaattcatacagaatctattaaaaatgtactaaacatggaaagacctttaagcaacagtgatgtgatgaaggtggtagttttttaaatgaactcccataagagtctacacaccatagaactcataccaggaatcacaaagtctctaaatttccaaagttaactggaaatattacaaactgcagaataattccaggccaaaatatgttaaattcataacatgatgtatatcaaaggaaaaaaggacatgtggaaatgacacattatcttcagtgtataaaatattcatttatgtgaagtttcttggaaaggctacactactattactggtttccgtctgatgtttgagatctgttgattttatgcttttcttacaggcctttcattatgatctttgggaaggaatcaataaaatgatagggcctacttcattaggtgtggttcattcctattcatgctccctggaagaacaagaatgctgaattttgaaatttaatattgtatgaattagcatcagggagaggtggagaaaaatacaaaactaaaagtcatgcttattgtgttcagtgtgcccttctccagagggccactggcttataggaaaggattgctgctctaccagttgaccaggagatggcacgccaggacattaagacactggagttttgtttcttttttttttttttttgagactctgcctcaaaaaaaaaccaaaccaaaccaaagaaccagaatagcatgtgcacgtatacacagacgtttcacaactggcattatgttttgctactgttttatttacaatgtatcacaagttttatgctttaataaaatttaatcataacttc

SEQ ID NO: 284044 - DNA, 1000 bp, Homo Sapiens
tttaggcggatgatgatcgtttaaatggacagtgctgttcctggctccaagcagtcagttccctccctccctgtttacttacaaaacagccgcatccccgggattacgagtgagccagcggaggtgtgaccaaagagatgtcacagttcgcttttctttgtgatcaatacgtggaatgatttaggggcctgtgttaaaattacaaatcttctatagaagattttggcagcaaaatattttaaaagcctacgaaataaacagagatggcacattcagaggctccaaatcacagagcaaggaactgcatccacagtagcttttgccttcctcctctgccgctgttttgactcattgatctttgggtctggtggattttttgtgttggggagagaagagggaagaggcaggagggccattctcatggcaagctgaggtctcaggggccgggctgggagttagggggcgctggggtcccacccaggtggcagggccaggcaggtcatggcacctgctatggtcgtgctgaagtcctggaggcaacaaccattgttacttctaaacgataccaagagggaaagaacacatcccttcaacttttccttaaggagatctgtaaggcaggttggaagaatttgaagtccttctgccttcgcatgaacaaaaatgtgaagggggtttttaaaactcagatttgatctttacagtaaccagatggattttatttcaacatgccagagtttccacatcacgtcaccactgcacttcaacgtgctgttcttgaggctgtttaaagttcagccttggcacctgacatgtcgcatctgttttaactccaggcgtgggggctcctggggaaacgacgacttctgatgcctgaccacccccaggctgacgccctctctcctgcccagggctgaggctggacccagggcacctccttcgaatggcctctctcttcctccctaacacagagcaatcaacagctgtataaaataattgc

SEQ ID NO: 284045 - DNA, 1000 bp, Homo Sapiens
tccagagccgcccaaagggaggtgccaaggccaggaacccaagccaccccagctccccacgcctgcccaggggccgtggtaacccatggacggggaggtgacctcaggctggttctgccactgaggccctgaggaatcaggccctccccaaaagaagtaatgaaatggaccaaaggacttaagaatttggggggaagtaaggggaaaacgttaggtgctaaccacctgcccagaagagtggatctcacagcccaggaacattcccaagcaggaaaaccatccgtccaggaaccctaaccctaaaactaagcacaacccctacccctaacccctgaccctaacgctgacccttaaccataacccttaaccctaaccactaacgcaaaacactaacccttaaccctaacccctaacacctaacccccacctcaagcactaaaccctaagcctaaaccttaaccctaactgctaacactaacccataaccctaagccctagccccaaccctaaacttgaccctgaacccaagcctccaacccaaccccgacacaaacccctaaccctaacccctaattctagccctaatccctaaatccaacaccaacccttgaccggacccctgacccctaaccctaacctcaactcataacctcaacccctactcctacacctaacccctaccctaatgctagccataaacctaacacccaaacccaaactcgaacctatgcctacccctaaaaccctagcccgaaccgtaaccacaaatcctaacccacaacgctacccctaaacctaccactaccccaccccaaaccctgacaccgaaccctgaagctaaccctaacaacactaagcctaacccctaacccttaacccaactgtaactcctaatgctaaccctaacccttaactctaaccccttaccctaaactgtaacccctaaccctaatcccaaccccaacacgtaaccctaaccccctctaccccctctagagcc

SEQ ID NO: 284046 - DNA, 1000 bp, Homo Sapiens
ctccagctgcgggtccttactccagctctcagaaccagaaggaatctgtctaattgctcatctactggagagcccttgagaggggcttcttcaaggtcctgggcactccagaatgttcccctccacttaaaaaacacaaggatggtctccaggcacctgaggaaacacagtctcctgccctttaggatcagccacctctgaggccaagacctgacccagattccggtacccttcacagaaggagccaccacagtggagaaggaagctcatggcttttgggcaagagcctctttgaaaaggaggaagagctcgcaaagggtgacggcagagagatgcccagaatcttgcaggaggaaggagaatgcagcctaacttgctggaaggattcaggagacgtgtgagtaagagccaagatttcccagatcagcctacagccaagataagcacagctttctacccaacctgcacctcaccacagagaatggaagaatcactcagccatcctgtatattgtagcaatagtgtatggttattttttctaggcactgagttttgggatgatttgttatgcagcaacagctggctgctacagagattgtgcccaccctcacagccccctggatctgtgtgctcgcactgagttttgggatgatttgttatgcagcaacagctggctgccacagagattgtgcccaccctcacagccccctggatctgtgtgctctcactgaaaagcaaaagtaacttctgtttttctcttctctgtggccaccagggctgctgcccaaacagaaaggcaatttgcttagtggtggaggttctgacctccagagtcagacagtcctggaatcctatcccagctgtgtgacctgcagttggcttcttaaccactctgtgcctcagtgtctccatctacaaaaggcacagtttctaccccatcaggttgtggtaaggactagaaaagacattggaagtaaagtgcgtgacaccaaagtgctcc

SEQ ID NO: 284047 - DNA, 1000 bp, Homo Sapiens
agacaggttcaggacaaaaggctgggatttcagcccttactccctgcctccaggaaacttctctcagaggctttcacccatcatcccctcatggactctgcagccactttgccaagagagggtggcagctgtctctatgagggccctttcatcatccttacagtgcaaacaaaaacacagccatccctcggcatctctgggggattggatccaggacccctagcgaatagcaaaatccaagcatgctcaaaagtcccttatataaaatggtgtagtatttgcctataacctatacacatcctcccatatactttaaatcagctctagattactcataatacctggtacaatgtaaatgctgtgtaaatggttgtaatactgcattatttaggaataacaagaaaaaggtgtacatgttcagtgctgacactactctccattttctttttttctgagtatttttgatctgcagttggttgactccacggatgcagaacccatggatggatacagagggttgactgtataagaagttttctataaatgtctgctgtggactgaactgatggaataagcatccaaaaggaatgccaccggctgaaatgctgaccctcatcaccaagataaaacattgcagggatgcatgaaaattacatttggggagtaaataggcagcccaagtacagagtgaagaagacctgcttagaggtggcacacatgaaaacaactcaaagatctctgtctggagaactcctgcacatccttcaaggcccaggtgaaatgtcgcttcagatcctcccaaacacaatgacccactcccgtcctgtgctaccccagcgctttacacacagctctgcgacagcctgtggccattttggaattggggatacccagcgttcggaattccttagagctgggatgctgggtgtggctgtcacagcattgcagtgccagagtggccaaaaatgtgttgtaagtgaataaatgaattcctcaattc

SEQ ID NO: 284048 - DNA, 1000 bp, Homo Sapiens
aagctggagtccatcatgtttgtttatttgttcatttcgtagaggtgggggtcttgtagaggtgggggtctcgctctgttgcccgggctggtctcaaactctgggcctcgggcgatcctcccgccttggccttccagggtgctgggattgcaggtgtgagccactgcataaggccgttattgttattagtgcttaaaaatatttagtaaacattttatttagcctaaaaaccattcagagagcagaggctggacggaacaaggcgtgccaggcggtgagagcacagaccctcctcttccagagcaggaagtgggtaaatgacttttaagcctcatttctggggtggcaaaactcttctgtatgaagaagtacaaatatgtaatgtcccataatggcagctatgggacgttacgtatttgccaaaacccacataacgcacaacgccaagagtgaactgtaatgtaaactgtggacttaagtcaatgatcgtgtcccgatacgggctggttggttgtgatgcagggcaggtgaggcccaaagtggagcttagcctgccagcgttcttggctttgcccaagaaagaattcaaggacaagccggaggtagaagagaacaacttgattgaagaggcagtgtggcagacctcactgaagatccccctaccccaggctcaagtcagagagagaggaggtggcagtgccggaatttcagctgcgcatccgtcccagctctgcactgcgggcgtccgtcccagctctgcactgcgtgcgtcccgccctggctggagcttgcagacggcagccctgcaggaacccaccggggctgactccttcctccccagatcccacaaaacagcagtggatctccactcggcacgcattcccctctacattcacacgaagtgtcttttaatggaaagtgtataaactcgttaattttggttactgcactgaagttaggcaagcttctgcagctttattaaatgaccaatgctgtccct

SEQ ID NO: 284049 - DNA, 1000 bp, Homo Sapiens
gacaggaggccacttaggtgcaagatacactctgtcttaagagccttatgctccaaggacaccaacatctcttgtgacaattccatagacctactttttaggatcctggctgaaattggcaatttactgatatcaaatagtgtactctatcaggatggtaaatagttccttatatttagaactcttttttttttttggacagagtttcactcttgttgcccaggctggagtgcaatagtgcaatctcagctccctatagcctccacctcccgggttcaagtgattatcctgcctcagcctctcgagtagctgggactacaggcatgcaccactatgcccagctaattttgtatttttagtagacactgggtttcaccacgttggtcaggctggtctcgaactcctgacctcaggtgatccacctacctcagcttcccaaaagcgtgagccaccgcgcccggcctttagaatgctttaattttctctcagagactattttgtggttgggaatgacaaattacagttcatgagctgaattctttccagtctgtttctgtaatgccaataaccttagaatggtgataagagttttcaaagtttgtagaaaagaggaaaggaaaaaagggagaaaaacagaggaaaatatgcaacagagaccatatgcaatcttcagagcctataatatctactatctggtcctttacagaaaaatttgcctcttttgtgattttcagtgtataagtcttgtacagtatttactaatttatccttatgtgttttataagttttttgtatgctatcgtaaatggtatcttttacattttagttttcagtattcaccactggaaaatacagttgatttttatatattcaccttgtatgctagaactttgctaaattcactctttacttttaatagtttctttgtgaattccttaggatattctatgttcacagtcatgttttctatgaacaaagagagttttgcttcttccttttt

SEQ ID NO: 284050 - DNA, 1000 bp, Homo Sapiens
ttgtgtctgatcccacaattactcccagggtatctatactcacagcttttgcgctcaaagaacattgtcgtctgcagggaacgggtggagcccttctcagaagctcccgggggcgagtccattttaagaatgagttgaagtaggaaagaaaacacagatgctgtctttgcattcgacattctatcaccagcaagagaatatgtaactcctgttctttccttcattattccatgaattaccttttttctctagggatctaccagttggtgatttagggcttttaaatattatgcttgttatgtatttaacaaaatgcaatatgtctactggtggcattgtttccttgggaaattagaaaagtagaagctacatactctagttcctaggtggtctctggaaagttggcctcatgctggttggctaaataataagtgtttaggatttgaaaggaagaaagagagctgaagtcctggtgacagagtttgtgagaaacagaagatgtaacactctggcatttgttgaggagatgaggaagaacttttgaaaaataagctattctattcagttttgtgcaaatttattgcagttgcttcatagaggaagaataatgttgagaatggaataattgcaaatgctagtgatgaaatctaaaggaaacctctactcatagttaactgaaagtatttttgttgttgttgtttaaatacttatctcattgctttctttcctttgcagaattattttcctataatagtttccattaggtgtcagtctgaactggttcttacttaagttaggggtgaaaatgttccatcatcacaccttttaagataagaaagtgggaaaaattaaaactttattaagttgaaattactggagttaatttttattgttaaagacagcttttttattcccagaaaaagtaattttaaattatgtcaccactagtcaatgactgcttttgccctgtcactgtccatagccatgattaaagaagtac

SEQ ID NO: 284051 - DNA, 1000 bp, Homo Sapiens
gaggcccacccgagtgtggctgaaagctctttgaggactaggggctggggtggggacagccatgctatgacagcctctcctgttccagccctgcagctggtgagcagtaagagggacttggttctggtgaaggaggcgctgagctggtacgacgcccagcagcactgccggctgcactacacagacctcgctgacctgcagccaagtggcctgtggaagctctactccctcatgaccagcaccccggcttggattggcctcttcttcgacgcaagcacttctggcctgagatggtccagcggctccaccttcacagccctggagtggggccagaagctacctgaatttggggtgggcttctgtgccacgctgtacacttggctgaaattacccagcataggggctgcctcctgcacagcccagaagcccttcctctgctactgtggtgtgttcacattcatatttcaggcttggtctttcccccaggggcctcactctgttgcccaggctggagtgcagtggtgtgatcatagctcactgtaacctccaactcctgggctcaggtgattctcctgcctcagcctcctgagcagctgggactacaggtgcatgccaccatacctggctaattaaaaaacaaaacaaaacaaacaaaaaaccaaccttaatagagacagggtctcgctatgttgcccaggctggtctcaaattcttgccttcaaatgatcctcctgcctcaagtctcccaaagtgctgggattataggcatgagccattgggcctggcccagggttggttttcaatagcaaatgacggggcagggagagacagagagagaagcaccctttcagaggataactggtcatgactttactctttttgccacatcactttctctctgtggcctctatttctatctcctctgcacccctattcgaagacctcaatagaaaaaatgggtgtaagtcaggatagaatacaaataaaatttggaaatttc

SEQ ID NO: 284052 - DNA, 1000 bp, Homo Sapiens
catcctcccctgctgctctcaaactcctccttcttttttttttttgagacagactcttgatgcccaggctggagtgcaatggcgcgatctcggctcactgcaacctccgcctcccaggttcgggtggctctcttgcctcggcctcccaagtagctgggattgcagcgtgcgccaccacacccagctgatttttgtatatttggtagagataaagggtttcaccatgttggccaggctggtcttcaactcttgacctcaggtgatgtgcccgccttggcctcccaaagtgctgggattacaggcttgagccactgcgccagcaaactcattcttcttcttacagactctcttatttgagttcacctaaaagcctgagataaggaattggatgtacagaatttatttgcatggccatcccaggaaacacttggaagtaggggagtgggaaaggaagacagggaggggtaggcagccaggaaaagggttatcgagcaggttacactgtggataacgggggcttgattccaccagacctctgggagcccatgaataacacctcggagttctcctgcctgcggagttggggagcagggtatttatctactaggtcctatgggggcaggggtgttcattctcaggcacctctgacctgcttcacaggcgggaagagtgtgctccagagttgttaaagaaagtctttaggtaaagagacacagtgggctgggcacagtggctcacgcctgtaatcccaacactttgggaggccaaggcgggtggatcacctgaggtcaggagttcgggaccagcctgaccaacatggtgaaaccccgtctctgttaaaaatacaaagatcagctgggagtggtggtgggtgcctgtagtcccagctccttgggaggctggggcaggagaatcacctgaaccagggaggcggaggttgcagtgagccgagattgcgccactgcactccagcctgggtgacagagtaagactctgtctt

SEQ ID NO: 284053 - DNA, 1000 bp, Homo Sapiens; identical to SEQ ID NO: 220664

SEQ ID NO: 284054 - DNA, 1000 bp, Homo Sapiens
ctgttccctgtgagaagaaggggtttcttttcttctgggatgattcatcccttcacctgtggccttccctagagcccatccttgtgccattctgctctccaggcacatctctctcagatgaattccctcttccctcttcctctggcccctcctgtttatttatctgtttcctcaccactgtgtaatcaggtaggccccactgctgtgacctctggaataatgattgaatctgccctatcctctccacagtgatgcctgggacccagctgagatctccatcatctctcaaaacaactgtgcactgacctcctgacctaagcccagcctctgcccactcagactgaccttcacgcagctgcacaatgctgcatttggaagccggacctgaccacattcgtttccctctgttgagattcatgttctggagaaatgaaaatgctgtctcagtggaatgttgattagctggagtggagacccaagatctctgtccaggcagggccatcaaaacatagaagtgctcttggctttccaaaatctgcacatctccaacttttcttttagctagaggtggccctgtgattgatgagtgaccagccatgtgtggagaaaagcaatgtgaacaacttctgacttcgctgttaaagaaaattggtctgtcccccatttccttgcattcccattcttactggctgaaattcaaagctgataaatggagctagagcagatagctgggaaaatgagttgagggtcttacattaagacttgccagcaagaagaagaatttttccagggttcctgacaccaccaaattgttcgatcagctctgaactctatactgagattctttaagtatgagagacatgaactttgactggcttaagtgagctattgaggtctctttgctattgtgacctaactcaggggtcagcaaataacactctgtgcgcaaaatctgacctacgatctgtttttgtaactaaataaaatttcactgaaacac

SEQ ID NO: 284055 - DNA, 1000 bp, Homo Sapiens
tacagacctgatggcttctgccagacacccagccgatccccatggcttatggaggaagaagacaagtggagacggggaggtggtcgggcgaccctttccacggccagcagcaactgcacccgtgtctgggcacctcctgagtgctgtaagcccccatgcatcatcaagacggaggcccaggcaagggcaggtgggagctgaaacccgtctcaggagatccccaagccaccttcccttggtcccagcccagattgtggctcccctgtgtgcctcccaggccccaggatagacgtcaaccgtgtccccttgtgggtgccttgagcttagcacctgcctgtcccttccaggggcccctctaatacaggacttacatcttcatgaagacactaactgtactagtgcgtgttctccagaggagcagagccactcaaggtgtgcgcatcagaagagagctattttaaggaactggctgacgctgtcaggccttcaactgattgggtgaggcccaccccttttgacgagagccacctgctttactcgaaggctaatctcatctagaaacacctttacagcaccaccgtccaaagtggagatgatgtcagcaaaggggatattgaagcagatggagtggtacagatggtgggtcactaaaacgcaggttgaaggcttttcacatcaagtcatgcctgtgcccacagacaggggaggaggtggcatgaggctccaagctctggagccttggaagtcaggcaggccccactggaatcacagccccctactcccaggcacacctaaggagtcagtctctcctgaccgatggatccaacttcacagctgcgactgagcaccagggggacgtggcgctgggaaattgtcccggcagacgagactgaaccctagaagggccccatggtaaaactgataaagcctgaaatgtgtgtgcagacatgggcctctttattaccacacaacgaccattaaaatctctctgctatggtgt

SEQ ID NO: 284056 - DNA, 1000 bp, Homo Sapiens
gaggccaaggagggagtcgtggggtggagggggcacagggctccccaaggtcctgggtctgcctcagggccgctgctactccacacccctcctcccatgcctgagcacccatggcagtgaccagcagtgaccatcatcacccaatgaggatggagggaaactgaggctggcctgagatgtcctgaggaatgagctggcaccggagtcccacaggtgaaggctgatgaaattctaggagagtccatgtcctaaaggataagaagcaactattcgttgagatgagagacttcaaagatagtcaatgatcgtgaaagtcggccagcctttctggaccatctcgtgcaattgctctaatctatccctgcaatagatccctttaatacactttgtcatatgttgaattttctttttagtttttagttttcttttgttgttgttgttgttttcccattttttaaaattattattattgtggagacagagtctcactctgtcacccaggctggagtgcgggggtgcgatctcggttcactgcaccctctgcctcccaggttcaagcaattctcctgcctcagcctcctgagtagctggggctacaggcacccgccattatgtctggctaatttttgtatttttagtagagacagggtttcaccatgttggccaggctcgtctcaaactcctgacctcaagtgatccgcccacctcggcctcccaaagtgttgggattacaggcgtgagccaccacacccaggcccattgtttttaattatcaacgttatttttgttattctatgtatttcatctttgcatgatttccagtatgggaggtataaattgtgtaaagacgttgagagttctaatttgttgtatgcattttttacaaatgtgactccgtgaaaatgattatcacaacattgactttatgtgtaagcgttgtgtgtgtgcgtacataaaatcgtcgaaacttcctcaataaatgaagagatgtcctttttgt

SEQ ID NO: 284057 - DNA, 1000 bp, Homo Sapiens
attgggtaggatttcacccattcctagctaagttcttaaaattaaaccctttggttcgtgtttaaaaactttcaaacatctgatggctttacaggggctgaatataaaagcatttgtacttaaaggtcttgtgtattcattaagaaatatagtaatgtcttttaatgttttaagagttgatcagggtttactatgatgcaagtaataggatgattaataagggaaggtttttatgaattcaaaagtcaattattcaaaagcagggaaagattttgagagagggaacaaagtattcttagattgcgtagaagctgctaggttccagttttaatttttaggtttagttggactctgttatgaaaagataggttatgggtgggcgacaggttgatacagtcttagaaaaagcaggtaatatcaaagtattggaaagctagcatgcatgccctcttacctgggtatcttcccccttttttccttttaaactcttgagcctcctataacgaaggattatgtgtttcaaacctatttttttttactgtttcattaagtgtgcttgtgcccaaaatatttacttgtataatatctgtaacttgcttaaatacttcagcaaagtcagcatatttactcattcaacaaatatttgagccaggcattattttagacacagcagtgaacaaaacaaaaaggcattcttgccttcatggagcttacattcttattgttatttaaatctaaatgttataaaacaagaatttatattctagggttgatcagctagtatttaatcaaaaaggccacactcccatagcagctactctaagctgtagtagctaataaaaaatattaatgttggccgggcacagtggctcacgcctataatcccagcactttgggaggccaagggtggtagatcacttgaggtcaagagttgtgacaccagcctggccaacctggtgaaaccctatctctagtaaaaaaaaaaaaaaaaaaaaaaaaa

SEQ ID NO: 284058 - DNA, 1000 bp, Homo Sapiens
catagattaggtgggtcctacagttctggaggccagaagtccaagatgaaggtgccctcaggggaggatctgtcccatctctctccctaaggctcccttaagactctagggaggatctgtcctgtgcctctctctgttgcccaggctggagtgcaatggcatgatctcgactcactgcagcctccgcctcctgggttcaagtgattctcctgccttagcctcctgagtagctgtgactacaggcgcccaacaccacgcctggctaatttttgtatttttagtagaggtggggtttcaccaggttggccaggcttgtctcaaactcctgacctcaaatcatctgcctgcctcggcctcccaaagtgctaggattacaggcatcagccaccacgcctggccctctcccagtttctgttggccacagaggtcccttggcttgtttccacactgtgcactctaatcctccatcttcacatggccgtcttctctctgcattgtcacatcatcttctctctgtgtatgatggtgcccacgtttccccttgttttaaggacaccagacatattggttagggcccaaaccctgaggccattaggcctgattttaccttgattatctctgttgggaccttctttccaaataagatcacattctgaagtccttggagtcaagacttcaacactccatggcatcctaacgaagtcattgactttctttgttgttactttcagcatatcccctgtctggcacaaagggagcacagttgacctgtgaacagtgcagaggttagggactcagacctaccttgcagtagaaaatttgagtataacttttgattcccccaaaacttaagtaccgatagcctctgttgaccaggaaccttactgataatttaaacagaagataacacatattctgtatactatatgtgttatacgctgtatttttacaataaggcaagctaaagaaaataaattgctaataaaaaatcgtaagaaag

SEQ ID NO: 284059 - DNA, 1000 bp, Homo Sapiens
cacacataggaaagcacaatttttggcttatttcttaaatactaaatcacattaattggctgtttcccattgcaaatatttgaattaataaggatctttttatcacacgtaattttaaatgatcttttagattttcagctttgctgcaacacagatggaactaaaacaaaattgtataatgctgaagtgacccaaggagaaaacctctcacataattttgtgcagagagtgagtaagcagtctatgccacatcttccccaaatttatattttagctgaaatgtaatggttagacagatagtcagtaattggtacagtgagaagagaaattagttctgacttatcttctctccaaactgcaaagtgtatttttatatacaatttcagaatgataataaaatgatctagtttccatttatcaaaatgagcgatgctgaatgtctgatgactggcttgctttctgaaatcttattttagagttatcagactgtctgagatctttgggaaacttctgcattaagtgagccaattggcaaataaacatctacttaacatgtacaaaactatacaaggctgagatacagaggatgtggcagagatgatcagtggtcatctcagaatggtctctgaaccagcagcatcagcagcaccttggaactgatcagaaatgcttaccttacacatattggatcagaaactctatggagaggctgggcagttgtgttttaacaagccccatgatgtacgctaaagttatctaagaactctgatcccaagaaacaacttaaaatacgcacacacacaggagtcagctctggaaaagaggaaatattgtgtcattagcatatcagaaaatttgaagaagccctgaaagagcaaagctgatgtgttcacattcgcagaggaaaccatagcccaatagaaaaaaaatatattagtaagggaatgagaatgttttaggaggaactccagaataggagaatactaaaaatggcaggggc

SEQ ID NO: 284060 - DNA, 1000 bp, Homo Sapiens; identical to SEQ ID NO: 220665

SEQ ID NO: 284061 - DNA, 1000 bp, Homo Sapiens
ttgacctcagatatctgccattcagaatggaatgcccagctctgggcaggcactggatcagaacaaccataagcttaggcatctgcttctccctctttctccacctccatgtcaagggcaccccctcactacaaactgggcctggggtggtggtataaggcatggggcagggaactgggaagctccctccaccccatctgatttcagacctgcctcctcagtgccccatgtgtgacccagctatatttagcaagctcaattcagtaactagagcaactggtctagcgccctccccttccaaggactctgaaggggccagtttctcacaccttttaatcatcttccatttctccaggcaaccaacacaaaaggcctggaccaggtggtggagatgctggggctcctacacagaggctctattttctgtttgcagtcttccaggccagataagaaaactgagacacagaaaagtcacacaagattatcgaggtcaacacagagaacagtggaacctgcacctgaccccaggcaggcggaaccttcatgaccacagcacaccaccacagggaacaggcagggaaaacaatgggtctagcaggacaaaagtgacatttcccagagtttcttgctgtttggatctggctgcagtttcagttttgccaagaagaggcatttccatgagctctggacagtggcagagaggcagaggtgctccactgcagtgtgctggatggtccgcgggctcctgccaatgtgaggatttgcagcaactggtatatccatggtcttgtcaccagcttcctgaattcggggcagctggagccacactagtggtccttccttgcaggggcagcagctgtctcctggtctcagaatcacagctgtggggatgcaaccttaagccaaaagcctagcggtgggtggtcctaaacttcttttgtctaggccctctgatccctctgtaagtcgctatttcccttattaaatctctttctgctgg

SEQ ID NO: 284062 - DNA, 1000 bp, Homo Sapiens
gcaactgcaactgcaactgcaggcacaaagcattgcagaagcggggccaaagtaattgttgctttgtcaaaacaaaatattcacaaccaaaagtagataagaaaaaaccattggactgagaaaattatggcaccatgtaagaataagaaccctcctcttaattatttgcctcgattttcattcatttattcattcagtccatcagcaaacattaattgagctttgtgtctgacactgtttcaaatactggcaaatcagccatgagcaaaacttacagaaatcgtagcctcattataatgctcatttctctcatcaaacatgttctgaaagtttgctctgtttaaggtgtcatgctaatgtttaggatcaaaaagatgtcctaacctggaattaagtacagttaactactttaagcccttgggagtccctagtggtccccttctgaatcacttcaaatgtttcagcagtgaaggagtccaggctttgcagttaaacacacctacgcagtatcccttctccagttctcactgactttgttcactgctctccagtgcctggtggagtgctgacacatgtgacattcaacttcagttgtttcgctgaggttgtataacattgagtaagtcacttagcctctgtaaacctagggctttttattgtaaaatgggaaaaattaatacatttagtttccctaattaataataatttaatttccctttgctactcttcagttaaatcttcttttcttaagaattaattttcaggataaactttaaatgttctttataattttttcatttgttaacattagaatggtgtgatttcttctgatttttcattcggaaattcaatattctatgtagaggttaaataggattttgtaagtcagctctcctgagacttcatgtttgtaaaactgtctgtgtatcccacaaaactgatacaaacaaactcgcagcacaactcctgagatgtttgatgaataaaaaattaaaactgt

SEQ ID NO: 284063 - DNA, 1000 bp, Homo Sapiens
aaatagtttaaaaaattaaacgtttctctaattacacattcctccctagctgatacaatttcatttatttgcttactttcccagctggacattcagaaattttttactcatattgtcttcaattgcatatttgccagtttctagcttttattttattttttatatccattttgttctaggtgtggaaattgctaagtgtagagcttaataatatttcaccagaaagatatgtgtctaactccctcatgaagaaatagtatgttaccaacactcccaaatttcctttgatgtcaaaaagcattatttttctcgagtctttttttgtgttggtatgatatataaacgaaatcatatacacatttattttttcatttagatactttccttcagtattatgattgagacattaacctcagtttaagtatttatgtcattttcattgctagttcattgtaagaagcacaccttttatttatctattcccttaatacatattcctgtttccagtgttagattaatgcaaataaggctatcgtgagcattcttttacatgtttttcagtgtacaaatatatgctgagagaggaattactgaatcacagaaagcagtatatgcagctataatagatattaccatatccaccaaacgtttagcatttcctgtttcattttattcactctgggggatgtatagagatttcacattacattataatttaatttctctaatgtctaatgatggggagcacctttttcatgtttttattgtcaatttggctatcttctttttctaaatgcatgttcaagtatttcatccatttttattggtcttctttttttactggtttaattgaattctttacatattatggatatgagctctttgtcaattttatatgtatgcttatattcactcctacttcactctgcagcttgctttttatttttatgcttttaataatgaacataatttctttattttaataaatatcattattttt

SEQ ID NO: 284064 - DNA, 1000 bp, Homo Sapiens
cagggtagcacccaagtggggcagattgaaatagcactgtaaaggctttgaaaatgaaatgacttttgagccacagctcacaaagtgaaccggaacaagcattctgaacttaaacaggtcaagtgcctgctaaaatcaaagactgaaatgggaaccagaataatataacatactactgaaaatgtctaggatgcaatccaaaatctcatcacactgaaaaccataaaaatctcaacttgaaagagaaaaggcaattgtaagcattgagattacacagatgttgaaactatccagcaagaatcataaagcagctattatacaaatgccctgattttaaagcaagtatgaatgctcgaaacaaatgacaaagtggaaagtcacagcagagaaatagaaaatgtaaggaagaaccaaatggaaattttaaaactgaaaaatacaataaccagtttttaaaaattactagattcagagggaaagaccaacaactcagaaaaaatgggcaaaggatatgaagagtttacggaaaaggaaatgtagataactcttacccatataaaaatatgttcagcctcactcatataagaaaaatcaaaattgaaattacactgagacactgcttttcacctgtcagaatggcaaaactcaaagtgtgaatatacgctatgagaatgtggaaaattctcatagattgcttgtgggcatctagaacaatttggttgaatcactaaaatccacatgccatttggccctgcaattctacttttagaaatttatcatataggaaacctgcatatgagtgaaatgacatacgtggagtgttactcctggctgcattgttggtaatcacaaagaactagaaaaaacttaatgtccatcaataagatgctgattaaattaattattatacgtcatacaatggaaagttagaaaaccgtaaaaaaatgaaaccctctctataacctgctaccatataataaataaaaggacaggcaatgat

SEQ ID NO: 284065 - DNA, 1000 bp, Homo Sapiens; identical to SEQ ID NO: 115233

SEQ ID NO: 284066 - DNA, 1000 bp, Homo Sapiens; identical to SEQ ID NO: 220667

SEQ ID NO: 284067 - DNA, 951 bp, Homo Sapiens
caccagcccagccagaagcaagtcccagcccccagccctcccctggcctaccttttggggcccttctctgaaccaggctcccctgtcctgcaactctgtcattcacagggatgatccaggctctggctggattctttacctactttgtaatcctggctgagaatggttttaggcctgttgatctgctgggcatccgcctccactgggaagataaatacttgaatgacctggaggacagctacggacagcagtggacctatgagcaacgaaaagttgtggagttcacatgccaaacggccttttttgtcaccatcgtggttgtgcagtgggcggatctcatcatctccaagactcgccgcaactcacttttccagcagggcatgagaaacaaagtcttaatatttgggatcctggaggagacactcttggctgcatttctgtcctacactccaggcatggacgtggccctgcgaatgtacccactcaagataacctggtggctctgtgccattccctacagtattctcatcttcgtctatgatgaaatcagaaaactcctcatccgtcagcacccggatggctgggtggaaagggagacgtactactaaactcagcagatgaagagcttcatgtgacacaggggtgttgtgagagctgggatggggccagagattataagtttgacacaacatctgagacactaggatgaattatcttggatgagaaagatgggcaatcctgggctggcttgagggaatcatgggcagaggatgaggtgggctgaagggaagcccagcctgcatctagctggagccccgcagggaggggcatggtcctgctgaatcccgtagccagtctagacagtaaatgtctggaaaagccctcaaaaaaaaaaaaaaaaaaaaaaaaaaaaaaaaaaaaaaaaaaaaaaaaaaaaaaaaaaaaaaaaaa

SEQ ID NO: 284068 - DNA, 939 bp, Homo Sapiens; identical to SEQ ID NO: 115235

SEQ ID NO: 284069 - DNA, 1000 bp, Homo Sapiens
aaggagttcaccacacgcacgcaggccccaccaaacgtggtcctgggagtcacaaaccctttctttatcaaaacactccagcactggccccacatcctccgagtcggggagcccaagatgtcaggagacctgcctaagcaagtcaagctgaaaaagccttcaaggttgaagaccctggacaccaagccaggcctctacaccgcttacacggcccacctccaccgcgacaaggcgctgctcaaacggctgctcaagggcgtgcagaagaagcggccgtcagatgtgcagagcgccctgctgcggcggcacctcctggagctcacccagagcttcatcatccccctggagcactacatggccagcctcatgcccctgcagaagagcatcacgccctggaagactcccccccagatccagcccttcagccaggatgacttcctgcgtagcctggagcatgctgggccccagctcacctgcatcctcaagggcgactggctgggtctctacaggcggtttttcaagtccccccattttgatggctggtaccggcagcggcacaaggagatggccctgaagctggaggccctgcacctggaggctatctgtgaggcgaacatcgagacctggatgaaagacaagtccgaggtggaggtcgtggacctggtcctgaaacttcgtgagaagctggtgcgggctcagggccaccagctccctgtgaaggaggctacgctgcagcgggcacagctgtacatcgagacggtcatcggctccctgcccaaagacctgcaggctgtcttgtgccctccctagaacaaagccaagggccacggtcccagggccctaggtctgcctgagcctcccactccccagtggtggcggcactgggccaagcacacactccccttccttggccccccgcccagactgcaggctccccttcctgcaccaccattgtctcagcagtaaaggcgacatttggaaccacaaaaaaaaaaaaaaa

SEQ ID NO: 284070 - DNA, 1000 bp, Homo Sapiens; identical to SEQ ID NO: 220668

SEQ ID NO: 284071 - DNA, 1000 bp, Homo Sapiens
catcagttcgtggcttcagaagggaagaacagattttttcaaatgtcatgaaatttccttttgccagcatcctggaactataataaaaattcagaggaaagaacaacctatgactgggttttgttctgctgtgtccagatcatcctctggaagtcttgattgttgcctttctgctgctgtgctgtacgtgcaagttcctaaagccagggacatcccggagatgagctgtggatatagagtccgcacagcctgcgggagacagaatgtaattccttccaacacacacacacaggctttatggaatgccagaaaagcttcctcttggatgctgcctggagtaatgactttttgaccctcccctcttttttggagcaagcactatctttccttgtaaagaaatttggacaatttgagtagaaatggtgtggtatgtgcacatagaaactctcagaaaactgtcagatgagctagacagttgtcctctatctccatgggtcccgcatcccaaggatcgaaccaacaacagatcaaaaatacgtgaaaaaggaattgcatctgtattgaatgtgtacggactttttttcttgtctttgttccttaaacaatgtagtgtaacaactatttacatcgcatctcctttgcattcattattataagtaaactagagatgatttaaagtgtatagaaaggctgcgtgcagtggctaatgtctgtaatcccagcactttgagaggccgaggcaggtggatcacctgaggtcaggagttcgagaccagcctggccaacgtggtgaaaccccatctctactaaaaatacaataattagctgggcatggtggtgcacgcctgtaatcccagctattcgggaggctgaggcaggagaatcgcttgaacccaggaggcagagattgcagtgaaccgagattgcaccattgcactccagcctgggtgacagagtgaacctccgtctcaaaaacaaaataaataaataagaataaatt

SEQ ID NO: 284072 - DNA, 1000 bp, Homo Sapiens; identical to SEQ ID NO: 115239

SEQ ID NO: 284073 - DNA, 1000 bp, Homo Sapiens
agaagagcagtttaacgctccacttgctaagtcgtctgtatcagtgtcagaaggtcttgacctcccattcagatttaatttcctaactgccaggtgtggggctggggatagagggcccagaagggggcgcagtcactgacgtgaagggaccacatcccgcttcatgtcagtgactcctgccccttggtcttcagtgtttttctcttccccaggagggactttgatcatgcaggatagaattctcccatcgcacacctgggggcaagttttagatgagcttctttcctccatttcacctggtggtctgaggacacacagagggtgggggtgagcaggcagtgtgggtggggaggggctacctcccccagaccccttacaaactctgtacctctcggtgcgcggcagcctcttgctgtagttcttcttttctggatatgactgtcagtttcgtcatgagatttcttgctctcatttcgaactctttctttcttccactttctttgggggcgacccccgatccatgccaggtcttcctgtgaagaccgttccaacctcgtttccatttcttgaatgttgagtattacaacatcactgcgctagggtgcttcatggtgctgttctcgaagaggccagttgggctgaatctccttcctcccactggctcctgatatcttgctgtattttgtcttctttctgatttttccctaggggtttggggtgggtgacttaggggcggcttttgtgttctccctctctctctctttcttttctgtatgtatgtatggactggttaaagtgagtttgggcagctgactttatggtatgggttggctgacttttgttcaacattaaagacaaaccaacaaattgtacagctgcacacagaacacctttgagtgtgaacttgaatggcaactagaggcttactttttgaacttcaggtatgtaactcaaaagtaaataaaaacactattttttcagaaaaaaaaaaaaaaaaaaa

SEQ ID NO: 284074 - DNA, 1000 bp, Homo Sapiens
cattttctttgcttcccctaaggcaggctgtccgcttaaatccagacaatggatatattaaggttctccttgccctgaagcttcaggatgaaggacaggaagctgaaggagaaaagtacattgaagaagctctagccaacatgtcctcacagacctatgtctttcgatatgcagccaagttttaccgaagaaaaggctctgtggataaagctcttgagttattaaaaaaggccttgcaggaaacacccacttctgtcttactgcatcaccagatagggctttgctacaaggcacaaatgatccaaatcaaggaggctacaaaagggcagcctagagggcagaacagagaaaagctagacaaaatgataagatcagccatatttcattttgaatctgcagtggaaaaaaagcccacatttgaggtggctcatctagacctggcaagaatgtatatagaagcaggcaatcacagaaaagctgaagagaattttcaaaaattgttatgcatgaaaccagtggtagaagaaacaatgcaagacatacatttccactatggtcggtttcaggaatttcaaaagaaatctgacgtcaatgcaattatccattatttaaaagctataaaaatagaacaggcatcattaacaagggataaaagtatcaattctttgaagaaattggttttaaggaaacttcggagaaaggcattagatctggaaagcttgagcctccttgggttcgtctacaaattggaaggaaatatgaatgaagccctggagtactatgagcgggccctgagactggctgctgactttgagaactctgtgagacaaggtccttaggcacccagatatcagccactttcacatttcatttcattttatgctaacatttactaatcatcttttctgcttactgttttcagaaacattataattcactgtaatgatgtaattcttgaataataaatctgacaaaaaaaaaaaaaaaaaaaaaaaaaaaa

SEQ ID NO: 284075 - DNA, 1000 bp, Homo Sapiens; identical to SEQ ID NO: 115240

SEQ ID NO: 284076 - DNA, 1000 bp, Homo Sapiens; identical to SEQ ID NO: 115241

SEQ ID NO: 284077 - DNA, 1000 bp, Homo Sapiens
gtgtgcagacggccaaactcatcctggaagaactcaaactggagaaaaaaatcaagatacgagtggaacctggaatctttgaatggacaaaatgggaagctggcaaaaccaccccaaccctcatgagcctggaagagctgaaagaggcaaatttcaacattgacactgattacaggcccgcgtttcccctgtccgccctcatgccggccgagagctaccaggagtacatggacaggtgcacggcgagcatggtgcaaatcgtcaacacctgtccacaggacacgggtgtcatcctaattgtgagtcacggctccactctggactcctgcacgcggccactgctcgggctgccgccccgggaatgtggggattttgcccaactcgtgagaaagatcccttccctgggcatgtgcttctgtgaagaaaataaagaggaaggaaaatgggagttggtgaacccaccggtgaagaccctgacccacggggcgaacgcagcatttaactggaggaactggatctcaggcaactgagagccacggtgatgttgtcataacctcagagtggagaggcagaaaccatgtgcagaggctgggagatgctgctgtttccagaggcgtcttagtctcacccaatgtgatttgtagaagcacgagacgcacttttatatcccggaatatttccctccggctttcgcctttgtaactcccatctgtggacccatcgtccaccagcccagctgcggggagcacagggcaggtggctgggtgaggatgccgccctgcagcatgtacaccgagtgtctgcagctggggacacaactgcccgggactctaacttccaggaattaaagactcaccacacacgaaggatctaaccacttcattttccatggtctaatcattaaattcccaatcgttttttctttttctgggtccatcactctttagccatatccacatgggctaaaacaggtgtaatagtcaataaaatggtcccagaa

SEQ ID NO: 284078 - DNA, 963 bp, Homo Sapiens
atgtcatttctaaatggcaccagcctaactccagcttcattcatcctaaatggcatccctggtttggaagatgtgcatttgtggatctccttcccactgtgtaccatgtacagcattgctattacagggaacttcggccttatgtacctcatctactgtgatgaggccttacacagacctatgtatgtcttccttgcccttctttccttcacagatgtgctcatgtgcaccagcacccttcccaacactctcttcatattgtggtttaatctcaaggagattgattttaaagcctgcctcgcccagatgttctttgtgcacaccttcacagggatggagtctggggtgctcatgctcatggccctggaccactgtgtggccatctgcttccctctgcgttatgccaccatcctcactaattcagtcattgctaaagctgggttcctcacttttcttaggggtgtgatgcttgttatcccttccactttcctcaccaagcgccttccatactgcaagggcaacgtcataccccacacctactgtgaccacatgtctgtggccaagatatcttgtggtaatgtcagggttaacgccatctatggtttgatagttgccctgctgattgggggctttgatatcctgtgcattacaatctcctacactatgattcttcaagcagttgtgagtctatcatcagcagatgctcgacagaaggccttcagcacctgcactgcccacttctgtgccatagtcctcacctatgttccagccttctttaccttctttacacaccattttgggggacacaccattcctctacacatacatattattatggctaatctctacctactaatgcctcccacaatgaaccctattgtgtatggggtgaaaaccaggcaggtacgagaaagtgtcattaggttctttcttaagggaaaggacaattctcataacttttaa

SEQ ID NO: 284079 - DNA, 975 bp, Homo Sapiens
atgcctctatttaattcattatgctggtttccaacaattcatgtgactcctccatcttttattcttaatggaatacctggtctggaaagagtacatgtatggatctccctcccactctgcacaatgtacatcatcttccttgtggggaatcttggtcttgtgtacctcatttattatgaggagtccttacatcatccgatgtattttttttttggccatgctctctccctcattgacctccttacctgcaccaccactctacccaatgcactctgcatcttctggttcagtctcaaagaaattaacttcaatgcttgcttggcccagatgttctttgttcatgggttcacaggtgtggagtctggggtgctcatgctcatggctctagaccgctatatagccatttgctaccctttgcgttatgctaccacactcaccaaccctatcattgccaaggctgagcttgccaccttcctgaggggtgtattgctgatgattcctttcccattcttggttaagcgtttgcctttctgccaaagcaatattatctcccatacgtactgcgaccacatgtctgtagtaaagctatcttgtgccagcatcaaggtcaatgtaatctatggtctaatggttgctctcctgattggagtgtttgacatttgttgtatatctttgtcttacactttgatcctcaaggcagcgatcagcctctcttcatcagatgctcggcagaaggctttcagcacctgcactgcccatatatctgccatcatcatcacctatgttccagcattcttcactttctttgcccaccgttttgggggacacacaattcccccttctcttcacatcattgtggctaatctttatcttcttcttcccccaactctaaaccctattgtttatggagtaaagacaaaacagatacgcaagagtgtcataaagttcttccagggtgataagggtgcaggttga

SEQ ID NO: 284080 - DNA, 1000 bp, Homo Sapiens
tacaaattttgggaaatcttagaataaagaacgagaacaaggaagtcattggctagtataattaagaaaggtaggattcagtgcttaccgatgatgcagtacttgatagaagaaaacagtctgggaggatagcgctcatttttcagttaccctttaaggagtccctttgtctttgggaaagtagcagaatggtccgcttctttcccatgagtggaaaatgtggcttgtccaactctcctccaggttgcatttcagtttctttccaaaacttattacctcccctaatcctgagactttggaaaaggtggaaggaagaactgttgctttatctccccctccctgcatgtgtcaacattgtgatgtcagtatttactaatctacattcagtggctgtacaaataacagctgtagtaagaagagattcaggatgctagaggtgaatatttgggtcatttacatgtacactacatagcaagttgatactcatgttgcatgttcttttaaattagtgattttgtgtcttaagtctttaacttccaatacttcatcatgtatgtaaccttccatgtttgcttctgataaatggaaatgtaggttcactgccacttcatgagatatctctgctcacgcttccaagttgttctcaatgacattagccaaagttgggtttgccattcatcccctaggcatggtaaatcttgtgttgttccctgctgtcctccgtattacgtgaccggcaaataaatctcatagcagttaatataaaacatctttggaggatgggagagaacaggagggaagatgggaaacaaaatagagaattcttaagattttgtttaaaccaaatgtttcatgtagaatgcaaaatgttggcacgtcaaaaatatgaatgtgtagacaactgtagttgtgctcagtttgtagtgatgggaagtgtattttactctgatcaaataaataatgctggaatactcaagaattgcaaaaaaaaaaaaaaaaa

SEQ ID NO: 284081 - DNA, 1000 bp, Homo Sapiens; identical to SEQ ID NO: 115242

SEQ ID NO: 284082 - DNA, 1000 bp, Homo Sapiens; identical to SEQ ID NO: 115243

SEQ ID NO: 284083 - DNA, 1000 bp, Homo Sapiens
ttgattcagtttggaggatgaactagttaatttccctgggagtacatgcctattaaaaatatagcatcctgcatctgaccaagatgctatcttactatcttattgtgcctatcttttatgcggagagagaaaggggggtgttgggaaggagaccagactgtggaaacattttctttattttttctctttttcttccttttatagtttgtttatttttcaacttgacatgggtagagaaagcgaatcgctagtatagaaagcacatctggaatccatccggcctcctctctctggctcaccctcctcccagcaatgtttctccttggaagttgggggaaggtaggcacctctgaccttggcagggtctaacttggggtcatccactgcatactcatcttccagaaggcgtcttattcctcctcgacaaaaaaaaaatgtgttggtattaaaatgctttgaggtaggctggatgaacccagcttagtgaggatgacatgaaaacccttagctaatggggtctttattgagtagaactcaggtaagttcagatgtaagcagtgtctctcagtaaacatgaaaagactgaagatgcagacaatcaaatacttaagtctcttgaagagctgggtggtgggcgggggtcttcccaggtggtcagggagatgtgttagtgtagcacttggaagagagtggaacgaccaggcaaggatgtgccgtggaggtgggcagtgggagcagcccagtgtcagcatctgtattggttagaagaccaccgctaatgaggaggagcgtctctaccctgcagctgtctgtactcctgtgtcttccgtaatgtgccaagctctctgaatatatgcaaaactagtctgcaaaaagccatatgtctcagcatctggctttatttctaagtgttcaggtggaatttaagccgcgatcaaatttacaatgtcactgccagctctggacacttacttttggaataaagcaaagagtgaacact

SEQ ID NO: 284084 - DNA, 689 bp, Homo Sapiens
cggggtgggattccaacccagaagcgggcatttggagccctcatgcttcaccctagctccctgaaacaagcacggaggatggctctgagcagcgaggaaagtgctggaagcaagcaggccgagcgcgtccctggctggggacgttaatcattaccggagggcggcccgagcgcggccccgccccgggacggcagcctgcgcgcccggccgccgcctgccctctccgctggccacctgctgccgcccgcgccatggctggcaaagcacacaggctgagcgctgaggagagggaccagctgctgccaaacctgagggctgtggggtggaatgagctggaaggccgtgatgccatcttcaagcagtttcatttcaaagacttcaacagggcctttgggttcatgacaagagtggccctgcaggctgagaaactggaccaccatcctgaatggtttaacgtgtacaacaaggtctcaaggctacaagcctccggtgtgcaacaataccatctgctttcctggttctccagcttgccaactacagatcttgggacttgtcagcctccataatcacatgagccaattccttataagaaatctctttgtgtgtattggttctgtttctctggagaatcataatacacaggcctatcatatcagatatggcagatcccaaaaaaaaaaaaaaaaaaa

SEQ ID NO: 284085 - DNA, 1000 bp, Homo Sapiens
tggatttttgagtgataaaacatttactaccttgtcctttaagtctgctaggctctcagtaccctaaaataaactagattgtgttgctattttttttctttctctataaaaataacacattattttatccgttatttgaaattttacatttctggttaccaaagttcattctgatagcatgtactttgtgaattattatctttgtctataactgacagatgtttatattaaaataaaatattgtattaaaaatttaaaataggtattttggatagatatgtgtctgtagtatataatctaatgtgtccatagtattattgctaatcttttggtttactataagatgatataactattttttcattgggaatatacatttttcttaatgttccaacatctatactttgtaaagtcaaaacatttcccatgagctgtagttattcatccttctgtacaaaatgaaaagtttggaaattgtttgccctgataccttgaaaaagaagccagaatatttatttgcttcatcaacttcagtgtatatcattttgtgttattttatacgaaaacatgtttattattttcatttttgtaaaaggaagtaaaaggtcaacattttctctcatgtaccaaccttgtttgtatttctattttctgtaatgtttaagtatgatgttgaagaaattcacattctcttatagtttggatgggaagactattgactatttcagaaacagacttatttcagaggcttattgttttctctgtatttacctaatattttataacttttatgaatcagaataatgtccttcataaatttgtttaattgaagtcatctacttctaacaggacagatacacaactatttgaggtttacaaattacatctttgataagggaaatggtttcgtgacatgtacacagttgctattaaaatgtaactctatatattctaaaaaaaaaaaaaaaaaaaaaaaaaaaaaaaaaaaaaaaaaaaaaaa

SEQ ID NO: 284086 - DNA, 1000 bp, Homo Sapiens; identical to SEQ ID NO: 117853

SEQ ID NO: 284087 - DNA, 1000 bp, Homo Sapiens
aaggcccgtatcagcacccgagtccagcccatctgcctcgctgccagtcgggatctcagcacttccttccaggagtcccacatcactgtggctggctggaatgtcctggcagacgtgaggagccctggcttcaagaacgacacactgcgctctggggtggtcagtgtggtggactcgctgctgtgtgaggagcagcatgaggaccatggcatcccagtgagtgtcactgataacatgttctgtgccagctgggaacccactgccccttctgatatctgcactgcagagacaggaggcatcgcggctgtgtccttcccgggacgagcatctcctgagccacgctggcatctgatgggactggtcagctggagctatgataaaacatgcagccacaggctctccactgccttcaccaaggtgctgccttttaaagactggattgaaagaaatatgaaatgaaccatgctcatgcactccttgagaagtgtttctgtatatccgtctgtacgtgtgtcattgcgtgaagcagtgtgggcctgaagtgtgatttggcctgtgaacttggctgtgccagggcttctgacttcagggacaaaactcagtgaagggtgagtagacctccattgctggtaggctgatgccgcgtccactactaggacagccaattggaagatgccagggcttgcaagaagtaagtttcttcaaagaagaccatatacaaaacctctccactccactgacctggtggtcttccccaactttcagttatacgaatgccatcagcttgaccagggaagatctgggcttcatgaggccccttttgaggctctcaagttctagagagctgcctgtgggacagcccagggcagcagagctgggatgtggtgcatgcctttgtgtacatggccacagtacagtctggtccttttccttccccatctcttgtacacattttaataaaataagggttggcttctgaactacaaaaaaaaaaaaaaaa

SEQ ID NO: 284088 - DNA, 1000 bp, Homo Sapiens; identical to SEQ ID NO: 220672

SEQ ID NO: 284089 - DNA, 1000 bp, Homo Sapiens
tccaactattggatgattatccgaaatgtttcattgtgggagcagacaatgtgggctccaagcagatgcagcagatccgcatgtcccttcgcgggaaggctgtggtgctgatgggcaagaacaccatgatgcgcaaggccatccgagggcacctggaaaacaacccagctctggagaaactgctgcctcatatccgggggaatgtgggctttgtgttcaccaaggaggacctcactgagatcagggacatgttgctggccaataaggtgccagctgctgcccgtgctggtgccattgccccatgtgaagtcactgtgccagcccagaacactggtctcgggcccgagaagacctcctttttccaggctttaggtatcaccactaaaatctccaggggcaccattgaaatcctgagtgatgtgcagctgatcaagactggagacaaagtgggagccagcgaagccacgctgctgaacatgctcaacatctcccccttctcctttgggctggtcatccagcaggtgttcgacaatggcagcatctacaaccctgaagtgcttgatatcacagaggaaactctgcattctcgcttcctggagggtgtccgcaatgttgccagtgtctgtctgcagattggctacccaactgttgcatcagtaccccattctatcatcaacgggtacaaacgagtcctggccttgtctgtggagacggattacaccttcccacttgctgaaaaggtcaaggccttcttggctgatccatctgcctttgtggctgctgcccctgtggctgctgccaccacagctgctcctgctgctgctgcagccccagctaaggttgaagccaaggaagagtcggaggagtcggacgaggatatgggatttggtctctttgactaatcaccaaaaagcaaccaacttagccagttttatttgcaaaacaaggaaataaaggcttacttctttaaaaagtaaaaaaaaaaaaaaaaaaaaaaaaa

SEQ ID NO: 284090 - DNA, 1000 bp, Homo Sapiens
ggctgacatcatcaaagtgggaattgggccaggctctgtgtgtactactcggaagaaaactggagtggggtatccacagctcagcgcagtgatggagtgtgcagatgctgctcatggcctcaaaggccacatcatttcagatggaggttgcagctgtcctggggatgtggccaaggcttttggggcaggagctgacttcgtgatgctgggtggcatgctggctgggcacagtgagtcaggtggtgagctcatcgagagggatggcaagaagtacaagctcttctatggaatgagttctgaaatggccatgaagaagtatgctgggggcgtggctgagtacagagcctcagagggaaagacagtggaagttccttttaaaggagatgtggaacataccatccgagacatcctaggagggatccgctctacgtgtacctatgtgggagcagctaagctcaaagagttgagcaggagaactaccttcatccgagtcacccagcaggtgaatccaatcttcagtgaggcgtgctagacctgagcagttctaccctcccaaggcaccagtactctaccatggggcatcccaagtggggtcctcacccatcccagctactgcagctctgtattactttgtcatttcctgttgtctcactcctgagggctcctgcagtaactctgtacttctctatctgcacacacaaaatgcccaaggcactcactggggaggaagcaaggaagcaaacagtctgagaaaatgatgcaagaaaatcaaatgggaatctggggacccaacacaacatcctgaagattattaaaaggaaaagatgctgattggtacataaatcttttacatggccttggtctagaggaggcaggcttttagaatcatgttttgttaatccgcttcactaaattggaccttcacatatctaaaaagctctgaagtgtttgtatatttgaaatacctcaataaagagagagctcattgactgtaaaaaaa

SEQ ID NO: 284091 - DNA, 1000 bp, Homo Sapiens
tggaatcggcgatgtactagaggaagttattcgtcaagctggtgtttatcatcccaatgtcaaagttgtgtccaattttatggattttgatgaaactggggtgctcaaaggatttaaaggagaactaattcatgtatttaacaaacatgatggtgccttgaggaatacagaatatttcaatcaactaaaagacaatagtaacataattcttctgggagactcccaaggagacttaagaatggcagatggagtggccaatgttgagcacattctgaaaattggatatctaaatgatagagtggatgagcttttagaaaagtacatggactcttatgatattgttttagtacaagatgaatcattagaagtagccaactctattttacagaagattctataaacaagcattctccaagaagacctctctcctgtgggtgcaattgaactgttcatccgttcatcttgctgagagacttatttataatatatccttactctcgaagtgttccctttgtataactgaagtattttcagatatggtgaatgcattgactggaagctccttttctccacctctctcaacacactcctcaccgtatcttttaacccatttaaaaaaaaaaaaaagctaaaattagaaaaataactccctacttttccaaagtgaattttgtagtttaatgttatcatgcagcttttgaggagtcttttacactgggaaagtttgtagaaattttaaaataagttttatgaaatggtgaaataatatgcatgattttaagtattgccatttttgtaatttgggttattatgctgatggtatcaccatctcttgaaattgtgttaggtttggttattttgtctggggaaaaaatatttactggaaaagactagcagttagtgttggaaaaacctggtggtgtttacaatgttgctaatcattacaaaacattctatattgaagcactgataataaatatgaaatgcaaaacctttttaa

SEQ ID NO: 284092 - DNA, 1000 bp, Homo Sapiens; identical to SEQ ID NO: 115645

SEQ ID NO: 284093 - DNA, 943 bp, Homo Sapiens
aacctcacgaggccttacgtgcctagagcggttcctctccgtggcgccctaccgccttcggcgcgaaggtggctggtgcgtaccgtcccgaaccctaggagccgaggtgagcgccgcgaagacccccgacattaagaagtggtgtccaccgcagcccccttaagccggataccctcccccaccccgaggagcaagcctgccttccgccacgcgccgcccgtcttccgcgcccgcgcagaacctcgcggctgtgcccgcctaaagccacgcccatcctctcttggccacgccctcagagactcctcccctgtcgcccagatcccacccgcaggaccccaaaacccaatgatcctgcagcagcccttgcagcgaggcccccagggaggggcccagcgcctcccgcgggccgccttgggggtgacttggggcctggacgccagggagcctctgcgcaagcagtttctgtctgaggagaacatggccacccacttctctcaactcagcctgcacaatgaccacccctactgcagcccccccatgaccttctccccagccctgcccccactcaggagcccttgctctgagctgcttctctggcgctatcctggcagcctcatccctgaggccctccgtctgctgaggctgggggacacccccagtcccccctaccctgcaaccccagctggggacataatggagctctgagtgctggtggacagtgcccctcccaccttccttcttccccacaacagaagagaccagcgactcccgcaaagggacaaggttcctccctctcctgcagagtaggcatctgggcaccaagaccttccctcaacagaggacactgagcccaacggagttctgggatgggaggggtgggagcatgggaagggaggcatcccacccccaagaagaactgaataaagattgctgagcaaaggaa

SEQ ID NO: 284094 - DNA, 1000 bp, Homo Sapiens; identical to SEQ ID NO: 220674

SEQ ID NO: 284095 - DNA, 1000 bp, Homo Sapiens
catgaaggcttccaggaactcctccgtaccctcaaccagccagacagccagctccagctgaccaccggcaatggcctgttcctcagcgagggcctgaagctagtggataagtttttggaggatgttaaaaagttgtaccactcagaagccttcactgtcaacttcggggacaccgaagaggccaagaaacagatcaacgattacgtggagaagggtactcaagggaaaattgtggatttggtcaaggagcttgacagagacacagtttttgctctggtgaattacatcttctttaaaggcaaatgggagagaccctttgaagtcaaggacaccgaggaagaggacttccacgtggaccaggtgaccaccgtgaaggtgcctatgatgaagcgtttaggcatgtttaacatccagcactgtaagaagctgtccagctgggtgctgctgatgaaatacctgggcaatgccaccgccatcttcttcctgcctgatgaggggaaactacagcacctggaaaatgaactcacccacgatatcatcaccaagttcctggaaaatgaagacagaaggtctgccagcttacatttacccaaactgtccattactggaacctatgatctgaagagcgtcctgggtcaactgggcatcactaaggtcttcagcaatggggctgacctctccggggtcacagaggaggcacccctgaagctctccaaggccgtgcataaggctgtgctgaccatcgacgagaaagggactgaagctgctggggccatgtttttagaggccatacccatgtctatcccccccgaggtcaagttcaacaaaccctttgtcttcttaatgattgaacaaaataccaagtctcccctcttcatgggaaaagtggtgaatcccacccaaaaataactgcctctcgctcctcaacccctcccctccatccctggccccctccctggatgacattaaagaagggttgagctggtccctgcctgcaaaa

SEQ ID NO: 284096 - DNA, 870 bp, Homo Sapiens
gtgcgcactggcgtgcgagactcggcgggcgctgttgagggagtcgggccgcgactgtggtcgtttttataccttcccgcgcggacgccggcgctgccaacggaagggcgggtagggcgagacggagtttcgtcatgttggccaggcccatttgagatctttgaagatatcctcaacgtgaggctctgctgccatgaaggtgaagattaagtgctggaacggcgtggccacttggctctgggtggccaacgatgagaactgtggcatctgcaggatggcatttaacggatgctgccctgactgcaaggtgcccggcgacgactgcccgctggtgtggggccagtgctcccactgcttccacatgcattgcatcctcaagtggctgcacgcacagcaggtgcagcagcactgccccatgtgccgccaggaatggaagttcaaggagtgaggcccgacctggctctcgctggaggggcatcctgagactccttcctcatgctggcgccgatggctgctggggacagcgcccctgagctgcaacaaggtggaaacaagggctggagctgcgtttgttttgccatcactatgttgacacttttatccaataagtgaaaactcattaaactactcaaatcttgctggaggcctctgggtgcctgtgttctcggcatatagatgtggtctcggtgtgttttgatatgaaaactctcatgaataaacatctccgtgaaacgccaaggccctcgtcaaaccctgagtcatgactgggaggagaaggagcaggatcagacggtagagcctggggcatgctcttcaggcatgctcttgcctgctggattgccggcggcggccctgggaccctccctcagg

SEQ ID NO: 284097 - DNA, 1000 bp, Homo Sapiens
ggataatttccagcagtgttataagcgaggagggacatctggtggtccacgagcaaattcgagagcagggtggagtgattcttctcaggtgagcagcccagaaagagacaacgaaacctttaacagtggtgactctggacaaggagactcccgtagcatgacccctgtggatgtgccagtgacaaatccagcagccaccatactgccagtacacgtctaccctctgcctcagcagatgcgagttgccttctcagcagccagaacctctaatctggcccctggaactttagaccaacctattgtgtttgatcttcttctgaacaacttaggagaaacttttgatcttcagcttggtagatttaattgcccagtgaatggcacttacgttttcatttttcacatgctaaagctggcagtgaatgtgccactgtatgtcaacctcatgaagaatgaagaggtcttggtatcagcctatgccaatgatggtgctccagaccatgaaactgctagcaatcatgcaattcttcagctcttccagggagaccagatatggttacgtctgcacaggggagcaatttatggaagtagctggaaatattctacgttttcaggctatcttctttatcaagattgaaagtcagtacagtattgacaataaaaggatggtgttctaattagtgggattgaaggaaaagtagtctttgccctcatgactgattggtttaggaaaatgtttttgttcctagagggaggaggtccttacttttttgttttccttcctgaggtgaaaaatcaagctgaatgacaattagcactaatctggcactttataaattgtgatgtagcctcgctagtcaagctgtgaatgtatattgtttgcacttaatccttaactgtattaacgttcagcttactaaactgactgcctcaagtccaggcaagttacaatgccttgttgtgcctcaataaaaaagttacatgcacaaaaaaaaaaaaaaaa

SEQ ID NO: 284098 - DNA, 1000 bp, Homo Sapiens
aagtggacaggactgggaggtcttggtggttggagccaacgtgggttccctgcggctccttagtcacctctgatagcagattgagggaggaaaacaggtaaggcatgaggaaatggccaggttgggttaacccactggtttcaaccagttcaggaatgaggttatttggccatgactggctgatcttgagctcaaggatctgcttcaaatgcacacaggcctagttgaagtttaaaccccagcaaaacattcctccctgtaaatggaaaatcctacttctacccccaccctgccctgttttttgttttttttttccccaagatcattagatgtcctcacccctcctcactgcctctcctctctgggacaggctgggacctttgaggaagataaagccttccttgactacccatcatattcagtgtccctgttcctcactcagagaggaaggcagaaccagtcaggcttatttcagtaagttccacagttctacaagactgcaggaattctccttaagggaggagagcaagcaggtgtggccccagcttctggaaatggcagaagagagggttttctcattgaatgggggtgggggctcgtgtgtcctgggaaaccccatcagtcccttcatttcttgagactcaactcctgggaggagagggtctcaagagttgtccctggaaggagggcgggggcagtctgcatctatttcaggttgtggctcttggttctaggactcttacttctctggctaagggctcagcttcttgggacttcaaccatcttctttctgaaagaccaaatctaatgtaaccagtaacgtgaggactgccaagtatggctttgtccctatgactcagaggagggtttgtcgggcaaattcaggtggatgaagtatgtgtgtgcgtgtgcatgggagtgtgcgtggactgggatatcatctctacagcctgcaaataaaccagacaaacttaccaacgtcaaaaaaaaaaaaaaaaaa

SEQ ID NO: 284099 - DNA, 1000 bp, Homo Sapiens
tccctgagaggagaatgtgtataggagggtttggctgagtccttcagcgttaagtggaggaaagcttggggaagccccaatagctggacagacctcagcctcccctcgaagacacctcaattcacagactctcagcccacacaatgccccagtgtccccagctccgctggagcagctgcagggcacttggatcacaacttctgcaccctctgtccagagtctagggcagtcctccactggcccagcactccagtttcctttccctgcctcttgtccaatggagtgggaggccaggtgagtggagcagaggtcctgaagcccttgacccctgggggcctgggtagtgtaggatctcgctgggctgggtcctggattccagggctattccctggaggacagtctcagttatgggataaggccccctgggggtctccatttctttccaacagtttcatgttcactactggactcttacgggctcagtatctctcccttagccatgagctggctcaggcatcccttcccttccctggagctgccctgcctttctcaagtatttatttatttattgcatggttcctgggaacatgtggcacaagtaatgggatgaggaggaattgggggtgggggtcttctacctaggactcttccctggagtcatgggctgcctgggacccaggacccatgagggggctgagaggtttctacactcgaggagcaggggtccagagaggcaggctggggaggcaagggacccatcctaggcccgctttcttgccgagccaagcagcttagctggggctgtgcagccaggggcttacccaggccagtggaggtgccacagccctggggagccagacaggctttggtatcgtatcgcctctgtgtccttttaagagaggagagttcagtaccccgtgctttctttacactggagaggaactaaaaggatctctgtgtctatggagaattgtcaataaaaaggcctcaagcttcaaaa

SEQ ID NO: 284100 - DNA, 1000 bp, Homo Sapiens
tcaagaaaaccttagaagagaagcatttagagagcatcagcaatacaaaaccgctgagttcttgagcaaactgaacacagaatcgccagacagaagtgcctgtcaaagtgctgtttgtggcccacaatcctcaacatggaaacttcctatcctgcctagggatcacagctgggccagaagctgggcttacagagattctctaaaggcagaagaaaacagaaaattgcaaaagatgaaggatgaacaacatcaaaagagtgaattactggaactgaaacggcagcagcaagagcaagaaagagccaaaatccaccagactgaacacaggagggtaaataatgcttttctggaccgactccaaggcaaaagtcaaccaggtggcctcgagcaatctggaggctgttggaatatgaatagcggtaacagctggggttctctattagttttttcgaggcacctaagggtatatgagaaaatattgactcctatctggccttcatcaactgacctcgaaaagcctcatgagatgctttttcttaatgtgattttgttcagcctcactgtttttaccttaatttcaactgcccacacacttgaccgtgcagtcaggagtgactggcttctccttgtcctcatttatgcatgtttggaggagctgattcctgaactcatatttaatctctactgccagggaaatgctacattatttttctaattggaagtataattagagtgatgttggtagggtagaaaaagagggagtcacttgatgctttcaggttaatcagagctatgggtgctacaggcttgtctttctaagtgacatattcttatctaattctcagatcaggttttgaaagctttgggggtctttttagattttaatccctactttctttatggtacaaatatgtacaaaagaaaaaggtcttatattcttttacacaaatttataaataaattttgaactccttctgtaaaaaaaaaaaaaaaaaaaaaa

SEQ ID NO: 284101 - DNA, 1000 bp, Homo Sapiens; identical to SEQ ID NO: 220675

SEQ ID NO: 284102 - DNA, 1000 bp, Homo Sapiens
aggtcacattcttccagaatggaaaatccaagaaattttcccgttcggatcccaacttctccatcccacaagcaaaccacagtcacagtggtgattaccactgcacaggaaacataggctacacgctgtactcatccaagcctgtgaccatcactgtccaagctcccagctcttcaccgatggggatcattgtggctgtggtcactgggattgctgtagcggccattgttgctgctgtagtggccttgatctactgcaggaaaaagcggatttcagccaatcccactaatcctgatgaggctgacaaagttggggctgagaacacaatcacctattcacttctcatgcacccggatgctctggaagagcctgatgaccagaaccgtatttagtctccattgtcttgcattgggatttgagaagaaaatcagagagggaagatctggtatttcctggcctaaattccccttggggaggacagggagatgctgcagttccaaaagagaaggtttcttccagagtcatctacctgagtcctgaagctccctgtcctgaaagccacagacaatatggtcccaaatgaccgactgcaccttctgtgcttcagctcttcttgacatcaaggctcttccgttccacatccacacagccaatccaattaatcaaaccactgttattaacagataatagcaacttgggaaatgcttatgttacaggttacgtgagaacaatcatgtaaatctatatgatttcagaaatgttaaaatagactaacctctaccagcacattaaaagtgattgtttctgggtgataaaattattgatgatttttattttctttatttttctataaagatcatatattacttttataataaaacattataaaaacaacattctgtttaccttttcaaggctgtattggttggagtgtagactgaactgcctggggtctgtttctcttcagtgatgagactcttaggaaggcaggaatggatag

SEQ ID NO: 284103 - DNA, 1000 bp, Homo Sapiens
atctttgcccttgggatttccatgacctttatcaatatcccagtggaatggttttccatcgggtttgactggacctggatgctgctgtttggtgacatccgacagggcatcttctatgcgatgcttctgtccttctggatcatcttctgtggcgagcacatgatggatcagcacgagcggaaccacatcgcagggtattggaagcaagtcggacccattgccgttggctccttctgcctcttcatatttgacatgtgtgagagaggggtacaactcacgaatcccttctacagtatctggactacagacattggaacagagctggccatggccttcatcatcgtggctggaatctgcctctgcctctacttcctgtttctatgcttcatggtatttcaggtgtttcggaacatcagtgggaagcagtccagcctgccagctatgagcaaagtccggcggctacactatgaggggctaatttttaggttcaagttcctcatgcttatcaccttggcctgcgctgccatgactgtcatcttcttcatcgttagtcaggtaacggaaggccattggaaatggggcggcgtcacagtccaagtgaacagtgcctttttcacaggcatctatgggatgtggaatctgtatgtctttgctctgatgttcttgtatgcaccatcccataaaaactatggagaagaccagtccaatggaatgcaactcccatgtaaatcgagggaagattgtgctttgtttgtttcggaactttatcaagaattgttcagcgcttcgaaatattccttcatcaatgacaacgcagcttctggtatttgagtcaacaaggcaacacatgtttatcagctttgcatttgcagttgtcacagtcacattgattgtacttgtatacgcacacaaatacactcatttagcctttatctcaaaatgttaaatataaggaaaaaagcgtcaacaataaatattctttgagtattgtcttaaaaaa

SEQ ID NO: 284104 - DNA, 1000 bp, Homo Sapiens
ccactgaatctggaccccatctgtgaataagccattctgactcatatcccctatttaacagggtctctagtgctgtgaaaaaaaaaatgctgaacattgcatataacttatattgtaagaaatactgtacaatgactttattgcatctgggtagctgtaaggcatgaaggatgccaagaagtttaaggaatatgggagaaatagtgtggaaattaagaagaaactaggtctgatattcaaatggacaaactgccagttttgtttcctttcactggccacagttgtttgatgcattaaaagaaaataaaaaaaagaaaaaagagaaaagaaaaaaaaagaaaaaagttgtaggcgaatcatttgttcaaagctgttggcctctgcaaaggaaataccagttctgggcaatcagtgttaccgttcaccagttgccgttgagggtttcagagagcctttttctaggcctacatgctttgtgaacaagtccctgtaattgttgtttgtatgtataattcaaagcaccaaaataagaaaagatgtagatttatttcatcatattatacagaccgaactgttgtataaatttatttactgctagtcttaagaactgctttctttcgtttgtttgtttcaatattttccttctctctcaatttttggttgaataaactagattacattcagttggcctaaggtggttgtgctcggagggtttcttgtttcttttccattttgtttttggatgatatttattaaatagcttctaagagtccggcggcatctgtcttgtccctattcctgcagcctgtgctgagggtagcagtgtatgagctaccagcgtgcatgtcagcgaccctggcccgacaggccacgtcctgcaatcggcccggctgcctcttcgccctgtcgtgttctgtgttagtgatcactgcctttaatacagtctgttggaataatattataagcataataataaagtgaaaatattttaaaactacaa

SEQ ID NO: 284105 - DNA, 1000 bp, Homo Sapiens
gttcccctaaattaataaaatgtttttctccaggattttggtgagggttggctgtggctgtcgttttgcacctcccagatttcaaagaattactggttttaccatgactcaaatcttaagatctgtttctactattcagttcctcaaactgaagcttattgaaaaaaaaatgtataatgttatttgttttattatagcaattatgcctaattaaagcagtatttaatgcaatttccagttatttctttggagaattttatgtcattgttccattaccttgaatgttggaaagatatgatacgtgctgcttgttcatcacaaaaatcagtaagcacaataaagtggatgccaaaccatcagacacataaatgttcccgctgtgtccctggatatggaataagcaggtataaaaaatattttaattatagttttgttataaatataacttatgagaaaaaaatttgataggaataatactgtatattactaatttttaactatccctaaggcaaaccttatgacccacagaattttctcatatacagtattcagtgcacagaaatcttatgattggctcaagtacagtaagttacttctcagtaaaactctcaagtctgagtccatatttgtagctctgcttttggctgtacgttcctaggatcggggctgcttatgcctttcgtttatccttggggtttgagagcgctgtatttgggagagagtttaaaaatacattaggagagagaaaccattaaaagtttcactgtcagatatattgtaggtgctaatactggatttcgtctcagatttaatttcttttatgggtctgttagtcattcaacaaatcccataagtatgtgttaatattttaattgtgtaaaactcatttgttactttacagcctgtaatagtgtgtctgcattttcaacctgttgcaataactttgctgaaatattaacacattaataaaacttttcttaaacaaaaaaaaaaaaaaaaa

SEQ ID NO: 284106 - DNA, 1000 bp, Homo Sapiens; identical to SEQ ID NO: 224085

SEQ ID NO: 284107 - DNA, 1000 bp, Homo Sapiens; identical to SEQ ID NO: 220676

SEQ ID NO: 284108 - DNA, 1000 bp, Homo Sapiens
aaatctcaatcctgagtggaataaagtcttcacgttcaacattaaagatatccattcagttcttgaagtgacagtttatgatgaagatcgggatcgaagtgctgactttctgggcaaagttgctataccattgctgtctattcaaaatggtgaacagaaagcctacgtcttgaaaaacaagcagctgacagggccaacaaagggggtcatctatcttgaaatagatgtgatttttaatgctgtgaaagccagcttacgaacattaatacccaaagaacagaagtacattgaagaggaaaacagactctctaaacagctgctactaagaaactttatcagaatgaaacgttgtgtcatggtgctggtaaatgctgcatactacgttaatagttgctttgattgggattcacccccaaggagtctcgctgcttttgtgctctttctctttgttgtctggaactttgagctctacatgataccactggttttgttgttactattgacatggaactacttcttgataatatcagggaaagataacaggcaacgtgatacagtagtggaggacatgctagaggacgaggaagaagaagatgacaaagatgacaaggacagtgaaaaaaagggatttataaataaaatctatgccatccaggaggtatgtgtcagtgtccagaacatcctagatgaagtggcttcctttggcgaaaggattaagaatactttcaactggactgtcccattcttaagctggctggccattgtagccctctgtgtgttcacagccatcctgtactgcattccgctgagatacattgtccttgtctggggcatcaataaatttacaaaaaagcttcggagtccatatgcaattgataacaatgaactacttgacttcctttccagagtcccttcagatgtacaagtggtgcaataccaagaactgaaaccagatccttctcatagcccatataaaagaaagaaaaacaatcttggctag

SEQ ID NO: 284109 - DNA, 1000 bp, Homo Sapiens; identical to SEQ ID NO: 220677

SEQ ID NO: 284110 - DNA, 1000 bp, Homo Sapiens
gctcctgggactggatcggcttataccgggtgggtttccgccattgcaaggactatgtggcttatgtctgggccaaacatgaagatgtggatgggaatacctaccaggtaacattcagtgaggaatcactgcccaagggccatggagacttcatcctgggctactatagtcacaaccacagcatcctcatcggcatcactgaacccttccagatctcgctgccttcctcggagttggccagcagcagcacagacagctcaggcaccagctcagagggagaggatgacagcacactggagctccttgcacccaagtcccgcagccccagtcctggcaagtccaagcgacaccgcagccgcagcccgggactggccaggttccctgggcttgccctacggccctcatcccgtgaacgccgtggtgccagccgtagcccctcaccccagagccgccgcctgtcccgagtggctcctgacaggagcagtaatggcagcagccggggcagtagtgaagaggggccctctgggttgcctggcccctgggccttcccaccagctgtgcctcgaagcctgggcctgttgcccgccttgcgcctagagactgtagaccctggtggtggtggctcctggggacctgatcgggaggccctggcgcccaacagcctgtctcctagtccccagggccatcgggggctggaggaagggggcctggggccctgagggtggggtaggcagatgggccaaggtgaccaccattctgcctcaatcttttgcaagcccacctgcctctctcctgctgctcctccagctgtatctgcacctgcctctctgtcctggccaggggtggacaactggggtcccccaaaactcagtcctggcacctcaactgtgacaatcagcaaagccccacccaggcccccatctgggatgatgggagagctctggcagatgtcccaatcctggaggtcatccattaggaattaaattctccagcctcaaaa

SEQ ID NO: 284111 - DNA, 1000 bp, Homo Sapiens
ctgctgtccttctttgtggagagcaagctccacgaccacgctgcttacttagtagacaacctgtgggactgtgcagggactcagctgaaggactgggagggtctgacaagcctgctgctggagaaggaccagagcacgtgccacatggagccagggccagggaccttccacctcctagggtgaaaccaggagagattgcttgcttcacttgtacaaggcaggaacggtggcatggggtgggggaaacttggagttggaaggtggctaatctttgattctatgtttttgatcctcctggcactccagacctgggtgatgtgcaggagagcacactgatagaaatccttgtgtccagtgcccagcaactcctgcctcagcctcccgagcagctgggactacaggcgcccgccaccacgcctggctaacttttttgtatttttagtagagacgggttttcaccgtgttggccaggatggtcttgatctcttgaccttgtgatccacctgcctcatcatcccaaagtgctgggattacaggcgtgagccactgcgcccagcatgttagacaatttttaattcatcctctctgtgctgttgttttctcagctgtgaaaggaatattctggtggggacaaggttacagagttgctgagagggtctcatgacatgaaggtactggccttggcacagtgcctgggggggcggggactccgcacatgcctgtgatgtcacagttactgtcagttcacagtgaaccttccctccttttcctgttgactttcccacactcctgtaaccctccctccctcccttcttcctctctctctctctcactcacgcacacgcacacacacacacacacacacacacacacactccattcactgtctccatgactctggagtaaactaacgtctcgagttgccattggaagccccattgtcctcattttgttttgttttgtttgtttgagacggggtctcgctctgtcccccaggctg

SEQ ID NO: 284112 - DNA, 1000 bp, Homo Sapiens; identical to SEQ ID NO: 117489

SEQ ID NO: 284113 - DNA, 1000 bp, Homo Sapiens; identical to SEQ ID NO: 115253

SEQ ID NO: 284114 - DNA, 1000 bp, Homo Sapiens; identical to SEQ ID NO: 115254

SEQ ID NO: 284115 - DNA, 1000 bp, Homo Sapiens
ggttgggagaaatatatcttaacttggcaagtttaaaagagaaagtggccattactaatgaaaattattctctagcattttcatgtttatctttaatagcattgctgatgacatattccctcttatcagttgtgtaggtgccattcactgcaatatactggccatccgcactggcaacgactttgctgccattaagctacaggtgataaaattgatctatctcatgatatggcattcgttggtgattatctcacctgtagtgactctggcattcttccctgcatctctgaaacaggggagcttacactttctattaatcatatattttgtattattgttgacaccatggctggagttttcgaaaagtggaactcatcttcctagcaacacaaaaaataattccagcatggtgggtaagtatggatgcttatcttaatcatgctagtatatgctgccatcaattctcctgcttgtcagcagtgaaactgcagctgtcaaatgaggaattgataagagacacgaggtgggacatacaatcctacactacagatttcagtttttagaaaatgtgataataatattgatatttagtttctttggagggaacgttttaccgaagtgttgtgactcaataattgccgtgtagttcatcaaaacctacatattagcctttggctttaagctccgcttctgtcagtatttgcaaccaaggtggtcgggcaaagtattgccaggagatactgaaaatcatccagaagcactgtgatattgtgtaagcatctggagaaaattcagttaaaagaataaaagtaagcagctgaggaattactatcactcatggagaagggtaggatattttcaataagtgagtatgcaatatccatatatactttcacagaacaaagagtaaagaggctgagtgtgactttataaagatactcataaaaaatataaacaacaaaaccttggaagtagtttctaataaaattgatttttctaa

SEQ ID NO: 284116 - DNA, 1000 bp, Homo Sapiens
gcagtgagatttggtgattgtctggggggattcctgggtttccctgggtaccttgttccaggcagtcagtccatttgccttcctagtacttagccccctctgacaattttttttttaatgtgccttttgggttggtagaaacggaagtagaagtaggctggaggatgagttgggacagtcttccttttgttgggaggtgagcacatttacagatattttgcttcatagtttccatgccctctgcccagctcagtttagacagtaaacgttccttgtttcttttctcccatgacactgacaagaggaattaccacctcagcctcttttgcccctcttcttgcctttcacccaggctctcagccctaattaacacactgacccaaaggtgcttgtgttgcaggtcccatctcctttgatgaggttaacaattcccactttggcattttcctaactattcgtgtggctagaattggttggttggtcacttgacaagaaaaaccatacttacctgggccaaggctctgttcctgccttcgcaaattctcaaaagagtaaagtttatgaaaagaaagtggcaggcaaacacaactcttgactgccctcccaccctcctacctgttcagtactcatctgattcagaagcatcacttcttggataactagcactggaaaaatgaaatcatctgtgtaagtgaagggactcatttttctttgctttcagcccatgtaaataaataatacagtattaacattttcgtgctgcttcccattagcttgtagattgagccatactctggctgcctctttgccttcctaggggcattttctttaacttccagaatagtgattttaaaagtaaaaataaaaataaaccttacttacaagcataacagattgtatttaactttatcacatatgatagagatatatatgctgtaaaatgagggaaaggaactttctaataaaccaatgatttgtggaaaaaaaaaaaaaaaaaaaa

SEQ ID NO: 284117 - DNA, 1000 bp, Homo Sapiens
ggagtcgggcttcctgcgcgaggtgctgaatgctgtccccgtcctcccgcacatcccagcgctggctggcaaggtcctacgcttccaaaaggctttcctgacccagctggatgagctgctaactgagcacaggatgacctgggacccagcccagccaccccgagacctgactgaggccttcctggcaaagaaggagaaggccaaggggagccctgagagcagcttcaatgatgagaacctgcgcatagtggtgggtaacctgttccttgccgggatggtgaccaccttgaccacgctggcctggggcctcctgctcatgatcctacacctggatgtgcagcgaggaaggagagtgtcccctgggtgctcacccattgtggggacgcatgtctgtccagtccgtgtccaacaggagatcgacgacgtgatagggcaggtgcggcgaccagagatgggtgaccaggttcacatgccctacaccactgccgtgattcatgaggtgcagcgctttggggacatcgtccccctgggtgtgacccatatgacatcccgtgacatcgaagtacagggcttccgcatccctaagggaacgacactcatcaccaacctgtcatcggtgctgaaggatgaggccgtctgggagaagcccttccgcttccaccccgaacacttcctggatgcccagggccactttgtgaagccggaggccttcctgcctttctcagcaggccgccgtgcatgcctcggggagcccctggcccgcatggagctcttcctcttcttcacctccctgctgcagcacttcagcttctccgtggccgccggacagccccggcccagccactctcgtgtcgtcagctttctggtgaccccatccccctatgagctttgtgctgtgccccgctagaatggggtacctagtccccagcctgctccctagccagaggctctaatgtacaataaagcaatgtggtagttccaaaaaaaaaaaaaaaaaaaa

SEQ ID NO: 284118 - DNA, 1000 bp, Homo Sapiens
ggtccctagggaccaggcatattatcatagtaggtattttccattttaatgtgtaatggagccattcaatgatcaaaaatacactggaccagatagtagactggtcccttgatcagaagcatcagcacatcagcatcacctggaaattgttcccagcctttgtctcctacctactaaattagaaactcttggtgggttccagtaatccatagcttaacaagccctgcagttaatactgatgtacactgatgtccaaaaactgctgtcatggactattgattgtattgaggattagtctcagttggaaagccaactacagaggcattttgaactttctttctttgcctctctatgtctctctgtcttttcctgtcttctgatttatctgtctttctttctctagtaaatggcactcaatataaaagtggtggagtcaatcttaaacttatttttattatgattgtattgatacatgcacgaagtccctctgccctactccctattcaaggatattactcactgcacatcataaatctccatcatctgtcttaaagttttatgagtagatttcatctacattatattcaagttcatttattactgagctgtattactgtggagctctaacagtatttgtttcctgatttcaaactcaatgctacagagcactttgaatacatcacaccttataggaaagatagtaaatgtattaatcccattgaaaaattagttttgtacaatgtgctaaatagtattgcattggattacttttatatttaacacactccatcaaaacatcccataacataattttacaatctgcatgtgaatttaactgtgaaattcagtattgtgatattttgaataagtgaattctttctctgcaaatactatgttgataaaattacttgtatgttcccctgaaatggtttgtttcctgtttcttcattattaaaacataaatcaatcatatgtttaaaagaaaaaaaaaaaaaaaaaa

SEQ ID NO: 284119 - DNA, 832 bp, Homo Sapiens
ggagtgaatgggggcagcatgaggccgggcggctttttgggcgccggacagcggctgagtagagccatgagccgatgtgttttggagcctcgccccccggggaagcggtggatggtggctggcctggggaatcccggactgcccggcacgcgacacagcgtgggcatggcggtgctggggcagctggcgcggcggctgggtgtggcggagagttggacgcgcgaccggcactgtgccgccgacctcgccctggccccgctgggggatgcccaactggtcctgctccggccacggcggcttatgaacgccaacgggcgcagcgtggcccgggctgcggagctgtttgggctgactgccgaggaagtctacctggtgcatgatgagctggacaagcccctggggagactggctctgaagctggggggcagtgccaggggccacaatggagtccgttcctgcattagctgcctcaactccaatgcaatgccaaggctgcgggtgggtatcgggcgcccggcgcaccctgaggcggttcaggcccatgtgctgggctgcttctcccctgctgagcaggagctgctgcctctgttgctggatcgagccaccgacctgatcttggaccacatccgtgagcgaagccaggggccctcactggggccgtgacactagtggccatggctgcctgcctgactgtagtgcccaccaacccagccactgccacagagctgccacgccagccttggtatctactttttatacaaatctcctctagactgttccaggctgcctgcggattaaagtgggggtgactgtgaaaaaaaaaaaaaaaaaa

SEQ ID NO: 284120 - DNA, 1000 bp, Homo Sapiens; identical to SEQ ID NO: 220679

SEQ ID NO: 284121 - DNA, 935 bp, Homo Sapiens
gaagctggcccgagatgtggagccatgctgcgtaccgaagtgccccggcttccccggtccacaaccgccattgtctggtcgtgccatctaatggccactgcctccgccatggctggaccttcctctgagacgacctctgaggaacagctgatcacccaggagcccaaagaggccaactccactacgtcccagaagcagagcaagcagaggaagcgagggcgccatgggccccgcaggtgccactccaactgccgcggggacagcttcgccacctatttccgccgggtgctgaagcaggttcaccagggcctcagcctttcccgggaggccgtgagtgtcatggattctttggttcatgacatattggaccgcatcgccaccgaggctggtcacctggcccgctccaccaagcgccagaccatcactgcctgggagacccggatggctgtgcgcctgctgctgccggggcagatgggcaagctcgccgagtccgaaggcacgaaggctgtcctcagaacttcactgtatgccatacagcaacagagaaagtgaatacgctgatacaagaagcaagaatattagaaaaatgtcatgaaaatagttgaagagaaatgctcactgcacaaggagaccaagaaaaaccccccacgaaatcagccacaactaaatcgctctggacggtgccgccaggtgaccctacatgtccggagcaacactttgaaaaccaaagacgcttggcagaaccctgttcctttccagagacagagctgtgtaccttgtctaaaacaccgcatctcactcagtgacttatttctcattatgctaattgttttcgctttaaagcgccagtctttctgtcaaatgggacatacaaataaatttctaaaattaaaaaaaaaaaaaaaaaaaaaaaaaaaaagaaaaaaaaaaaaaaa

SEQ ID NO: 284122 - DNA, 573 bp, Homo Sapiens
tcactgacccatttccactgctgctccctcgtccgctgctctgaagcctaacccatggtgcccagaatttctgctgccatcttcatttttgaacttttgggttcaaactcagaaggagtcacagatcttagactgtggctatgccagccagcgcccaggtgcggggagtggacctacaaccccttggagcagtgctgtgatgacggtgtcatcctagacttgaaccagacccggctctgcggctccagctgcaccttctggccctgcttccagcactgctgcctggagtctttgggctctcagaaccagacagttgtgaggttcaaggtcccaggcatgaagccagattgcaagtcctcccctatcaccaggatctgtgcccaggaataccacccaaaaagccctgtgtcaagatctgacctcatctagactgttctggggtagcagagtcacagatcactctagaatctaatacttggtaattatactgcattgattttgttgttgttgtgacagagtttcactctgtcccccaggctggagtgcaaataagcaacttcagcaaagtctcag

SEQ ID NO: 284123 - DNA, 1000 bp, Homo Sapiens; identical to SEQ ID NO: 115255

SEQ ID NO: 284124 - DNA, 512 bp, Homo Sapiens; identical to SEQ ID NO: 115256

SEQ ID NO: 284125 - DNA, 1000 bp, Homo Sapiens
agtgctgacttctctagcatgctctctgaggaggaaaaggaagagttaaaagcagagttagttcagctagaagacgaaattacaacactacgacaagttttgtcagcgaaagaaaggcatctagttgagataaaacaaaaactcggcatgaacctgatgaatgaattaaaacagaacttcagcaaaagctggcatgacatgcagactaccactgcctacaagaaaacacatgaaaccctgagtcacgcagggcaaaaggcaactgcagctttcagcaacgttggaacggccatcagcaagaagttcggagacatgagacgaaagtaggcggtacgaaccctaatggaggcagttttgaggaggtcctcagctccacggcccatgccagtgcccagagcttggcaggaggctcccggcggaccaaggaggaggagctgcagtgctaagtccagccagcgtgcagctgcatccagaaaccggccactacccagcccatctctgcctgtgcttatccagataagaagaccaaaatcccgctgggaaaaacccaggccttgacattgttattcaaatggcccctccagaaagtttaatgatttccatttgtatttgtgttgatgatggaccacttgaccatcacatttcagtattcatagatgactgtcacattttaaaatgttcccacttgagcaggtacacaactggtcataattcctgtctgtgtaattcgatgtatatttttccaaacatgtagctattgtttgctttgatttttgcttggcctcctttatgatgtgcatgtccttgaaggctgaatgaacagtccctttcagttcagcagatcaacaggatggagctcttcatgactgtctccagcaataggatgatttactataaatttcatccaactacttgtgatctctctcacctacatcaattatgtatgttaatttcagcaattaaaagaattgattttaatgacaaaaaaaaaaaaaaaaaa

SEQ ID NO: 284126 - DNA, 1000 bp, Homo Sapiens; identical to SEQ ID NO: 220681

SEQ ID NO: 284127 - DNA, 1000 bp, Homo Sapiens
aaccgtgtgactctgcaagcagacacctcgaggcaggtgttctaggcaaagggatgggcatgagcgaaggctccagggtccacagagcagggagtgtggagaaggtggaagagctgagctcagaggcagagaagctccttgcagggagcactgggagatggcctggcccgtcccaggctcctggaggccccacctgccgatcccaggcacttgaccttgttcctgtgggtgacagagatgagaaccagggaagctgtgatccactggccaggacaagtcaacatgggtgagggttgggcaaagggcccttccttcctccccaaccctgtggtctggggccatggcctcaggcttgtgtctatcacaaaagcacaaacttgccctaacccacatgggcctggctgtggggaaagtggggacccaggtccctgagctgtctgctgggctccgtagagcggtggtgggcaggcaccttggcatctgtgcagagacggcccagtctggccaaatcctcttcctctcccctgctctaccttctccggcaccaggcagccccttaaaggaggacaaagtgtgtaaagcccgtctgctgtcttcccccaaatcctcagctcagagccttccgcttccagggccaaccccagccccgtttgctgcgttgtgtaagggcttggggtcttagaagctgctctttagcccagatacacatactcttttttgtctttgtgcaataatcagtgttcctggcagagcctgggccaagctgcagcctactgaggaggcagaggccacctcctccagaaagccctcggcctgggccgccgccgtgactctagcactctcagtcgctgtacagtttctatggtgtgaatgaacttccctcctagttgctgatggcgctggtacctgctggcccatggcccgggtgtagagaaaccaagcggcagccaccaccagtgttgttttgaataaaagcccagaagcctatttaagaaaaaaa

SEQ ID NO: 284128 - DNA, 1000 bp, Homo Sapiens
tggagagcaggccggtggagacccaccaggtccacgagtacctgcgcagcaagctctgctctctctatgagaacgactgcatctttgacaagtttgagtgttgctggaacggttcggatagcgccatcatgaccgggtcctataacaacttcttcaggatgtttgatagagacacgcggagggatgtgaccctggaggcctcgagagagagcagcaaaccgcgcgccagcctcaaaccccggaaggtgtgtacggggggtaagcggaggaaagacgagatcagtgtggacagtctggacttcaacaagaagatcctgcacacagcctggcaccccgtggacaatgtcattgccgtggctgccaccaataacttgtacatattccaggacaaaatcaactagagacgcgaacgtgaggaccaagtcttgtcttgcatagttaagccggacatttttctgtcagagaaaaggcatcattgtccgctccattaagaacagtgacgcacctgctacttcccttcacagacacaggagaaagccgcctccgctggaggcccggtgtggttccgcctcggcgaggcgcgagacaggcgctgctgctcacgtggagacgctctcgaagcagagttgacggacactgctcccaaaaggtcattactcagaataaatgtatttatttcagtccgagccttcctttccaatttatagaccaaaaaattaacatccaagagaaaagttattgtcagataccgctctttctccaactttccctctttctctgccatcacacttgggccttcactgcagcgtggtgtggccaccgtccgtgtcctctcggccttcctccgagtccaggtggactctgtggatgtgtggatgtggcccgagcaggctcaggcggccccactcacccacagcatccgccgccaccccttcgggtgtgagcgctcaataaaaacaacacactataaagtgtttttaaatccaaaaaaaaaaaaaaa

SEQ ID NO: 284129 - DNA, 1000 bp, Homo Sapiens; identical to SEQ ID NO: 115258

SEQ ID NO: 284130 - DNA, 1000 bp, Homo Sapiens
aattgccaggttcttcactgaatattttaacagtgtatgccagggaacacacattctctttcgagaattcagcttcgtccaagccaccccccacaatagggtatcatttttacgggccttctggagatgcttccgaactgtgggcaaaaatggcgatttgctgaccatgaaagaatatcactgtttgctgcaattactgtgtcctgatttcccgctggagctcactcagaaagcagccaggattgtgctcatggacgatgccatggactgcttgatgtctttttcagatttcctctttgccttccagatccagttttactactcagaattcctggacagtgtggctgccatctatgaggacctgctgtcaggcaagaaccccaacacagtgattgtgccgacgtcgtccagtgggcagcaccgccaacgacctgccttgggcggggccggcacgctggagggcgtggaggcgtcgctgttctaccagtgtctggaaaacctgtgtgatcggcacaagtacagctgcccacccccagcacttgtcaaagaggccctcagcaatgttcagagactgaccttctatggattcctcatggctctctcaaagcaccgtggaatcaaccaagccctcggagctttgcctgacaagggggatctgatgcacgacccagcaatggatgaagagctggaacggctggtggtgaggtcgaagctgcaccggacctcacggcagcacagagccaaggagccaggggcctttggctttcagagaagagagaagcaggaggccctggagagagtgtcctcagcttcggtaccgacgccctaccattaccggtgggagcccagagagtgaggccaggggccggcactgggcagggaggcaggatccagaggacactgcttcactcagaccaacagggagccaggccctgcaggggctttattttgacaccactttgtttcaatacaaacagtccagaaaaaaaaaaaaaaaaaa

SEQ ID NO: 284131 - DNA, 1000 bp, Homo Sapiens; identical to SEQ ID NO: 220684

SEQ ID NO: 284132 - DNA, 1000 bp, Homo Sapiens
gtttccttccctctttccttccttcctcctggtctgttccaaaaactctgaatcatctacattttaaggtattttacctcaaaaatgaatcattgtgttaggattctaattctttataaagaacttcatgggcttcaataatgtctagaaagtaaaataaagaggaatgttaccatccccagctgcccttatttccagagaaccagacgtttgtttcccagttggaaagaagacagttgagcacttcaggatggtttttaaatttggtatgagattctctgccaacaccaagctctgagttaactgtgctttcttctcctggccctgacagagcactacagcatcaaagtaaatctttggggacagtgtagcccatctgcatcctatttaatttcttcccttctccccaccagtgttgtcacagggctatgttgcttaaaggtagtctggctgctgaatccctttctcagctcagagcagttttaagatttaattgggaatacagagaaacaggattgtttgagaaccaaaatcaagaggaacagaaatcttaacttgatttcatgtgttagaacattgtaccatgcctcttctgtatctgtggaagtttcctgtttgacacagggtatctaggaggggcggggaagacatggatagtataggaagacattaatcctagcattgtcatttatatacattaatgaaatcctgatgaggacctgctttttgtttgttttcctttgaaacccagccctattgtatttgtatttaaaatttgtacacatttgtataataatctgtaccttgtggtatttggtactattagaggaaaaactttggattcagaccttcttgcagtttttatatcattgttttattttgttttttaaataaattctagtggtttgatccaaatcccattacagttgtataaagaaataaaattttgtacttatattattaaaaatcacatttttaatatttgtaaaaaaaaaaaaaa

SEQ ID NO: 284133 - DNA, 1000 bp, Homo Sapiens
gactgagccttgaactcctaccacctcaatccctttcttccctcagccatctggggtatatccctctagagctacactactgccaatgccttcatactgagttctgggcccctctgcaaataagtctgagaagccccttctctccttcctttatcgtggcctatgctgcagaatctcactgcagctggcaaaaggcattggccagctctcagaaatccctttactcaacgttgaagctgcattttggtcaatgtgggtaacttactttagaaaatgacttgagtttaggtctcccccacccatatttaatttttcccaagttgctggtagaagagaaatttaaaagtggatcaatcctcacagagagagttctttttgttgttgtttattgaaaaaaatgcaatacaagaagcaagaccaaacagatatctaaacactacaaccacttctactacgaaaggccaaaacagcagacttgattattgcctgtgtagtctaaagattctgccaatctgattctgctgcccgagttcctattttttcaagaaatgtaaacaactacttgatatgattcataattttaaaaaaatttacaaagctccttcatttttgtcaccaaaataatacatttgagagagatttgtagaaacaaccagcctggggctgagatcctgggcagaaatttcccgtgagcatcaaaaggcgtcagtcaggccgcagctctggctccagttcccgaggtttgttgtctcctcacccccagctgccaagcatccccccaacacacactgatgggcccagcggtggaggggggggtggggacggggatgggtcacggggccctgacgggtcccgcagttaggctccctgagccctcggcttataaatacaggtcttgctttgtgggtgggtgccagagtcctcatgtggcttggaggaaatctttatttctcaaattaaaataaaattgcagcgagaaaaaaaaaaaaaaaaaaaaaaa

SEQ ID NO: 284134 - DNA, 1000 bp, Homo Sapiens; identical to SEQ ID NO: 115259

SEQ ID NO: 284135 - DNA, 1000 bp, Homo Sapiens; identical to SEQ ID NO: 220685

SEQ ID NO: 284136 - DNA, 1000 bp, Homo Sapiens; identical to SEQ ID NO: 115260

SEQ ID NO: 284137 - DNA, 1000 bp, Homo Sapiens; identical to SEQ ID NO: 115261

SEQ ID NO: 284138 - DNA, 898 bp, Homo Sapiens; identical to SEQ ID NO: 56814

SEQ ID NO: 284139 - DNA, 1000 bp, Homo Sapiens
tactgtaatgagacaagcctttcttctgtcactgcagaatttagaaggggccgtgagcagtcttcccaagcatggtccaggagcagctcagagagggtggagtgaggatgcatgcatccagggaacaggcatcaagaagccagggccgtgcctggagcactgcagagatgactttggagaaagcaaagcagtgacccagtgaccaggcacattactcgtgagcgaggtattcccagtcttcctgctaagcctaatccaagccttacccagctgtgctactgtcatttgcaaagcaaggaaatactactactggtaataaaactacactagcaagatgtcagataagaaataggtttatatttaccttcctgcgatgtggggttggtgcttgaagataaatgtgctgtttctagtttcttaaatagcccacacccctggatgcaaaaaggcagggttatttttacccatgagcatcctgtgcaggcaatagacttccctcactgtctccgcctgcagggaggagaatgtaccccactgcacctgagctcctggtccctcagccaagacctcaggggtccccagccagcctgctgctggggacccctgtgcttgctgcagtgtatggagcctcttgccttcccctggggaggcacccctgtaccccagcttccttcccctggccttttctggccccagtgctcctcctttacatagacttgttcacacagaaacgtgcacgcccccttttctccgccacttcaccagtttctgaaatccaacctcccagacttcacaggaagatagatattcttgagataatgaaaagtgatatcttcgcatacgaaaggaaaaaaggttgaggtatatatgatttttaactgtattaggggtgtatgaaccagtttaaaaacgaggttttatttactgtagagatgaatgcaaatcagaaccaatgatcccttggcctacttagttaaaaccagttcatacatcccttagg

SEQ ID NO: 284140 - DNA, 1000 bp, Homo Sapiens; identical to SEQ ID NO: 115262

SEQ ID NO: 284141 - DNA, 1000 bp, Homo Sapiens; identical to SEQ ID NO: 115264

SEQ ID NO: 284142 - DNA, 1000 bp, Homo Sapiens
tgtggagcagtgccttcagcgcaacccggatgccaggcccagtgccagcaccctcctgaaccactctttcttcaagcagatcaagcgacgtgcctcagaggctttgcccgaattgcttcgtcctgtcacccccatcaccaattttgagggcagccagtctcaggaccacagtggaatctttggcctggtaacaaacctggaagagctggaggtggacgattgggagttctgagcctctgcaaactgtgcgcattctccagccagggatgcagaggccacccagaggcccttcctgagggccggccacattcccgccctcctgggcagattgggtagaaaggacattcttccaggaaagttgactgctgactgattgggaaagaaaatcctggagagacacttcactgctccaaggcttttgagacacaagggaatctcaacaaccagggatcaggagggtccaaagccgacattcccagtcctgtgagctcaggtgacctcctccgcagaagagagatgctgctctggccctgggagctgaattccaagcccagggtttggctccttaaacccgaggaccgccacctcttcccagtgcttgcgaccagcctcattctatttaactttgctctcagatgcctcagatgctataggtcagtgaaagggcaagtagtaagctgcctgcctcccttccctcagacctctccctcataattccagagaagggcatttctgtctttttaagcacagactaaggctggaacagtccatccttatccctcttctggcttgggccctgacacctaagtctttcccacggtttatgtgtgtgcctcattcctttcccaccaagaatccatcttagcgcctcctgccagctgccctggtgctttctccaagggccatcagtgtcttgcctagcttgagggcttaagtccttatgctgtgttagtttcgttgtcagaacaaattaaaattttcagagacgctgctggaaaaa

SEQ ID NO: 284143 - DNA, 1000 bp, Homo Sapiens; identical to SEQ ID NO: 115265

SEQ ID NO: 284144 - DNA, 1000 bp, Homo Sapiens; identical to SEQ ID NO: 220688

SEQ ID NO: 284145 - DNA, 1000 bp, Homo Sapiens; identical to SEQ ID NO: 115266

SEQ ID NO: 284146 - DNA, 1000 bp, Homo Sapiens; identical to SEQ ID NO: 220689

SEQ ID NO: 284147 - DNA, 1000 bp, Homo Sapiens
cagcaggtgaggcaggtgctcctcacacccagacctgggcatcttcattgagggaaagaaaacagtcattgtgcaaaattctgttagtcagtgattctttacttgcaaattcaggggcttagaaaatgaaagcaaacacaaaaccttgagtgtgctttgggaaccaaatggaccttctgggacaagctgagcaagctgtatgaacgccacgtttgtgaagagctgagggtatcaggagggccgacgctgtgttggcatgcgcagtaggggatgagggttagccatagtattctttgcaaatgtgaaagcgagacattatatcttctcttgcttggtgtaactaatcactgttaatttcaggaaacagaactcattaaaactccttagcaaaccaggtctacatcctgttttgtttgctgagtgaggttagtgggagtggtcaaattggtactcttggaggaagaaaaactgtccttccttctccaaaaaaggaaaaattataataatataaatgacaaaaataaaagaattctgtttcctggaataagcatttcttattcctagttgtagggactcctatttttaccttccgttacagtgttgattcataagaaatattgttacatttgagataacttcatctgtatggggtatttatttgcaatgatgtctgagtactgtattttttctgtgcattaccttagtgtcagaatgttggtctttattttaaagtcatatgcatgttctcctgccaaggaacctttacacagacccaaacaaaaaaataataatcaaatgccttcaatttctgagaaaatgaggcagagcatggaaaaggaataggaaggagaaattaattgagattttcaggacacagacatatgatgtgaatgcctacaaagccagtgcgcataggaacagtgggcctgggtaaagagtcacattggtaggaccaataaagaataataaaaagacaaagcacaaaaaaaaaaaaaaaaaa

SEQ ID NO: 284148 - DNA, 1000 bp, Homo Sapiens; identical to SEQ ID NO: 220690

SEQ ID NO: 284149 - DNA, 1000 bp, Homo Sapiens
atatggagcgcctgctctgtactcgacccggcactgggtaccggaagaaccagacagctcggtttttgccaccatttataagtctgtgtccttttcttgagtactgaaccgagatacagttttaaatgtgctgtgcggtctctgagcagcgactcacctgtgcagatcaaatgatgccgtttggaaaaatttcccagcagttgtgtggcgtaaagaaactcccatggtcatgtgactccagatacttctggggctggttgaatgcagtgtttaataaggtggattatgatcgcatcagggatgttggccctgacagggcggcatccgagtggttgctgcgctgtggggccatggtgcgctaccatggccaggagaggtggcagaaggactacaaccaccttccaacaggccctctggacaaatacaagattcaggcgatcgacgccaccgactcttgtatcatgagcattggatttgatcacatggagggcctagagcatgttgaaaaaataaggctgtgcaagtgtcattatatcgaggatgactgtttgctgagacttagtcaacttgaaaatttacaaaaaaccatattggaaatggaaataatatcctgtgggaatatcacagacaaaggcatcattgctttgcgtcatttaagaaacctcaaatatttgttgttaagtgatcttcctggagtaagagaaaaagaaaatcttgtccaagcctttaagacagcactgccttctctggaactaaaattacaattgaagtaaaataatgtgtcttatttcagtataaaggatcatttgaaactgttgattccaaacatcaactaatattatatagtcatcagtagaattataaggatgccatatcatgacattttagaagtggagagtgcatcatatgtagaaaataaatattcagacgtggctcattaatgttactaagttggaagtgagaatttatgaacattaattcattttaagaaaagtgcagc

SEQ ID NO: 284150 - DNA, 1000 bp, Homo Sapiens; identical to SEQ ID NO: 220691

SEQ ID NO: 284151 - DNA, 1000 bp, Homo Sapiens; identical to SEQ ID NO: 220692

SEQ ID NO: 284152 - DNA, 1000 bp, Homo Sapiens
caaggcccccctggcggccacggccaggaggtgccgccgctgccgctgtcccaactgccaggcggcgggcggcgcccccgaggcggagccggggaagaagaagcagcacgtgtgccacgtgccgggctgcggcaaggtgtacgggaagacgtcgcacctgaaggcgcacctgcgctggcacacgggcgagcgacccttcgtgtgcaactggctcttctgcgggaagagcttcacgcgctcggacgagctgcagcggcacctgcggactcacacgggcgagaagcgctttgcctgtcccgagtgcggcaagcgcttcatgcgcagcgaccacctcgcgaagcacgtcaagactcaccagaataagaagctcaaagtcgctgaggccggggttaagcgggaggacgcgcgggacctgtgagccctcccggaggtggacccccttcccagcacctctgcgagagatccggggacctgtgggcagctggcggaggggagactcagcagacggaccctctccgttgcctgcctcccaaaatggagccaggcttccaacttccgctgccttcggacatgggacccagttcccaggagcggggaggtagggttggggctggggcatttggattgtaattgggagctctgccgtacgccagggcggttccaaactctaaaccgttcccaccgtcagggagacctacagtttcgggggaccaccctgggctggccttgtatataggaaatgctgctgaactgaatagaaaggaacttgggagatttgaaacagtgctcgggttttcgctaggaccggtttgggctttgtacaggttatttaatagctttgttaaagataattataataattataacattaataaaaatgttgcttttgtcttcagctccatgcagagctacagcatgatatgtctctgtaaagtgatcagcagttgcagcgtgaaaataaatactttaactcaggggtcactacaggaagaccccgttg

SEQ ID NO: 284153 - DNA, 1000 bp, Homo Sapiens
gtcaccgccttgctcaacacctgggcccagagcgtccaccaggcctgcctctcagccgcctagccaagactgcagggatggcccgcagcctcatcggggccaaggacacacgcctcctgtcagacacttctaggtgttggcttccttagagagcctggggttaggttagctttcctgcttttatcttctgccttggggacctgccaaacgaaatcccacacctgtacagaactgggataggcgcagtggagcgggttgcttggggggcgttggccgacttcttagagaaggccctccatgtgacttcctcccaggagccagatgcgatcctcaggctgctctcaccgtggcctgtccacggtccaggtccatctcagcagcgtgagggtgcactcagggtgttgttagagcgtctcgtgtgtgctagacgcacccctactcgttcctatagaacacagaggacataggaaacccttaaaacacacatgggattctctggtcacagttttgggttcaggctatgctgctttgggcaggtggagcaccccccgaggaagcctgcaagtccagggcacaggctgccttttggagggagggctggcccataggtgctgctggctccccgccaccagctgggcctcagccctcacggcattcctgctgagcaccgtggggcacccagggagcaggggcgtcagggatcctgctgccggcacccctgtgccgctggcatgagggccgtgtccccactgtgaaggatgaagagcaaggccctcaggacccgtgtcctcagagcaccacacactgagcacccagagacagcgggcctggcagcgggccgggccatgcagggagcgcctccctatgttgcctgccactctgggcaccggccagcaccctctggtgagaagaggtcccccctttttatgtgcactaccccaccatctgtgattataataaatttattattcctgtgtttgtcagttgttcaaaaaaaaaa

SEQ ID NO: 284154 - DNA, 1000 bp, Homo Sapiens
tacaaggtgatacagacctacttagaacagactggcagcaaccacaggtgccctacacttcaacacatctggaaagtaaaccaagaaggggaggaagacagattccaggcccactccaaactgggtaatcggaagctgctgtggcatggcaccaacatggccgtggtggccgccatcctcactagtgggctccgcatcatgccacattctggtgggcgtgttggcaagggcatctactttgcctcagagaacagcaagtcagctggatatgttattggcatgaagtgtggggcccaccatgtcggctacatgttcctgggtgaggtggccctgggcagagagcaccatatcaacacggacaaccccagcttgaagagcccacctcctggcttcgacagtgtcattgcccgaggccacaccgagcctgatccgacccaggacactgagttggagctggatggccagcaagtggtggtgccccagggccagcctgtgccctgcccagagttcagcagctccacattctcccagagcgagtacctcatctaccaggagagccagtgtcgcctgcgctacctgctggaggtccacctctgagtgcccgccctgtcccccggggtcctgcaaggctggactgtgatcttcaatcatcctgcccatctctggtacccctatatcactcctttttttcaagaatacaatacgttgttgttaactatagtcaccatgctgtacaagatccctgaacttatgcctcctaactgaaattttgtattctttgacacatctgcccagtccctctcctcccagcccatggtaaccagcatttgactctttacttgtataagggcagcttttataggttccacatgtaagtgagatcatgcagtgtttgtctttctgtgcctggcttatttcactcagcataatgtgcaccgggttcacccatgttttcataaatgacaagatttcctccttttttaaaaaaaaaaaaaaaaaa

SEQ ID NO: 284155 - DNA, 1000 bp, Homo Sapiens; identical to SEQ ID NO: 220693

SEQ ID NO: 284156 - DNA, 1000 bp, Homo Sapiens
catggaggtcagcgccacagaactcatgaacattctcaataaggttgtgacacgacaccctgatctgaagactgatggttttggcattgacacatgtcgcagcatggtggccgtgatggatagcgacaccacaggcaagctgggctttgaggaattcaagtacttgtggaacaacatcaaaaggtggcaggccatatacaaacagttcgacactgaccgatcagggaccatttgcagtagtgaactcccaggtgcctttgaggcagcagggttccacctgaatgagcatctctataacatgatcatccgacgctactcagatgaaagtgggaacatggattttgacaacttcatcagctgcttggtcaggctggacgccatgttccgtgccttcaaatctcttgacaaagatggcactggacaaatccaggtgaacatccaggagtggctgcagctgactatgtattcctgaactggagccccagacccgccccctcactgccttgctataggagtcacctggagcctcggtctctcccagggccgatcctgtctgcagtcacatctttgtggggcctgctgacccacaagcttttgttctctcagtacttgttacccagcttctcaacatccagggcccaatttgccctgcctggagttccccctggctctaggacactctaacaagctctgtccacgggtctccccattcccaccaggccctgcacacacccactccgtaacctctcccctgtacctgtgccaagcctagcacttgtgatgcctccatgccccgagggccctctctcagttctgggaggatgactccagtccctgcacgccctggcacacccttcacggttgctacccaggcggccaagctccagaccgtgccagacccaggtgccccagtgcctttgtctatattctgctcccagcctgccaggcccaggaggaaataaacatgccccagttgctgatctctaaaaaaaaaaaaaaa

SEQ ID NO: 284157 - DNA, 482 bp, Homo Sapiens
ttccttttcctccctgtcgccaccgaggtcgcacgcgtgagacttctccgccgcctccgccgcagacgccgccgcgatgcgctacgtcgcctcctacctgctggctgccctagggggcaactcctcccccagcgccaaggacatcaagaagatcttggacagcgtgggtatcgaggcggacgacgaccggctcaacaaggttatcagtgagctgaatggaaaaaacattgaagacgtcattgcccagggtattggcaagcttgccagtgtacctgctggtggggctgtagccgtctctgctgccccaggctctgcagcccctgctgctggttctgcccctgctgcagcagaggagaagaaagatgagaagaaggaggagtctgaagagtcagatgatgacatgggatttggcctttttgattaaattcctgctcccctgcaaataaagcctttttacacatctcaaaaaaaaaaaaaaaaaa

SEQ ID NO: 284158 - DNA, 1000 bp, Homo Sapiens; identical to SEQ ID NO: 115267

SEQ ID NO: 284159 - DNA, 1000 bp, Homo Sapiens
tcaagcaattcatccccctcagcctcccaaagtgctaggattacaggtcatggcctcacaccactgttacttggtgtacatgagcaaaaacagcaagtggtgaaatttttaatcaagaaaaaagcaaatttaaatgcactggatagatatggaagaactgctctcatacttgctgtatgttgtggatcggcaagtatagtcagccttctacttgagcaaaacattgatgtatcttctcaagatctatctggacagacggccagagagtatgctgtttctagtcatcataatgtaatttgccagttactttctgactacaaagaaaaacagatgctaaaagtctcttctgaaaacagcaatccagaacaagacttaaagctgacatcagaggaagagtcacaaaggcttaaaggaagtgaaaatagccagccagaggaaatgtctcaagaaccagaaataaataagggtggtgatagaaaggttgaagaagaaatgaagaagcacggaagtactcatatgggattcccagaaaacctgactaacggtgccactgctgacaatggtgatgatggattaattccaccaaggaaaagcagaacacctgaaagccagcaatttcctgacactgagaatgaacagtatcacagtgatgaacaaaatgatactcagaagcaactttctgaagaacagaacactggaatattacaagatgagattctgattcatgaagaaaagcagatagaagtggctgaaaatgaattctgagctttctcttagttataagaaagaaaaagacctcttgcatgaaaatagtacgttgcaggaagaaattgtcatgctaagactggaactagacataatgaaacatcagagccagctaagagaaaagaaatatttggaggaaattgaaagtgtggaaaaaaagaatgatgatcttttaaagggtctacaactgaatgagctcaccatggatgatgatactgccgtgctcgtcattgac

SEQ ID NO: 284160 - DNA, 924 bp, Homo Sapiens
atgggccaacacaatctaacagtgctaactgaattcattctgatggaactcacaaggcggcctgagctgcagattcccctttttggagtcttcctcgtcatctacctaatcacagtggtgggcaacctaactatgatcattttgaccaaactggactcccacttacatacacctatgtacttttctatcagacatttggcttctgttgatcttggtaattctactgtcatttgtcccaaggtgctggcaaattttgttgtggatcgaaatactatttcctattatgcatgtgctgcacagctggcattcttccttatgttcattatcagtgaatttttcatcctgtcagccatggcctatgaccgctatgtggccatttgtaaccctctgctctattatgttattatgtctcagcgactgtgtcatgtactggtgggcattcaatatctctacagcacatttcaggctctgatgttcactattaagatttttacattgaccttctgtggctctaatgtcatcagtcatttttactgtgatgatgttcctttgctacctatgctttgctcaaatgcacaggaaatagaattgttgagcatactattttctgtatttaatttgatctcctcctttctgatagtcttagtgtcctacatgttgattttgttagctatatgtcaaatgcattctgcagagggcaggaaaaaggctttctccacatgtggttcccatttgacagtggtggttgtgttctatgggtctctactcttcatgtacatgcagcccaattccactcacttctttgatactgataaaatggcttctgtgttttacactttagtaatccccatgcttaaccctttgatttacagcttaagaaacgaagaggtgaaaaatgccttctataagctctttgagaattga

SEQ ID NO: 284161 - DNA, 1000 bp, Homo Sapiens
gaataccttcctacgttatgggtcaagctttacaaaagcgaaaacctcgacaatccaatccagacagtttcccttggccagtccctgttcttccatttccccccactgctcagagatggcgagaactatgttgtgcttctggactccacactccccagatcccagtatgactacatcttgcctcaagtttctttcaccgcagtgggctaccataaacacatcaccttgatttttaatcccacgaggaagctgcctgaacaggacatcgcacaaggatcctacattgccctgccattgacgctgctggttctgctggccggttacaaccatgacaagctcattcctttgctgctgcagttgacaagccggctacagggagtcggcgcgctcggccaggcagcctctgacaatagcggcccagaagatgcaaagagacaagccaagaaacagaagacaaggcggacgtgaggaggaaggggacagttgcagtctcacttgggacaggccacagccaggggtccggccactacccgcccgtgggataaaagccaaaagcatgcgtcagctaacttcagcctgtgctgctgggcccgcaccccatgtcccttgtcactgtggcatcctgcacccatcctcacccctccgtagagcccctcgtgcaatgcaatgaatggaccctcctgtcactctgctgaacagaatttattttctgagtcaaatataatttattattatttttgtcaaagaagtatttaagctgtgctgtggtgtgagaatgtcattcttgatcttcagccttcgtttgcaagaagagttccagttgatgtggtgtttggttccatggcggggtaccctagggattcatctgttttcttcacttccctttgcatctgagatcctgctggaaaccacggcaacctgtatccactattaggaggtaaaaatcaataaaatggcccattcatttgtgttgtagctcaaaaaaaaaaaaaaaaaaaaa

SEQ ID NO: 284162 - DNA, 1000 bp, Homo Sapiens
gccaccccgtgaactttgttctgcctgccacaatgaacgcctggatgtgcccgtgtgggacgtggaagccaccctcaacttcctcaaggcccacttctccccaagcaacatcatcctggacttccctgcagctgggtcagctgcccggagggatgtgcagaatgtggcagccgccccagagctggcgatgggagccctggagctggaaagccggaattcaactctggaccctgggaagcctgagatgatgaagtcccccacaaacaccaccccacatgtgccggctgagggacctgagcttatttgaagtcctgcctcattctcactggagcctcagtctctcctgcttggtcttggccctcaactggggcaagtgaagccagaggagggtcccccagctgggtgggctggaatggaactcctcactagctgctggggctccgcccaccctgctcccttccggacaatgaagaagcctttgcaccctgggaggaaggaccaccccgggccctctatgcctggccagcctccagctcctcagacctcctgggtggggtttggcttcagggtggggtttggaagcttctggaagtcgtgctggtctcccaggtgaggcaagccatggttgctgggctgtagggtgagtggcttgcttggtgggacctgacgagttggtggcatgggaaggatgtgggtctctagtgccttgccctggcttagctgcaggagaagatggctgctttcacttccccccattgagctctgctccctctgagcctggtcttttgtccttttttattttggtctccaagatgaatgctcatctttggagggtgccaggtagaagctagggaggggagtgtcttctctctccaggtttcaccttccagtgtgcagaagttagaagggtctggcgggggcagtgccttacacatgcttgattcccacgctaccccctgccttgggaggtgtgtggaataaattatttttgttaaggcaa

SEQ ID NO: 284163 - DNA, 1000 bp, Homo Sapiens; identical to SEQ ID NO: 220397

SEQ ID NO: 284164 - DNA, 1000 bp, Homo Sapiens
gccggaagttaaaaagaaaaaagaagaacaaaggaaaagggtgatcttacaaagtaacagactccgtgccgaagtcttcaaaaagcaattactggaccagctccttcaaaggaatgcggtctaaccacaggctgccctgctgaccacactacctggacctgggaggacttcgaatgctggataagccattaaacttagcattatcttcatcatgggaaaacacttattttactttcgattttttttttccataaaggaaaacatcacttcctgaattactgacccaagccaaacagaaacaataaccctcgagaaaataggtcaacaatctgttgtggggaaaccacctccatgtaacccactggatacagtccccttaatgtttttgcttctaaattgtaccttttgcttctgatttcttctcccctgctgtttcctgcccatcagagaggcctgatacaagcaagtttgtttacatccctggggaatcttttacatcaaacttttgggatccaaatccatctccttttaaatttcaatctcagcacctgccagttatgcaaatgccaaaatgtgggtcatcatatagtatatttgaaacctttctgaacatgtacaccacccaatgctagaggctgacttggaaaccggtgggtgcaatgcccgaggctgtggaacaatcagcccatctctttgtgacctggagcagtcagagggccctcagtcaccccgccccattcctcaccagagaaaagaatccatttctatggaagctctgacgtaacttcagtgttttctacaatactcctcctgccccgccccattaaaacagttcttttgttaagaaatagcctaatggtccaactttgctgtctgttcttccaaatgtttataatacacattatttataaatatgtctgtttgggaagctaagaacaagctagtttttacaacacaaatggaaataaatgcaattattataaaaaaaaaaaaaaaaaaa

SEQ ID NO: 284165 - DNA, 1000 bp, Homo Sapiens
atcttacagaagcagtggaaactgcatcttcagaaggtctacatgtgaatgcagagattgaagttcttcaacaggcattattatatatgaaaacaatgcaagagaaacgtgaaacactacagaaggatcaggagaagttggaagaagaactagtaaacctcaaaagtcacatggaaatgaatatgttagaatgtggtcaattggaacactataaacaggaggtagaagaaagagcaaggcaggagatagcagaacaattagaaaacattggtctacttttacagtcacagaaaatagctcatgaccagttacagttaaaagaggaaagcaatgctactatgaaaagtcagatggaacttagaattaaagatctggaattcaaactctacaaagcaagaacttcacaagcggactgtaatacaacagaattggaaaaatataaggagctgtatctagaagaattaaaacttagagaatctttgtcagatgaactaaacaagcgtaaagaaattctagcagatgtcagtaccaaacttcttcaagaaaaagagtggagcagatctttatttacttctcatactacaaggccagtcctagagtcagcatgcaatggaaatcttaatgaaaatttaggtctcagcagaatacatattccaagagaagccttaagaattcctaccttaaactcattgtcttcaaatatcagaatggagagcgacttgtcaaaggaagacaagaatggaggacactttctggaactccaggcttgacaacatctctcggtgttgtgactcgcatcctgttgtgagcagttatggtgccagggatcaccaggtgggtccactattccaaggtaaagctgtatgactcatctctggcagaggaagtcgtaaaggtcccactggacacctggaccactgagcccctccagggtctcaaactcctcttcaagcaaagccaaaagaataaagataagtaaattagaaaaaaaaaaaaaaaa

SEQ ID NO: 284166 - DNA, 1000 bp, Homo Sapiens; identical to SEQ ID NO: 220696

SEQ ID NO: 284167 - DNA, 1000 bp, Homo Sapiens; identical to SEQ ID NO: 220697

SEQ ID NO: 284168 - DNA, 1000 bp, Homo Sapiens; identical to SEQ ID NO: 220699

SEQ ID NO: 284169 - DNA, 1000 bp, Homo Sapiens
acaaatctgccactcaagcctaaataagtgcattccagaagagccgcagcccctctaacagctcctgaggtgagggaaaccctagggatgggaagttggagcagaaagagatggtggcctgaagtcaactgcagtgaaaatctctccccatcagcaagttttgcaaagctatggccacagggacacatgactggggcccctcctagtcttggaaggagcccccatggaaatgagggcctcacagtgaatccacctctgatcctacttcacctgcagtcaaatgagaagagatttcaatcagctaaagacaccctatcccctctccccgacccctgcgaccccaggtgatccgccccaccttggcctccctaagtgctgggattacaggcgtaagccaccacacctggccctgggggtcatatatcttaaatcaaggtatcaacaggaccaagctccccaaaagctccaggaaaggatacttcttggcctctcttctggcttctggtggctgcagcaatccttggggttccttggcttatggatgcatcactccgtactctgcttccgtcctcacttgaccttctcacctaccttcctttacgtcatcttccttctgagatgctctgtgtccaaattttcttctttgtaaaaggatgccagtcattggatcagagaccaccttaatccaggatgacttcatcttaactaaattacatctgcaaagattctatttctaaataaacccacattctgaggttctgggtgggcatgctatttggcaggacaaagtcaacacaggacactcattttcaggattgatcgcatggtttgaggaagctgatggtgacatctcttcttaaatctgttttcaggaaaatcatactggtagccttcaagtggccatggtgggagcattgacccagggaaatccacatttcccaacacatgctggatacctgaggactccagagctactatctgctcatatctgctcaacatt

SEQ ID NO: 284170 - DNA, 1000 bp, Homo Sapiens
gaagatgtatttatggtaaaaaagttatgaaggaaagaaatgttatatgagagaggatcttgtatggcaaattcttgtcctaaagtagaatgactaattatgaaagagggaaatacaggaaaagtcagaaagttcatgtcatagatggtctgtggaagttgtgctagggttcataaaatgagaaagaaaaacttacaactgctagatcttctcctgtctaggagtgttgtgtatgtgatggatatgtaaaggagccctaattacttggcttagaagaaaaggacggctcttaaatattttgtcagaaaaatagaatctccaatgccttttatttcacatgacttcagtaatctttgggaaataaagacagtgttaaaatcattggtaaaaaaaatcatcaaaatttatccattttgtctaatttaagtcagaggttaaattttagaagtgctttaacgtcataaattgattgactttggaaaattgttctgtttacctggtttggagctgctcaacttctaggtaaggcctgggggacaggtggagttagccatgtctcctagctatgctggaaagagtcagactttacctgcagttctgtcttgtatcctatacactgcacctggtacgttattaaaacttcctgctgcttctaatctctgagttccactttaaatttttccatcacttgaatactatcctctgtactaaatttttccgcaattaaatacttagaatcatttttgcccacttgacccaagcattagtgatatatctttaaaatacttataatgtgtcacaatatatttagcaaatgtagcgaatggcatttttacttttgtcagcatttacatagcatttagcaatgctatctcaagtatttttagtcatttgaatgttacataatatgcttttcctttgtttctatgtaaataaataggagatattcaataaatagtatcaattaaaaaaaaaaaaaaaaagaaaaaaaaaaaaaaaa

SEQ ID NO: 284171 - DNA, 1000 bp, Homo Sapiens; identical to SEQ ID NO: 115268

SEQ ID NO: 284172 - DNA, 1000 bp, Homo Sapiens; identical to SEQ ID NO: 115269

SEQ ID NO: 284173 - DNA, 1000 bp, Homo Sapiens
actgaagaatctaattcaaaggaaaaagaaattgaaaatcttaaaaatttggttgcagaatttgaatctcgcttgaagaaggaaattgacagtaatgattcagtttcagaaaacttgaggaaggaaatggaacagaagtcggatgaactgaaaagagtaatgctggctcaaacacaactgatagagcaatttaaccagtcccaggaagagaatacttttcttcaggagacagtgcgtagagaatgtgaagaacgctttgaactgacagaggctttgagtcaagccagagaacagctcctggagctcagtaagcttcgtggaagtttaccattctcaccgtgttccctcagcaagggcagcctaacctcccctgctgcagcagtcagtaatcatggagagagaagccttgcaagactgaactctgaaaaaggaatccaaattcccaacctgcgcggggtgtcaaaacccaccactttcccaacctcagataagccgaagagggttagatcaggcgtgcccattctcccccagccacatcctcccaggggtggagcatcttcagcaaatgagactagacagagactggctgccattcttaggagaaggcggagtcagcaatgatccaaaatgaggagcaggaagctccctacagcgtgcacgctctttcagagagtgccaggaattcactgtaactgagaatgacaatgataaaattattttcacagatcaggaaggcatacctatagatgtatttaacaaaagactgtaaaaagctggaaaattgtgaagccttatttttcaagagggttttgatagagtaacagatcattaagttgttggtattccagaggtccgatttctatgtttatgttggaatgtgctctatgaatatagccttttagagatcacaggtaaaatttttcacccataacatcttttcaatttcttgcgccactacaagcagatatatttccacaaaaaaatagattgtttgagattt

SEQ ID NO: 284174 - DNA, 1000 bp, Homo Sapiens
cggccccaagttactgctggttgtatttagtttgtgaataggagcccataagtgttaatagactttgtaacattcactataagatgaattatacaggacatgggaaatctcattaagtcttaaagttaatttaaattaatttatctgttttctctaagaaatgtttatcataaaatatatatgtgtatttcccctttggttataaaatttgggaaagtatgtacaagtgcagctgcactgactttaattttctagatgtcttaatgagatttatttgttttagagaagaacatcttgttaaaagcatcaaactctgtcttacatagctgtcaacagcctctttaagatgtggtggttgtatgatctgtgtcttaattgttcagttagagtgagaagttgacctatgattcatttttaaattttatatttggaacaaagctgcaagttatggtaaagtactgtactgtgagaagtattatgatatttaatgcatctgtggcttaacacttgtgagagttaccagcttgaaaatgatggtgttgactacctcttgaatcacatctatcaaccactggcacctaccaccaagctggcttcaattagtatgtgttgctttttggtattaacaactaaccgtactagagaccaaagtgaaccctgatttttatatgtctttaataatggtgttttatctagtgtttttaaattatcctgtgtagtatttagattacctcattgtccattttgactcatgttgtttacaagtgaaaataaaaacacttgaactgtatgtttttaaaagacaaaaaaggggtagatgtttggaatgcgtttcactcgcatgcagtcatctggagggactgaagcactgtttgcctttctgtacactctgggttttatattctcatttcatgcctaatgtcttattctgtcaattatggatatgttgaggtttaaaaaaattacttgattaaaaataaaacatataacgttggcattt

SEQ ID NO: 284175 - DNA, 1000 bp, Homo Sapiens
tattatatcagcccagaaatagtgattttatgatctgtctaccggggaatgaactaacgttcatagaagtatagtaattgttcgaggtcttgcagttttaagtagtaaagttgccattggatcacaaaagctgtattcttccccctacacctatggtttccaaatgtgagcatcagaattaatttgggagatgtttttaaatagagatttgtaacatcacctcttccaccatcatttgctagggccaactgggtcttttaataatgtgtcaggcactccaacttcttgatgttcaatattgacattctggcccaccctgcacccgctatatccaaagatctagtattccaaagctctccaggtgattccagtgacacagacacacgtttggactgtcttgtactatgctatgcactgttctgctcttttttgaattggaacatgagaattgaggtccatgtaattttgagtttcagtagttttttgctcacattagtctcatttttgtttttcctcttgtagctgccatttatcaaatcgaaattatttcctcagagaaaaaggtttaggtatcctaagactttaaaatctcagtacgtttttttttaaagtatgttgtctcattctattgagaagttatacaacatacaggcttctaggtctagccaggccatctagtttagtcaagacagctgtgtaacaaacgtagccttgaggcctggcacggtggctcatgcctgtaatcccagcacttttgaggctgaggcgggcggattgcctgaggtcgggagttagagaccagcctgtccagcgtggtgaaaccccgtctgtactaaaaatacaaaaaagctagccgagtgtggtggcaggtgcctgtggtcccagctacttgggaggctgaggcgagagaatcacttgagctggggaggcagaggttgcaggggcccgagaccccaccattgcactccagtccgggaaacaagaacgaaactcccatctc

SEQ ID NO: 284176 - DNA, 1000 bp, Homo Sapiens
ggaggcagggcaggtaggggtggcgggcgtgtgaggacaggcttctgcgaaggggctgcagggagagctgactgcggaaggctttgtctctgaagttcctcaaaggtcagtttttaccatcaccctctgggtagcgcagatactccaacaagggacgaggtctccactgaatcccaggaggggttgcaggcacagaggtgatgtcagtggagtttgagagttgggaacaagggcctagagtggccagacgatgcctttgatatggtttggctgtgtccccacccaaatctcatcttgaattgtagctcccataattcccacgtgttgtgggagggacccggtgggaggtgattgaatcatggggcagtttcccctatactgttcccatggtggtgaacaagtctcagcagatctgatggttttataggggtttcccctttcacttgagtctcattctctcttgcctgctgccatggaagacgggcctttcgccttccgccgtgatggtgaggcctcccagctacgtagaactcgccgcggtgcaaccagaaatgcacagacccagccgcccgccgcccagaccctcagacttgcgcgtcacaggacagactccgctgtgccccgtgcacttgccaccagcctttggcctctcgatacacacaacatccaggacttgtgcccttgccccatcacgacagacaaagcgtccctcaaggcccccgcgtggttcagacagacgccgcagccaggatggttgagcaaacaatgtgaaagagatacacagaagcgatgtgaatatttccaaaccgtgcctggaagtcaacggtagcagcgcaataagaaaatggagctgcggcctgtccccggtgtgggcaccgccccttcccctcgggagcctcctcctcacacctcctcccgcctgtcctccctcacacgtcagcctccacactcttgccacctcccttcaacacttcctaaataaaaattacaagaattacat

SEQ ID NO: 284177 - DNA, 1000 bp, Homo Sapiens
tgtatcaaagacccctagtatatgcatttgggtgtccgcagcccttgcctctgtctctgagcagttacctgggatcagagaataaggcagctcttctcttctatccctcagaaggctcttgaaattttgtccctggagcctctctaactggaagtagcagttcatctcatgacaccccacattttattcaggtgagtcctgagttattacacagagacagacacagctgtgctccttttactgcagtccagaagataaaacaccagcatgataaaacagccgaacctgtcagccaccttgcaagcctttcctatattcgattcaatgtacttttcccgaagcaaaatgaaagttctcacagaggggccctcctctgccttgtcctcagaattggaaaatgtattgtccgtgaaggagcctcagtactgaacctaaaactcaagagaaaatgtttcctgaatatcaagtgggatgacttgaaattttgccaaacaggcacaatcttaatacgatcggccttactaaggctaaatggccttatccgtggttgaagttgacaaatcaatatattaaaaaatctccacaagtgattgattttactctgcagccagggtttatgtcaagtgtgaggataatgagcaagaaattcaagcccttggcaaactggttggagaggcaaggactgtgtccaggcagagctcatatcattatttattgtttaatctatttaattaaatatgtaatttacccacaaactgtggctgacattatatgtactcctgagccacattgagatgtactatttgtgctatgaaattctatgggatttgacaaatgcatggtggcagatctccagccattattaaagcgtaacacagaatgcttctcttattcaagctcatcttccctccacatagagggaatcaatcgacttttgtatactgatttttgaatttgcttctttatttccatcttcttcaattaaagcacaagatatcgt

SEQ ID NO: 284178 - DNA, 1000 bp, Homo Sapiens; identical to SEQ ID NO: 115270

SEQ ID NO: 284179 - DNA, 1000 bp, Homo Sapiens
atctctgttcttggttaagttccaagaaccatctaagtttcgtgcccctcagctgtaaaagggaagtacatttcatttgtttattctgtaaaactctcggtgtgtgccatggccatgcactgatgatgagcacatgtgtgcggcccctgcccccgtggagcgcatgcatggtcctccagccagagaccgcgctgggagaaatcaggggttcactcctggtcggaggtgagcatctgcctctgcatgcaggaaggcatctcatgaaaccccaaaggcctggcagcccctgcacatggaaggagtcactctcctccatgtggggtgagccacgctggccttgtggcattcacgtgttccctccacctgcttctccagcgtgaaggggacctcaatgtcctctgatgaccttcttgaagagagacatttccttccttcattggaggctttagacggagccagtgacagctcagctctggctgtttcccatctgtgaaatgggaagagggaggatggcacgagtcccttgccctcaccaaactggccgctagagagaggaaagatgtttccattctgatccccactcacctccaccccatccttccaggcttctgatcctcattgtaattttggagctatttggtgatattgtctttgtccttggatccgaggcttctcctaccaactcattgttttttcaacgtgacaaaataaaagccctgagctgggcgcggtggctcacgcctgtaatcccagcactttgggaggccgaggcaggtggatgacgaggtcaggagttcaagaccagcctgaccaacatggtgaaaccccgtctctactaaaaatacaaaaaattagctgggcatggtggcatgcacctgtaatcccagctactcaggaggctgaggcaggagaatcgcttgaacccgggagccggaggttgcagtgagtcgagatcatgccactgcactccagcctgggcaacaagagtgagactccatct

SEQ ID NO: 284180 - DNA, 616 bp, Homo Sapiens
gggggcccgcttgcacctcggcgatccccgactcccttctttatggcgtcgctcctgtgctgtgggccgaagctggccgcctgcggcatcgtcctcagcgcctggggagtgatcatgttgataatgctcggaatatttttcaatgtccattccgctgtgttgattgaggacgttcccttcacggagaaagattttgagaatggcccccagaacatatacaacctttacgagcaagtcagctacaactgtttcatcgctgcaggcctttacctcctcctcggaggcttctctttctgccaagttcggctcaataagcgcaaggaatacatggtgcgctagggccccggcgcgtttccccgctccagcccctcctctatttaaagactccctgcaccgtgtcacccaggtcgcgtcccacccttgccggcgccctctgtgggactgggtttcccgggcgagagactgaatcccttctcccatctctggcatccggcccccgtggagagggctgaggctggggggctgttccgtctctccacccttcgctgtgtcccgtatctcaataaagagaatctgctctcttcgaaaaaaaaaaaaaaaaaaaaaaaaaaaaaaa

SEQ ID NO: 284181 - DNA, 1000 bp, Homo Sapiens
cttcctcaagcttcacctcttctgtgagcctcctgggtgggctccttctggctaaatcttcctcctcactgttgcctttttatcttatgcaagcacctgccttatctaaaggtacataccttttcatagaacacttgcctgtttacctagctatttccccatgactatgggctttttgagaggtgctgtgttatttatttatttatttatttatcattttgttttgagacggaatcttgctcttgttgctcaggttggagtgcaatggcgcgatcttggctcactgcaacctccgcctcccgggttcaagcgattctcctgcctcagcctcctgagtagctgggattacaggcacccaccaccatgcccagctacttttttttgtatttttagtagagaaagggtttcactatgttggccaggctggtctcgaactcctgacctcaggtgatccacccaccttggcctcccaaagtgttgggatcacaggcgtgagccaccttgcctggccactgtgttatttttttttacttctataccttcagcaccccaaacagtgcccaatacaaagttccacactaaatatttattgatggaataatgaatagggttgggggcactggcagggagggtgcccactgggctgaaattctggggcctgaatgcatcactcccttcgcctctggatgagaaaaaagagggacagtacccatgaggcccctagggaagccttctgcagaccaaaagacctctttgaacagagggcagaggaaacaggtctagagaaagtgaatgtgaagattcaggctttagaatgagccttgcagacctgctggcagtgacaagaattacctgtgtacagcaccttgtggttcccatgaccccatttagatctcatcatgaccctgttgggtggatgttattttctgctttacaggggagagaggccaaactcgtgatatgatctgtctgatatcacttacttaaacagttaagtggt

SEQ ID NO: 284182 - DNA, 1000 bp, Homo Sapiens
acagaacattgttgggaggagtccaggcataaagtgacataaacagcgcagagaatgggaccagcgcacctgagaggtgatcattagcctcagcaactggatgggacattccgaagagctcccagccaacacagatggtcactccagaggctgacatttaaaaggaaggggcccggccgggcacagtggctcacgcctgtaatcacaacactttgggaggctgaggcgggcggatcaactggggtcaggagttcaaaaccagcctggccaacatggtgaaaccgcatctctgctgaaaatacaaaaaattagccaggcatggtggtgggcacctgtaatcccagctactcaggaggctgaggtaggaggatcgcttgaacccaggaagtagaggttgcagtgagccgagattgtgccattgcactccagcctgggcgacaagcgaaacttcgtctcaaaataaataaaagtaaggggcacagggagggggccccagctcgtgccccttctgtgtgggctgcacatggtgacttccttccagagagcacagagtgggaggtaggcaaggcgtctccacagtggagagcccgacccactgtctcagcccagaggtcaaggctggcaccatcaccgagaggtcacacgggcagatgtgacagggcgcttcaccactgggctcttcctcccagacccataacccttgtcttagtattagaaaaacactggcagaccgggcgcagtggcttacacctgtaatcgcagcattttgggaggccgaggtgggaagattgttcaagagcagtctgggcaacatagtgagaccccatctctacaaaaaaaatttttttttaattagccaggcgtgatggcacatgcctgtggtcctagccactagaggctgaggtgggaggatcactggagcccaggaggtcaaggctgcagtgagctgtgatcacaccactgcactccagccttggcgacaaaccaagaccctgtctcg

SEQ ID NO: 284183 - DNA, 1000 bp, Homo Sapiens
ctcaaatgaatagaggggtggagaaaagagtcgtgatccacccgtctcggcctcccaaagtgctgggattacaggtgtgagtcactgcacctggcctttttacaattttgggtgtctatctttggcatgtttcctgttatgtgagcatgacatgctgtgtatgtgagtgagcttgtagggcgtggtgggacttaggcatttgcagacagtgtttagatgaaagattacatgtaatgataaatctgaatccctccattttatttgggtggaaccatgaccaaaaatggtaggaagacgaaaggccagaaagagactttgccagagagttcacggagttttcttaccccgcatgctgactaaagaaaacatgggcttttctgaaaccagcttcaactacagtataaactatatcagaagcttacttgataagccttgcggagctgctctgaggaatagtgtgaattccttccttgccttattgttgactgttaatgaacatgttttgtcatttatctgtttaagtttttcagaaaataaaagtaaatttctgttagcacattttaggattagatttttgtgcttttggctggcttggttcagattcttaactagagtaccatgtactgtctttggaaatcaaatgaggaagaagctcattctcttactctaaaccatgttccaaactattaccagagtccaaccagataagcagaatttgtaaccttacttccttccatagtccttaaactgtactgtattttttcacactcttgcatgattccaaaaggatatcttcctgacctgggttctagtacctcagagcattgttatcagatgctagcttattctaatgtgaggatgtgttaggggaactagtgtgttaagtccaattctgtacaagacatcctttcaagttctgtgtcattcacaacaatcctcacgggtaggtgagttttattttcctcacttaacagatgagaaaaaaaaaaaaaaaaaaaaa

SEQ ID NO: 284184 - DNA, 1000 bp, Homo Sapiens
acgaagagatgcaactgagccgaagttttgaaggctggttgggctagtgggtcatcatgtcactttcagatgactgataaccgctgggactgctggggcttcaccagcacgagctatgcaggttgggggaggccctggctttttcaatgattgacgttgacatcagtcaggagctgggagttgagacctccagggaagtctcgtccggatccatcgctcttctctcaaggagcacagtcctgggaaaggcctagggacctgtgggccggtgatgcgggcactgcagaccaggccaggccctcgggtaaagttctgaggagaggccaaaaccaggcttcaggttcgggaaggtgactgcttgcaactgcagtagcaggaacatgtcaggtgcttactgggtgagacccagccggggaagcctctccaactcctcctagccctggaaaccagacacccagagccccaggctttctcggcacccagaagaagtggggagcgggcaaagcagaaaacattcaatgcatgatgtaggattgctgcgttggcactaagctgttgtattaagcatgagaggtgtttgtttaacgttggcaaagggatttaacaagaaacaaaaagcttcgcgtccttgttttgaccgtcgacagaagtccaattttcttgcctttctttatccccatttctcctccctccccttcccccatcacatccactttcggtcactcgttgttggtatttggtggcagctcttggtcctattgctgtggatgttccactgaaaacacggggggtagcggggagtggtaaggaaagcaacttttttctaatttttgtattggtatccacaagcgtttgtattttttgaattgcaaacactgtgttttctggtctttgggggttagttgaactttctgtattaccttttggaaaacctgagttttaccacagtcttaagcagatttgaaataaattcttttgacactgccaacaacagaaagac

SEQ ID NO: 284185 - DNA, 1000 bp, Homo Sapiens
acacaattaaatattacatagagtatgtttacaacaaatatcctgtcagccaaatggttacccatataaaatgtaatttaggttttgctacttgcatgctaacatttttaatgtattttatgatctatgtcatatattaaaaaagagcttgcttactacaagaaaaatattgaaatattgaaaatattgaaaatattattattgaaaataaaatcttgatctcaactatcccccaaatgcatcctataagtccatcctaatgagaaatgatgttctatttaaggaaaggaaaatattccgggaaggcaaaaaatgcagtgctgtttggaagtgtaatgattttatcacatggtgaatgactactaagagtaatgattatatcacattgtgaatgactacttgccacagtaaaaatacatgaagaatgtgttaggtttaaacgtcgtttctttcttctaaaaaatatttggttagtaccttcactgagcaatagtggaaaaataaaaaaataagtaaacagaaaaaactaaagttgtattttcccacaaatatagtatgaatgaggtcatattaaagaacagcaactgttaatgtttgttcacaaattcagaaatctaataggaaaacatgatactttcaatgtgccaaaactaaaccttagtatacaactaaaaatctcctgccttcttgcctacctgtcttccctcttctgttacagaatttgttcctcaaagtagatgcaatgtttctaacacaatttaaattaggaaatatatatgaatgtcgttgaagtctattttgagactgctaaagctattaattgatactgtgtttttatgcccaaatcccagtatgtttatgtaccaataatgactcttacccagcgcatgtctttatcagtgtgtactcgtgacgatttgtgtgaaaatagacttgatgtttataattaataccattacaactgtataataaaagcaatttgaagaaaaaaaaaaaaaaa

SEQ ID NO: 284186 - DNA, 1000 bp, Homo Sapiens
ctactccacaggtcccctcctccaggaagccctccgtgttctcccaggctagatgagagcccctcctctgtatcctatatttcttgggcacacaataattctgtacatttgaagctcattctactctttctacttcctctgtcccagcacttagtacaggtgattgtagcagcctctttatgggtcagagccgcctacaggaccagaagcttcatgaagccagcaccccaacttccaacaccagcgtccgcaatgcccaacagagatcccaggtgaggaagctgaactgactttggtgacatatattccccaagatctgacagctgatgagtgacagagcacgtattcaaacccagagatgtgaattcgctatgctgcctaggctggtcttgaactcctgacttcaagtaatcctcccaccttcgcttgccaaagtgctgggattataggcgtgaactactgctcccagctgagagctcacttttgtttgctagtggtgttcttagtatcttttcatatttgaggttttggtggtagtgctgaagtattgtactcaccatccaaggtttacaggacttttgttttactatggaacagatggaattgtttagttctgcatctttgcaaatatacaaaatgtgcctaccaggactctgctttatatccattgaaagcaagaagtaatacagtaaaactttgcctggctagaggctttgaaagaatggactattctgatttaattgtattaacttggaagtatgaaggtgaaaaaaattaaaaacttaaatttcctgttgaatgcaatttgaaaatatagccattgattccacttttattctccagtaagtctggacattctgatatacctggtgttttattatagaactcctagtgtgcctgaagatcattttctacaactttaggtgtaagaggatgtaaatggtattgtatgagatcaggctggatgagaactgatacttgtaaatacactttttagact

SEQ ID NO: 284187 - DNA, 1000 bp, Homo Sapiens
gacttacagttccatttggctggggaggcctcagaatcatggtgggaggcgaaaggcacttcttacatggtggtggcaagagaaaatgaggaagaagcaaatgccaaaacccctgataaacacattggatctcaggagacttattcattatcatgagaatagcatgggaaagactggcccccatgattcaattacctccccctgggtccctcccacaacatgtgggaattctgggagatacaattcaagttgagatttgggtggggacacagccaaaccacattggacacagaaccaggtttgaagctacacagccaggaacataatccacagccaccctaattcagatctctcataggaaccactgtccctgctcctgagcacagatgctactgcatatacctctgataccctgatggccgacactgggccctgtggcaaagactgctatcactgctgctcctgagaactgctccactactgctcctcagccatctttaccaaaatgcagtatttactgtcccagcctctctgtgtcatctcatcctgattagaagcccacatgtggttatctaaattgtgcagccaaagcctcttgcagtgtttaactgcaataatgttggggaaagtgaatttttctcctttgtagaaggaggtagtccctgccttctaataagactcttcaacataggaagagaattcagttgctggaggtagaggggtgagggatggaaaaagaatgacaaatttcaattcctagaatcatgttctgagactagaactttatctagtacattgcaggcacctgggtttggttgagtgtataataaatgacatagttcaacttattcccttgacagtttgttttggggtccagcttttgtctaccccagttttcacacacagatacgtggagaagcattgtgtgatggtaaaatgtttacttgaaagcctttttccctatctttgtctcttgctaggattaaaaacccgtatctgt

SEQ ID NO: 284188 - DNA, 1000 bp, Homo Sapiens
gccacagtccaggagcatttgaaggcacagtgcaggggctcagattggcacagaattctttgtgaaatatgagtgccacagactgtaacagatagcttcatgcacactatgcattttattggtttgtttggaaaatgttggccattgaatcattaataggtttatttcaaatagtttggaaattgttgtacttttgaaaacatgctgttcctgtagagttttttgatgagagttatagttgttatatatacataaagataattttcttttcatttttaagtgagaattctttttatcctaaatcttttattatctttaaatttttctctgtattattatatgtgctcctgaagcgagcactctttttatctatgatacttccataataatctcttctatttatagctattggtagttcccccaaattctggtcatagaaatttttatttgctgtttaggtttgtgactgaattgtgagaattcagttgtgatttttaacatgtcttagatatatatactaacatgtctaatatatactatctattttattgatttatttcgaaaaagatgggcaaagaattatttaaatattattttatttatttaaatatttattaaatatatttatttatttaaatatttattaaatatatttatttatttaaatgttattactttaaatattattttaaatattttggaaatactggtatttttgaatagatgctgtttctataaagctgtgtgatgggtattataactgttatatacacataaatataattttgttttcctttttaagagaggattctttttatcctaaatcttttacctttcaatctttgtatctattactacatatgctgctgaagggagcagactttttatctatgatacttagttaatgtatatattacatttatagctatgtggtagttcccctaaattcttgtaaaaataaatttttatttgatatttaaaaaaaaaaaaaaaaaaaaaa

SEQ ID NO: 284189 - DNA, 1000 bp, Homo Sapiens
acacaccaatcagcaccccgtgtctagctcagggtttgtgaatgcaccaatcgacactccgtatctagctaatctagtggggacgtggagaacttttgagtctacctcagggattatagatgcaccaatcaacaccctgtcaaaacggaccaatcagcgctctgtaaaacagaccaatcagctctcagtaaaatggaccaatcagcaggatgtgggtggggccagataagggaataaaagcaggctgccggacccagcagtggcgaggcgcttcggttgtcttccatgatgtggacgctttgttcttttgctctttgcaataaatcttcctgttgctttctttgggtccacactgcctttatgagctgtaacactcaccgtgaaggtctgaagctttactctggaagccagtgagaccaggaacccaccgggaggaatgaacgactccagacacaccgccttaagatctgtgacactcaccgcgaaggtctgcagcttcattcctgatccagcgagaccatgaacccaccagaaggaaaaaactccggacacatccgaacgtctagaagaaacaaactccagacacaccgcctgtaagaactgtaacggtcaccgcgagggtccgcggtttcattcttgaagtcagtgagaccaagaacccaccatttctggacacactaccatgccagagatccaggggctgcagcatgctgaaagaaaacagaagcctgtggagtgagccaagatcaaccaggaaataaaccctttcccttgcgatgtctctccagcgccctctactgacaaacctgctttagtgccagtttgtagagaattgtctttgctgatctctttattatgatgaaaattctctggatggaagggtcatcagctgccgtctcctttgctactctgctacatatccttacaatttggtttagaattttagtaccactaacattttttggtgcatattttggaaataaagaaaaggtaaactctt

SEQ ID NO: 284190 - DNA, 1000 bp, Homo Sapiens; identical to SEQ ID NO: 115272

SEQ ID NO: 284191 - DNA, 1000 bp, Homo Sapiens
gtggagaaggcttttttcaaaactcttggtccttttacttctttctctcagtgcagaatcaattctcattttcatcgtaaaagcaaatagctggattatttcatttgccagtttctatttagtattccatgcctgcccaattcatctgttactgtttaatttcaattcttctggtgagaattagaaatgaaatattttttattcattggccaaaaagttcacagacagcagtgtttgctatttactttgaattgaaggcacaaaatgcatcaattcctgtgctgtgttgacttgcagtagtaagtaactgagagcataaaataaacctgactgtatgaagtcaatttaagtgatgagaacatttaactttggtgactaaagtcagaatatcttctcacttcacttaagggatcttccagaagatatctaaaagtctgtaataagcttagaagttcagataaatctaggcaggatactgcatttttgtggttttaaaaaagtccttaggacagactgaattatcataacttatggcatcaggaggaaactttaaaatatcaaggaatcactcagtcaccctcctgttttgttgaaggatcaaccccaaattctgggtatttgagtacatgtgaatcatggatttggtattcaactttttccctggatgctttggaatcgtgtcttccatgctccactgggttcaatttaaaataggagaggctttctcttctgaaagatccattttaggtctttttcaagaatagtgaacacattttttaacaaaataagttgtaattttaaaaggaaagttttgcctattttattaagatggaaatttctttttaggctaatttgaaatccaactgaagctttttaaccaatattttaaatttgaaccactagagttttttatgatgcaaatgattatgttgtctgaaaggtgtggttttattgaatgtctatttgagtatcatttaaaaagtatttgccttttactgtc

SEQ ID NO: 284192 - DNA, 1000 bp, Homo Sapiens; identical to SEQ ID NO: 115273

SEQ ID NO: 284193 - DNA, 1000 bp, Homo Sapiens
ggtcgtgctgatgctgatcatcctggtagctctcctgatgctcgttttccgctccaagagagaggtgaaacggcaaaagtacagattgtctcagttatacaagtggcaagaagaggacagtggaccagctcctgggaccttccaaaacattggctttgacatctgccaagatgatgattccatccacctggagtccatctatagtaatttccagccctccttgagacacatagaccctgaaacaaagatccgaattcagaggcctcaggtaatgacgacatcattttaaggcatggagctgagaagtctgggagtgaggagatcccagtccggctaagcttggtggagcattttcccattgagagccttccatgggaactcaatgttcccattgtaagtacaggaaacaagccccgtacttaccaaggagaaagaggagagacagcagtgctgggagattctcaaatagaaacccgtggacgctccaatgggcttgtcatgatatcaggctaggctttcctgctcatttttcaaagacgctccagatttgagggtactctgactgtaacatctatcaccccattgatcgccaggattgatttggttgatctggctgagcaggcgggtgtccccgtcctccctcactgccccatatgtgtccctcctaaagctgcatgctcagttgaagaggacgagaggacgaccttctctgatagaggaggaccacgcttcagtcaaaggcatacaagtatctatctggacttccctgctggcacttccaaacaagctcagagatgttcctcccctcatctgcccgggttcagtaccatggacagcgccctcgacccgctgtttacaaccatgaccccttggacactggactgcatgcactttacatatcacaaaatgctctcataagaattattgcataccatcttcatgaaaaacacctgtatttaaatatagggcatttaccttttggtaaagaaaaaaaaaaaaa

SEQ ID NO: 284194 - DNA, 1000 bp, Homo Sapiens; identical to SEQ ID NO: 220703

SEQ ID NO: 284195 - DNA, 1000 bp, Homo Sapiens
tctccatatcttttaaggaattattctttctccatatcatcttttaattcctgttattagttttggaagcttatccataagtttccaaagacaagatgatataaaagttaaaaagcattcctctttacttatatcaaattattcttgtctttcaaaaagaaccaaaaaaaaaaaattcatcatggataaaaactaagcgcttgccttcttttaaaaagaaaaactgatgattagattaggttagctaaaattaatagaggcagtagaaacttaatcacaaaatgtactaaatatttggcaatattaaacaatgcctttttatttctgatatgtagttattagacatttatatattaaggataacttccttagtgtgacattccaatcatttagtattttaggacctgtgaataacttccaacaaaattaatgaataccatattagtattataaaatattataaagtaataattatatcatctatataacttcaaagtatgatgtttatacaaagaatccttatttcagtctagcagcttaacaacaaaggataaatcagactatacaaaacctaagtgtattaatttgatgattgtcacgtacaactttctttgccttccaagtagaggtgatcctaacaattggcatgatgcttttcttggtaatttgatataagcaagttgtaatgtacatagtaattatttaattactgtggcttttattttaaaaagtaattagaggtttttccatttcatgtcttgaacaacattaatattaattacactagaaatattttttgattcagaacttagaattgtacctgatatttataggtatttaaatgctttctgcaagttaaatatcgagaaaagtacttgacttcaagttgtaaggatacaatttggaagggtatgtaaatagattagttcataaacaaaatggtatcaataaagattttaaatatcaaaaaaaaaaaaaaaaaagaaaaaaaaaaaaaaaa

SEQ ID NO: 284196 - DNA, 912 bp, Homo Sapiens
atgagcttctcttccctgcctactgaaatacagtcattactctttctgacatttctaaccatctacctggtcaccctgatgggaaactgcctcatcattctggttaccctagctgaccccatgctacacagccccatgtacttcttcctcagaaacttatctttcctggagattggcttcaacctagtcattgtgcccaaaatgctggggaccctgcttgcccaggacacaaccatctccttccttggctgtgccactcagatgtatttcttcttcttctttggagtggctgaatgcttcctcctggctaccatggcatatgaccgctatgtggccatctgcagtcccttgcactacccagtcatcatgaaccaaaggactcgtgccaaactggctgctgcctcctggttcccaggctttcctgtagctactgtgcagaccacatggctcttcagttttccattctgtggcaccaacaaggtgaaccacttcttctgtgacagcccacctgtgctgaggctggtctgtgcagacacagcactctttgagatctacgccatcgtcggaaccattctggtggtcatgatcccctgcttgctgatcttgtgttcctatactcacattgctgctgccatcctcaagatcccatcagctaaagggaagaataaagccttttctacatgttcctcacacctccttgttgtctctcttttctatatatcattaagcctcacctacttccggcctaaatcaaataattcacctgagggcaagaagctgctatcattgtcctacactgttatgactcccatgttgaaccccattatctacagcctgagaaataacgaggtgaagaatgccctcagcaggacggtctctaaggccctagccctcagaaactgtatcccatag

SEQ ID NO: 284197 - DNA, 936 bp, Homo Sapiens
atgtccaacgccagcctcgtgacagcattcatcctcacaggccttccccatgccccagggctggacgccctcctctttggaatcttcctggtggtttacgtgctcactgtgctggggaacctcctcatcctgctggtgatcagggtggattctcacctccacacccccatgtactacttcctcaccaacctgtccttcattgacatgtggttctccactgtcacggtgcccaaaatgctgatgaccttggtgtccccaagcggcagggctatctccttccacagctgcgtggctcagctctattttttccacttcctggggagcaccgagtgtttcctctacacagtcatgtcctatgatcgctacttggccatcagttacccgctcaggtacaccagcatgatgagtgggagcaggtgtgccctcctggccaccggcacttggctcagtggctctctgcactctgctgtccagaccatattgactttccatttgccctactgtggacccaaccagatccagcactacttctgtgacgcaccgcccatcctgaaactggcctgtgcagacacctcagccaacgtgatggtcatctttgtggacattgggatagtggcctcaggctgctttgtcctgatagtgctgtcctatgtgtccatcgtctgttccatcctgcggatccgcacctcagatgggaggcgcagagcctttcagacctgtgcctcccactgtattgtggtcctttgcttctttgttccctgtgttgtcatttatctgaggccaggctccatggatgccatggatggagttgtggccattttctacactgtgctgacgccccttctcaaccctgttgtgtacaccctgagaaacaaggaggtgaagaaagctgtgttgaaacttagagacaaagtagcacatcctcagaggaaataa

SEQ ID NO: 284198 - DNA, 1000 bp, Homo Sapiens
tgatgctgttcaaaactttgttgtttctcagaataacactccagttgggactaatatgagttacgaggtggaaagcaaaaaagaaatcccaattaagaagaacatttttcatatgtttccagtgtcccagccttttgtggactacccttataatcagtgtgcagtggtcggaaatgggggaattctgaataagtctctctgtggaactgaaatagataaatccgacttcgtttttaggtgtaacctacccccaaccacaggagatgttagtaaagatgttggcagtaaaacaaatcttgtgactataaatccaagcatcataactctgaaatatgggaacttaaaggaaaaaaaagccctatttctggaggacattgcaacctatggagatgcattttttcttctgccagcattttccttcagggccaacacgggtacctctttcaaagtatactacacgctcgaagagtctaaagcaagacaaaaggttctatttttccatcccaagtacctgaaagatctggcccttttctggagaactaaaggtgtgactgcataccgcttgtccaccggcttgatgatcacaagtgttgcagtggaactgtgtaaaaatgtgaagctgtatggattctggcccttctctaaaactgtagaagacatacctgtcagccatcactattatgacaacaagctacctaaacatggtttccatcagatgcccaaagaatacagccagatcctccaacttcacatgaaaggaatcctcaaactgcaatttagcaaatgtgaagtcgcctaaacaaagtatcttaaaatgggaataattttaatataatgcagtaggtgattaacaatgtctccaaacaccaaaggaggtggctaaagagtattttgagatgagccccaaaatttggtttgaccaaagcttccccactcattttgcaatgatggcaagtcattcaatccttctcatcttcattttttctccttataacatgga

SEQ ID NO: 284199 - DNA, 996 bp, Homo Sapiens
atgactagccgctctgtgtgtgagaagatgaccatgacaacggagaaccccaaccagactgtggtgagccacttcttcctggagggtttgaggtacaccgctaaacattctagcctcttcttcctcctcttcctcctcatctacagcatcactgtggctgggaatctcctcatcctcctaactgtgggctctgactctcacctcagcttacccatgtaccacttcctggggcacctctccttcctggatgcctgtttgtctacagtgacagtgcccaaggtcatggcaggcctgctgactctggatgggaaggtgatctcctttgagggctgtgccgtacagctttattgcttccactttctggccagcactgagtgcttcctgtacacagtcatggcctatgaccgctatctggctatctgtcaacccctgcactacccagtggccatgaacagaaggatgtgtgcagaaatggctggaatcacctgggccataggtgccacgcacgctgcaatccacacctccctcaccttccgcctgctctactgtgggccttgccacattgcctacttcttctgcgacataccccctgtcctaaagctcgcctgtacagacaccaccattaatgagctagtcatgcttgccagcattggcatcgtggctgcaggctgcctcatcctcatcgttatttcctacatcttcatcgtggcagctgtgttgcgcatccgcacagcccagggccggcagcgggccttctccccctgcactgcccagctcactggggtgctcctgtactacgtgccacctgtctgtatctacctgcagcctcgctccagtgaggcaggagctggggcccctgctgtcttctacacaatcgtaactccaatgctcaacccattcatttacactttgcggaacaaggaggtgaagcatgctctgcaaaggcttttgtgcagcagcttccgagagtctacagcaggcagcccacccccatag

SEQ ID NO: 284200 - DNA, 993 bp, Homo Sapiens
atgttctttattattcattctttggttacttctgtttttctaacagctttgggaccccagaacagaacaatgcattttgtgactgagtttgtcctcctgggtttccatggtcaaagggagatgcagagctgcttcttctcattcatcctggttctctatctcctgacactgctagggaatggagctattgtctgtgcagtgaaattggacaggcggctccacacacccatgtacatccttctgggaaactttgcctttctagagatctggtacatttcctccactgtcccaaacatgctagtcaatatcctctctgagattaaaaccatctccttctctggttgcttcctgcaattctatttctttttttcactgggtacaacagagtgtttctttttatcagttatggcttatgatcggtacctggccatctgtcgtccattacactacccctccatcatgactgggaagttctgtataattctggtctgtgtatgctgggtaggcggatttctctgctatccagtccctattgttcttatctcccaacttcccttctgtgggcccaacatcattgaccacttggtgtgtgacccaggcccattgtttgcactggcctgcatctctgctccttccactgagcttatctgttacaccttcaactcgatgattatctttgggcccttcctctccatcttgggatcttacactctggtcatcagagctgtgctttgtattccctctggtgctggtcgaactaaagctttctccacatgtgggtcccacctaatggtggtgtctctattctatggaacccttatggtgatgtatgtgagcccaacatcagggaacccagcaggaatgcagaagatcatcactctggtatacacagcaatgactccattcttaaatccccttatctatagtcttcgaaacaaagacatgaaagatgctctaaagagagtcctggggttaacagttagccaaaactga

SEQ ID NO: 284201 - DNA, 993 bp, Homo Sapiens
atgtgttcttttttcttgtgccaaacaggtaaacaggcaaaaatatcaatgggagaagaaaaccaaacctttgtgtccaagtttatcttcctgggtctttcacaggacttgcagacccagatcctgctatttatccttttcctcatcatttatctgctgaccgtgcttggaaaccagctcatcatcattctcatcttcctggattctcgccttcacactcccatgtatttttttcttagaaatctctcctttgcagatctctgtttctctactagcattgtccctcaagtgttggttcacttcttggtaaagaggaaaaccatttctttttatgggtgtatgacacagataattgtctttcttctggttgggtgtacagagtgtgcgctgctggcagtgatgtcctatgaccggtatgtggctgtctgcaagcccctgtactactctaccatcatgacacaacgggtgtgtctctggctgtccttcaggtcctgggccagtggggcactagtgtctttagtagataccagctttactttccatcttccctactggggacagaatataatcaatcactacttttgtgaacctcctgccctcctgaagctggcttccatagacacttacagcacagaaatggccatcttttcaatgggcgtggtaatcctcctggcccctgtctccctgattcttggttcttattggaatattatctccactgttatccagatgcagtctggggaagggagactcaaggctttttccacctgtggctcccatcttattgttgttgtcctcttctatgggtcaggaatattcacctacatgcgaccaaactccaagactacaaaagaactggataaaatgatatctgtgttctatacagcggtgactccaatgttgaaccccataatttatagcttgaggaacaaagatgtcaaaggggctctcaggaaactagttgggagaaagtgcttctctcataggcagtga

SEQ ID NO: 284202 - DNA, 945 bp, Homo Sapiens
atggatcagagaaattacaccagagtgaaagaatttaccttcctgggaattactcagtcccgagaactgagccaggtcttatttaccttcctgtttttggtgtacatgacaactctaatgggaaacttcctcatcatggttacagttacctgtgaatctcaccttcatacgcccatgtacttcctgctccgcaacctgtctattcttgacatctgcttttcctccatcacagctcctaaggtcctgatagatcttctatcagagacaaaaaccatctccttcagtggctgtgtcactcaaatgttcttcttccaccttctggggggagcagacgttttttctctctctgtgatggcgtttgaccgctatatagccatctccaagcccctgcactatatgaccatcatgagtagggggcgatgcacaggcctcatcgtggcttcctgggtggggggctttgtccactccatagcgcagatttctctattgctcccactccctttctgtggacccaatgttcttgacactttctactgcgatgtcccccaggtcctcaaacttgcctgcactgacaccttcactctggagctcctgatgatttcaaataatgggttagtcagttggtttgtattcttctttctcctcatatcttacacggtcatcttgatgatgctgaggtctcacactggggaaggcaggaggaaagccatctccacctgcacctcccacatcaccgtggtgaccctgcatttcgtgccctgcatctatgtctatgcccggcccttcactgccctccccacagacactgccatctctgtcaccttcactgtcatctcccctttgctcaatcctataatttacacgctgaggaatcaggaaatgaagttggccatgaggaaactgaagagacggctaggacaatcagaaaggattttaattcaataa

SEQ ID NO: 284203 - DNA, 1000 bp, Homo Sapiens
atgttcaggtcgcttggtcggttcgtctcccatttgccatccaggcctcacacccacactcgagcccacccggccggccagctttagaggaggggaggagcagggcgagttcacattattccttttccatcggaagtggcgctcgtgcattcaactcgttcccgctcatggaacccctctttaaaaagacgcagggcacctgtgagcgcaggagcgagcctaaggccacccagcggcagcgcccgtgtcctgggcactcagcgtgctgggcagagcaggtgcgatggccccagtcctagcagccctcgcccatgtcctgtgcccttacatggctcccggactgtgcagggagccgatacgtttgctgatagcaatactggaaccaccgggtgcgatggcagtgaggagactgcccagtgcctttggggctgtgcttgcaataaagaatttcctggaaaggcagtctgcaaaagagggaaccggtgactcagaaagacagatgttttggtaatttaccccaaatgtgccatccacatagtgctttttcctcttgcccttcggcttgtttgaatctcacaattatgtatttaattctcaaagaaatatgtatctgtagccgtttgttgacactaatacagatgattaaggaaaacagctgatctttggggaagggagctaccaacactttatacacacacacacgtgcacacacacacacacacacactatatatatatatattatttacagggaaatttttcagggtttacaaaagagtatgtgattggtagtaagagacacacagaatgtttatgaagaaattgcattttctttttcctttacatttgaacttctttatagtttaaatataacgtcttgagatggcacattcctacgattgaagaaggggtcttgagatcccctaaacttgcatacccagttttttggatattgtaataaaaaaaagtattatgacaaaaaaaaaaaaaaaaaaaaaaaa

SEQ ID NO: 284204 - DNA, 1000 bp, Homo Sapiens; identical to SEQ ID NO: 115276

SEQ ID NO: 284205 - DNA, 951 bp, Homo Sapiens
atggctgaagaaaatcataccatgaaaaatgagtttatcctcacaggatttacagatcaccctgagctgaagactctgctgtttgtggtgttctttgccatctatctgatcaccgtggtggggaatattagtttggtggcactgatatttacacaccgtcggcttcacacaccaatgtacatctttctgggaaatctggctcttgtggattcttgctgtgcctgtgctattacccccaaaatgttagagaacttcttttctgagaacaaaaggatttccctctatgaatgtgcagtacagttttattttctttgcactgtggaaactgcagactgctttcttctggcagcaatggcctatgaccgctatgtggccatatgcaacccactgcagtaccacatcatgatgtccaagaaactctgcattcagatgaccacaggggccttcatagctggaaacctgcattccatgattcatgtagggcttgtatttaggttagttttctgtggatcgaatcacatcaaccacttttactgtgatattcttcccttgtatagactctcttgtgttgatccttatatcaatgaactggttctattcatcttctcaggttcagttcaagtctttaccataggtagtgtcttaatatcttatctctatattcttcttactattttcaaaatgaaatccaaagagggaagggccaaagctttttctacctgtgcatcccactttttgtcagtttcattattctatggatctcttttcttcatgtacgttagaccaaatttgcttgaagaaggggataaagatataccagctgcaattttatttacaatagtagttcccttactaaatcctttcatttatagcctgagaaatagggaagtaataagtgtcttaagaaaaattctgatgaaagaaataatctcaagaagatggaaacagtga

SEQ ID NO: 284206 - DNA, 1000 bp, Homo Sapiens; identical to SEQ ID NO: 117362

SEQ ID NO: 284207 - DNA, 945 bp, Homo Sapiens
atgtcagcctccaatatcaccttaacacatccaactgccttcttgttggtggggattccaggcctggaacacctgcacatctggatctccatccctttctgcttagcatatacactggccctgcttggaaactgcactctccttctcatcatccaggctgatgcagccctccatgaacccatgtacctctttctggccatgttggcagccatcgacctggtcctttcctcctcagcactgcccaaaatgcttgccatattctggttcagggatcgggagataaacttctttgcctgtctggcccagatgttcttccttcactccttctccatcatggagtcagcagtgctgctggccatggcctttgaccgctatgtggctatctgcaagccactgcactacaccaaggtcctgactgggtccctcatcaccaagattggcatggctgctgtggcccgggctgtgacactaatgactccactccccttcctgctgagatgtttccactactgccgaggcccagtgatcgctcactgctactgtgaacacatggctgtggtgaggctggcgtgtggggacactagcttcaacaatatctatggcatcgctgtggccatgtttattgtggtgttggacctgctccttgttatcctgtcttatatctttattcttcaggcagttctactgcttgcctctcaggaggcccactacaaggcatttgggacatgtgtctctcatataggtgccatcttagccttctacacaactgtggtcatctcttcagtcatgcaccgtgtagcccgccatgctgcccctcatgtccacatcctccttgccaatttctatctgctcttcccacccatggtcaatcccataatctatggtgtcaagaccaagcaaatccgtgagagcatcttgggagtattcccaagaaaggatatgtag

SEQ ID NO: 284208 - DNA, 853 bp, Homo Sapiens
cttttcttttcctctttgactgagcaccgaggggcagttggcagcttcacctcagagctgcaggaaggaacggggcagtgaaaatcgaatcgggtgtgatcctaggccaagctcatggcccagcagggccagcaggggcagatggcaagtggagacagcaatctcaacttcaggatggtcgcagagatccagaacgtagagggtcagaacctgcaggagcaggtttgccctgagcccattttcaggttcttcagagaaaacaaggtggagattgcaagtgcaataacaaggccatttcctttccttatgggcctccgagaccgctccttcatctccgagcagatgtatgaacattttcaagaagcttttagaaacctggtcccagtgacaagagtgatgtattgtgtactcagtgaactggagaagacatttggctggtcacatctggaagcattgttcagcaggattaacctgatggcctatcctgatttaaacgagatttacagaagcttccagaatgaaaatttatcatccagtgcagtcctgtgtcaacttgtttctccaaacaaagactggagaagtcacgaagagagcctagcacatactggtacactgaggaggagctgcatgtgaaagctatgaagacagaaaagggggttggtgggggcctttccgaaccatgtggttgaattgcagactgtgggaggcagggtgtgagagctgactctggagaaagaagttgaagtggattctggaaggcttgacaccctgtgctaaggaatctggagtttaatttttggaaaataaagaaggaataaagggcatttaaacgggaaaaaaaaaaaaaaaaaaa

SEQ ID NO: 284209 - DNA, 978 bp, Homo Sapiens
atgaccaccataattctggaagtagataatcatacagtgacaacacgtttcattcttctggggtttccaacacgaccagccttccagcttctctttttctccattttcctggcaacctatctgctgacactgctggagaatcttcttatcatcttagctatccacagtgatgggcagctgcataagcccatgtacttcttcttgagccacctctccttcctggagatgtggtatgtcacagtcatcagccccaagatgcttgttgacttcctcagtcatgacaagagtatttccttcaatggctgcatgactcaactttacttttttgtgacctttgtctgcactgagtacatccttcttgctatcatggcctttgaccgctatgtagccatttgtaatccactacgctacccagtcatcatgaccaaccagctctgtggcacactggctggaggatgctggttctgtggactcatgactgccatgattaagatggtttttatagcacaacttcactactgtggcatgcctcagatcaatcactacttttgtgatatctctccactccttaacgtctcctgtgaggatgcctcacaggctgagatggtggacttcttcttggccctcatggtcattgctattcctctttgtgttgtggtggcatcctacgctgctatccttgccaccatcctcaggatcccttctgctcagggccgccaaaaggcattctccacctgtgcctcccacctgaccgtcgtaattctcttctattccatgacacttttcacctatgcccgtcccaaactcatgtatgcctacaattccaacaaagtggtatctgttctctacactgtcattgttccactcctcaaccccatcatttactgtctgaggaaccatgaagtaaaggcagccctcagaaagaccatacattgcagaggaagtgggccccagggaaatggggctttcagtagttaa

SEQ ID NO: 284210 - DNA, 939 bp, Homo Sapiens
atggaagcagaaaaccttacagaattatcaaaatttctcctcctgggactctcagatgatcctgaactgcagcccgtcctctttgggctgttcctgtccatgtacctggtcacggtgctggggaacctgctcatcattctggccgtcagctctgactcccacctccacacccccatgtacttcttcctctccaacctgtcctttgttgacatctgtttcatctccaccacagtccccaagatgctagtgagcatccaggcacggagcaaagacatctcctacatggggtgcctcactcaggtgtattttttaatgatgtttgctggaatggatactttcctactggccgtgatggcctatgaccggtttgtggccatctgccacccactgcactacacggtcatcatgaacccctgcctctgtggcctcctggttctggcatcttggttcatcattttctggttctccctggttcatattctactgatgaagaggttgaccttctccacaggcactgagattccgcatttcttctgtgaaccggctcaggtcctcaaggtggcctgctctaacaccctcctcaataacattgtcttgtatgtggccacggcactgctgggtgtgtttcctgtagctgggatcctcttctcctactctcagattgtctcctccttaatgggaatgtcctccaccaagggcaagtacaaagccttttccacctgtggatctcacctctgtgtggtctccttgttctatggaacaggacttggggtctatctgagttctgctgtgacccattcttcccagagcagctccaccgcctcagtgatgtacgccatggtcacccccatgctgaaccccttcatctacagcctgaggaacaaggatgtgaagggggccctggaaagactcctcagcagggccgactcttgtccatga

SEQ ID NO: 284211 - DNA, 1000 bp, Homo Sapiens; identical to SEQ ID NO: 220704

SEQ ID NO: 284212 - DNA, 1000 bp, Homo Sapiens; identical to SEQ ID NO: 115277

SEQ ID NO: 284213 - DNA, 1000 bp, Homo Sapiens
atagttcatgagtatttttgcatcattctccttgacttttcacatccctgtgcaggaggtaaatcaaacatcagtaatcctgttttacagatgggggaaaaagtctcaaggttggatatgacttgctatgtggcaaggttggggctcaaccctaacacagttctctttccagtgctttctcaagtgcttggggaagagaatgcctcagaaggctgggtagtggggccctggaattcagcatccatgaatgtgctagtggataagctaaatagaaggcggccaaacccatctgctgtacagattgaactatgctcacggtagggcaaattgcaggctctgaaacagggactacacaggtaacacctgaataggagactcctgctttacaatgtgtagataaaacatcagcaatggtggccatggtggcagtcatgtgaaaagtaagatctttgggaatcaagaaaggaagctgtgttaaccactcctgctcaagccctgctgcgtgtgttgcaagagatactaagagagcaagaaagctataggtgagaacctctgcagtttaggagaagaacatcaaggcacagtccaacatgctgataagtctggccaggaggagaattaaaacaggggctttccacacctcccttgccccaagctccagcggtattctatcagcccatcctcctggaaagcctgaaaggaatgaaggaggctaataagtcatcttccaggaaggcatccctcactcgtgcttccctgagctagtcaaccaaaagagtcttcagaaactttgctagacctgaagtacttgaacctgtgtcccctgaatctttcttacagcatctgggacaaatccctggccctgtgacatccgaagcagaactgtgccctgctctctccttctgtgatgaccaaggatggtgaactcaagttgttctctacaagccaggccagcaacctaaatacttggagaggaacttttagaaactataatcctgac

SEQ ID NO: 284214 - DNA, 1000 bp, Homo Sapiens
acagattgtatcagatgttggaagaatctgttacagtgttagtttatctttaggtgaacccacaactatgggaagaaataacctaacaagaccctctgaattcatcctccttggactctcctctcgacctgaggatcagaagccgctctttgctgtgttcctccccatctaccttatcacagtgataggaaacctgcttatcatcctggccatccgctcagacactcgtctccagacgcccatgtacttctttctaagcatcctgtcttttgttgacatttgctatgtgacagtcattatccctaagatgctggtgaacttcttatcagagacaaagaccatctcttacggtgagtgtctgacccagatgtactttttcttagcctttggaaacacagacagttacctgctagcagccatggccattgaccgctatgtggccatatgtaatcccttccactacatcaccattatgagtcacagatgctgtgtcctgcttctggttctctccttctgcattccacattttcactccctcctgcacattcttctgactaatcagctcatcttctgtgcctccaatgtcatccatcactttttctgcgatgatcaaccagtgctaaaattgtcctgttcctcccattttgtcaaagaaatcacagtaatgacagaaggcttggctgtcataatgaccccgttttcatgcatcatcatctcttatttaagaatcctcatcactgttctgaagattccttcagctgctggaaagcgtaaagcattttctacctgtggctctcatctcacagtggtgaccctgttttatggaagcattagctatgtctattttcagcccctgtccaactatactgtcaaggatcaaatagcaacaattatctacaccgtactgactcctatgctaaatccatttatctatagtctgaggaacaaagacatgaagcagggtttggcaaagttgatgcacaggatgaaatgtcagtaa

SEQ ID NO: 284215 - DNA, 1000 bp, Homo Sapiens; identical to SEQ ID NO: 220705

SEQ ID NO: 284216 - DNA, 1000 bp, Homo Sapiens
catgaaggcggacgtgacccgcctgccagccacgctgtcccgaataccccccatcgcagcccgccttcagatgtccgagcgcagcatcctcagccggctggccagcaagggcacggagcctcaccccacaccggcctacccgccgggtccctacgctacacctccggggtacggggcggccttcagcgccgcacccgtaggggccctggccgccgcaggcgccaattacagccagatgcctgcagggtccttcatcacagccgccaccaacggccctccagtgcttgtgaagaaggagaaggaaatggtgggggcattggtgtcagacgggctggatcggaaggagccccgagccggggaggtgatctgtatagacgactgactggatcccaggcctgcccttcacccaggccccgtccccgaggccgacccccagctcaagcgctggggcctgctgccagccctccaccttccccaccccttgggccatcactgggctaggaacccctttgcccctctctgcagctcctctcttcaagaagggccctttgtctttctccactcccacacacctttcccaccaagccttgaagactgtgctggtgagaagaagtctgggtgggagatggctggcagggtcttccaagtaccttcctcccacactgccaagtatacacaacttcccagtaaatggttgtggggaggaaagaggtggagcctccccagccgtttccctgcagaatcagctctgtctcatgtggaagtggagaatcagccttgcctggcctttaggaacttttgtggggaagagagctttgaagagaggagggggactttagagagggatgaaaatgagccctgggagggaggaagggacgaggaggggtggctgcatgttaccgtcccctacctctccccacgtggagggtggagcagttatgagggaggaagtcaactgctgttcagcctcagaataaaggtgccgttcactggctcagtt

SEQ ID NO: 284217 - DNA, 1000 bp, Homo Sapiens; identical to SEQ ID NO: 284216

SEQ ID NO: 284218 - DNA, 987 bp, Homo Sapiens
atgagaccaagcagcaatgttacagaatttgtcctcctgggcctcactcaagatcctgatgtgaaaaaaacattatttgtcatgtttttactcatatacattgtgacaatggtgggaaacctcctcatttgggtgactactattggcagcccctccttgggctccctaatgtacttcttccttgcctacttgtcacttatggatgccatatattccactgccatgtcacccaaattgatgatagacttactctgtgataaaatcgctatttccttgtcagcttgcatgggtcagctcttcatagaacacttacttggtggtgcagaggtcttccttttggtggtgatggcctatgatcgctatgtggctatctctaagccgctgcactatttgaacatcatgaatcgactggtttgcatccttctgttggtggtggccatgattggaggttttgtgcactctgtggttcaaattgtctttctgtacagtctaccaatctgtggccccaatgttattgaccactctgtctgtgacatgtacccattgttggaactgttgtgccttgacacctactttataggactcactgtggttgccaatggtggaataatttgtatggtcatctttacctttctgctaatctcctgtggagtcatcctaaacttccttaaaacttacagtcaggaagagaggcataaagccctgcctacctgcatctcccacatcattgtggttgccctcgtttttgttccctgtatttttatgtatgttagacccgtttccaactttccctttgataaattaatgactgtgttttattcaattatcacactcatgttgaatcctttaatatactcgttgagacaatcagagatgaaaaatgctatgaaaaatctctggtgtgaaaagttaagtatagttagaaaaagagtatctcccacactgaacatatttattcctagttctaaggcaacaaataggcggtaa

SEQ ID NO: 284219 - DNA, 1000 bp, Homo Sapiens; identical to SEQ ID NO: 115278

SEQ ID NO: 284220 - DNA, 1000 bp, Homo Sapiens; identical to SEQ ID NO: 115280

SEQ ID NO: 284221 - DNA, 942 bp, Homo Sapiens
atggaagaggaaaatgcaacattgctgacagagtttgttctcacaggatttttatatcaaccacagtggaaaatacccctgttcctggcattcttggtaatatatctcatcaccatcatggggaatcttggtctgattgctgtcatctggaaagaccctcaccttcatatcccaatgtacttactccttgggaatttagcttttgtggatgcttggatatcatccacagtgaccccaaagatgctgaataacttcttagctaagagtaagatgatatctctctctgaatgcaagatacagtttttttcgtttgcaatcagtgtaaccacggaatgttttctcttggcaacgatggcatatgatcgctatgtagccatatgcaaacctttactttatccagccattatgaccaatggactgtgcatccggctattaatcttgtcatatgtaggtggtattcttcatgctttaatccatgaaggatttttattcagactaaccttctgtaactccaacatagtacatcacatttactgtgacactatcccattgtctaagatttcttgtactgattcttctattaattttctaatggtttttattttctcaggttcaattcaggtattcagcattgtgactattcttgtatcttatacatttgttctcttcgcaatcttaaaaaagaaatctgataaaggtgtaaggaaagccttttccacctgtggagcccatctcttctctgtctctttatactatggaccccttctcttcatttatgtgggccctgcatctccgcaagcagatgatcaagatatggtggagcctctattctacactgtcatcattcctttgttaaatcctatcatctacagtctgagaaataagcaagtcacagtttcattcacaaaaatgttaaaaaaacatgttaaggtttcatactaa

SEQ ID NO: 284222 - DNA, 910 bp, Homo Sapiens
ctcctcgccttcctccggctcagccgccgcgccgccgggctgctccttcttcctcctcgggcgcccgcggcgatgttcaaccgcgccgtgagccggctgagcaggaagcggccgccgtcagacatccacgacagcgatggcagttccagcagcagccaccagagcctcaagagcacagccaaatgggcggcatccctggagaatctgctggaagacccagaaggcgtgaaaagatttagggaatttttaaaaaaggaattcagtgaagaaaatgttttgttttggctagcatgtgaagattttaagaaaatgcaagataagacgcagatgcaggaaaaggcaaaggagatctacatgacctttctgtccagcaaggcctcatcacaggtcaacgtggaggggcagtctcggctcaacgagaagatcctggaagaaccgcaccctctgatgttccagaaactccaggaccagatctttaatctcatgaagtacgacagctacagccgcttcttaaagtctgacttgtttttaaaacacaagcgaaccgaggaagaggaagaagatttgcctgatgctcaaactgcagctaaaagagcttccagaatttataacacatgagcccccaaaaagccgggactggcagctttaagaagcaaaggaatttcctctcaggaccgtgccgggtttatcattgctttgttatttgtaaggactgaaatgtacaaaacccttcaatgggatgtgtgttttattaactgcttcaccagtaaattttgcatgatggctaagctaacataaaaaaagaataataataacttggaagttttagtttacaaaacagagattccttcaacactggacacgtcgagcattttgtagcttaattaaacctcatgtaaggccaaaaaaa

SEQ ID NO: 284223 - DNA, 1000 bp, Homo Sapiens
aaaggcctgagtgtctttctcaaccgtgcaaaagccgtgttcttcccgggaaaccaggaaaaggatccgctactcaaaaaccaagaatttaaaggagtttcttaaatttcgaccttgtttctgaagctcacttttcagtgccattgatgtgagatgtgctggagtggctattaacctttttttcctaaagattattgttaaatagatattgtggtttggggaagttgaattttttataggttaaatgtcattttagagatggggagagggattatactgcaggcagcttcagccatgttgtgaaactgataaaagcaacttagcaaggcttcttttcattattttttatgtttcacttataaagtcttaggtaactagtaggatagaaacactgtgtcccgagagtaaggagagaagctactattgattagagcctaacccaggttaactgcaagaagaggcgggatactttcagctttccatgtaactgtatgcataaagccaatgtagtccagtttctaagatcatgttccaagctaactgaatcccacttcaatacacactcatgaactcctgatggaacaataacaggcccaagcctgtggtatgatgtgcacacttgctagactcagaaaaaatactactctcataaatgggtgggagtattttggtgacaacctactttgcttggctgagtgaaggaatgatattcatatattcatttattccatggacatttagttagtgctttttatataccaggcatgatgctgagtgacactcttgtgtatatttccaaatttttgtacagtcgctgcacatatttgaaatcatatattaagactttccaaagatgaggtccctggtttttcatggcaacttgatcagtaaggatttcacctctgtttgtaactaaaaccatctactatatgttagacatgacattctttttctctccttcctgaaaaataaagtgtgggaagagacaagaaaaaaaaaa

SEQ ID NO: 284224 - DNA, 1000 bp, Homo Sapiens
ccaccctttcccccaggcccctgtcctcctcccccaggagctccccatggcaatccagctttccccccaggtgggccccctcatcctgtgccacagccagggtatccaggatgccaaccgttgggtccctaccctcctccatacccaccgcctgcccctggaatccctcctgtgaatcccttggctcctggcatggttggaccagcagtgatagtagacaagaagatgcagaagaaaatgaagaaagctcataaaaagatgcacaagcaccaaaagcaccacaagtaccacaagcatggcaagcattcctcctcttcctcctcctcttccagcagtgattctgactgaatacaggccctggacccttccctcaagtctcaccagttctgctctcccatcaagcttcagatgccatgttgtactgggggaatgtagcccttgtgctccccaccccctacctccacctgagcctcaccctgctgttgagccctgagtggctaggggaaatgggaagaggattgccatggcctggccatcttgttgctgcttggttagatcatatagctaatgaattaggcaggggagctattttttgaagatgatgaactaaatgttgaagacaagtttgagatctgtaaaatgtgattttttacttccacttataatacttgtgattggggaggtttgtggaaattcaattatgatgaaaaacctatcttttttgtaatgttggcatacttggggaatttagtggcaaatacattccccagcaggccttttgttggttgcactaactgcaaggttgctgggaagtagagtccatttggttgatgagctttgactgcggttttggaaccttacctctcctccttagcccaatatgctgtcttgggtcctattcaaataaagttatttctcctggtctcagctcaaaaaaaaaaaaaaaaaaaaaaaaaaaaaaaaaaaaaaaaaaaaaaaaaaaaaaaaaaaaaaaaaaaaa

SEQ ID NO: 284225 - DNA, 1000 bp, Homo Sapiens
taactgcactgctttctggaccatttctaaggcggcctttacaagaagacattcctgtcggagaggagggtggacttcggagaaattctcatactgaagcatgagcttaggagtttctgttagtggtagtggtgttttggacacttcattccttgcaacaccgaggttttgggtgttgacataaagtggaccacacaccacatctgctgccgtcttgacacttttttttgtttggttggttttgttacatcttacattatgcagaactatttttgtacaaattgtttaaaagttatttatgcaaggtttgaatgcataccagtgtttttattgttttgagattgccaattttcctgatttccttaaggtaggagagaatttaacgtgtacttcatcgacacaacccatctacaaatgtgcccagatctaacaaagtaggctaagaccttccacttaaaagcatgtttaactggaagttgagagtctgctttgtacctcaagagttacatgagcatgttgtggataaatgtaaattatagtcaaagtaagatactctgccaagtttcctctgtagagaattcacttttctcaaattttaaaatttcgacttcagcctttgcactcaggaggttctgctccagcatgagctcttgtacttacatagatctaatttatacagtgagtcaagacgtagaataaatgctcccacatagcctttcttttgcttttgcttctctcctctgaagtgtgagttgagttctcatttaggtttgtaacatggctatttcctagttgtaaagttctgcatttataagtgccattgttgtaaggtggtgtttcctagaccttccctgatgcgattttacctttgttgaatttgtataaacaattgtacaaaaaaaaccactcttgaactttgagggtttctgttctaggagtggactagaagtttaagcccagagtcagtaaacactgttttgaagtccaaaaaaaaaaaaaa

SEQ ID NO: 284226 - DNA, 1000 bp, Homo Sapiens; identical to SEQ ID NO: 220709

SEQ ID NO: 284227 - DNA, 1000 bp, Homo Sapiens; identical to SEQ ID NO: 115281

SEQ ID NO: 284228 - DNA, 1000 bp, Homo Sapiens; identical to SEQ ID NO: 115282

SEQ ID NO: 284229 - DNA, 1000 bp, Homo Sapiens; identical to SEQ ID NO: 220710

SEQ ID NO: 284230 - DNA, 1000 bp, Homo Sapiens
tcagagaagaccaacaggaccctgagctatcggactggcttgaagatcaccagccttaccgaggttgtgtgtgggttagacttgtgcaaccagggcaactctggccgggctgtcacctattcccgaagccgttacctcgaatgcatttcctgtggctcatcagacatgagctgtgagaggggccggcaccagagcctgcagtgccgcagccctgaagaacagtgcctggatgtggtgacccactggatccaggaaggtgaagaagggcgtccaaaggatgaccgccacctccgtggctgtggctaccttcccggctgcccgggctccaatggtttccacaacaacgacaccttccacttcctgaaatgctgcaacaccaccaaatgcaacgagggcccaatcctggagcttgaaaatctgccgcagaatggccgccagtgttacagctgcaaggggaacagcacccatggatgctcctctgaagagactttcctcattgactgccgaggccccatgaatcaatgtctggtagccaccggcactcacgaacgctcactctggggaagctggttgccatgtaaaagtactactgccctgagaccaccatgctgtgaggaagcccaagctactcatgtataaatgccatgtggagatagagccccagatgtttcagccatctcagcccaggcaccagacaagtgggtgaagaagccaccttggacatgtagccccagcagatgtgatatagagaagaaacaggaaacttggctatattagtttcctagggctgcctgtgataaattattacaaactttataaactaacacattgtgtgcctatatcaaaacatcatggaaggacaggcacagtggctcatgcctgtagtcctagcactttgggagggtgagaaaggaagatctcttgagctcaggagttcaagatcagcctgggcaacacagtgagacctcatctccactaaaaataaaaaaaaattggctgg

SEQ ID NO: 284231 - DNA, 1000 bp, Homo Sapiens
gattgacttgagggtctctgtttggtaagaatacatcattagcttaaataagcagcagaaggttagttttaattatgtagcttctgttaatattaagtgttttttgtctgttttacctcaatttgaacagataagtttgcctgcatgctggacatgcctcagaaccatgaatagcccgtactagatcttgggaacatggatcttagagtcactttggaataagttcttatataaatacccccagccttttgagaacggggcttgttaaaggacgcgtatgtagggcccgtacctactggcagttgggttcagggaaatgggattgacttggccttcaggctcctttggtcataattttaaaatatgggagtagaaaacaacaaagaatggaatggactcttaaaacaatgaaagagcatttatcgtttgtcccttgaatgtagaatttgtttttgatttcataattctgctggtaaatgtgacagttaaaatggtgcattatgtatatatattataatttagaaataccattttataattttactattccagggtgacataatgcatttaaatttgggatttgggtggagtattatgtttaactggagttgtcaagtatgagtccctcaggaaaaaaaaaaattctgttttaaaaagcaatctgattcttagctcttgaaactattgctacttaaatttccaataattaaaaatttaaaatttttaaattagaattgccaatacttctacatttgagaagggtttttttagaaatacatttagtaaagtccccaagacattagtcttacatttaaacttttttctttaaaacatggttttggtggttaacttttacacagttctgagtactgttaatatctggaaagtatcttgagatatcagtggaaagctaaacagtctaaattaacatgaaatacttcattttgattgagaaaataaaatcagattttttcaaagtcaaaaaaaaaaaaaaaaaaaa

SEQ ID NO: 284232 - DNA, 1000 bp, Homo Sapiens; identical to SEQ ID NO: 115284

SEQ ID NO: 284233 - DNA, 1000 bp, Homo Sapiens; identical to SEQ ID NO: 220712

SEQ ID NO: 284234 - DNA, 1000 bp, Homo Sapiens; identical to SEQ ID NO: 115285

SEQ ID NO: 284235 - DNA, 1000 bp, Homo Sapiens; identical to SEQ ID NO: 115286

SEQ ID NO: 284236 - DNA, 1000 bp, Homo Sapiens; identical to SEQ ID NO: 115287

SEQ ID NO: 284237 - DNA, 1000 bp, Homo Sapiens; identical to SEQ ID NO: 115288

SEQ ID NO: 284238 - DNA, 930 bp, Homo Sapiens
atggccagtacaagtaatgtgactgagttgattttcactggccttttccaggatccagctgtgcagagtgtatgctttgtggtgtttctccccgtgtaccttgccacggtggtgggcaatggcctcatcgttctgacggtcagtatcagcaagagtctggattctcccatgtacttcttccttagctgcctgtccttggtggagatcagttattcctccactatcgcccctaaattcatcatagacttacttgccaagattaaaaccatctctctggaaggctgtctgactcagatattcttcttccacttctttggggttgctgagatccttttgattgtggtgatggcctatgattgctacgtggccatttgcaagcctcttcattatatgaacattatcagtcgtcaactgtgtcaccttctggtggctggttcctggctggggggcttttgtcactccataattcagattctcgttatcatccaattgcccttctgtggtcccaatgtgattgaccactatttctgtgacctccagcctttattcaagcttgcctgcactgacaccttcatggagggggttattgtgttggccaacagtggattattctctgtcttctccttcctcatcttggtgtcctcttatattgtcattctggtcaacttgaggaaccattctgcagaggggaggcacaaagccctctccacctgtgcttctcacatcacagtggtcatcttgttttttggacctgctatcttcctctacatgcgaccttcttccactttcactgaagataaacttgtggctgtattctacacggtcatcacccccatgctgaaccccatcatttacacactcaggaatgcagaggtgaaaatcgccataagaagattgtggagcaaaaaggagaatccagggagggagtga

SEQ ID NO: 284239 - DNA, 1000 bp, Homo Sapiens
ccattaatcccttatatagcatttcccagtaactgggacaaccaaaaacacaccgacatattagaaatgctcctgaaaagtggcaacaccgcctaactcagtaccaggacctcttttaaattcaatttcttttttctttcagagagataacaaacgaattcattatttcccccattcacatcttaccacaaattatttttatcaggttaaaactggtcatctacggaattgtagaaaggtgacataggaactgtcttcactgctggaagaataaaagagtctgaggtatagacactgccctggtgacaccttctcagaacattgttgggggacaggggaggcaggcgcaagtaggggatagaatctgaccctgacatgcagctatcacctggcagagagactcgtcaaagcaaattataacgaccagtactatttttttttggaattgaaaacccaagaagccctaaaataagaacagtgagatcaaaggctggtttctaaaacaatgcagaaaatagaaccatgttggaattcctaaattctagctttcaaatactactgtttccaacagtgaatccttgacagagactgaatgcagatggaattttgaaacattttcagtagctacctcctctcctgaaattcctataagtggcagaggaaaatccaaatcctttaatataacatgtccatctcatgactcctgcttacacacatttgtgttgatttgcttcatttctggaggatgggaatttgcagagctggtgacatttccttcattagacaccagaaattcaccagagagagacagatctgtgccttctctttttaggatctggttattgatactttaataaatgtggtgtaaagaaaatccatggctacagtctgtatagaaaatgtgaattttttaaataagattgtgttcttaatgtaaaaaataaaagtttatttgtattcagtgaaatgcctaataaagtcctggtaccaataaaaaaaa

SEQ ID NO: 284240 - DNA, 1000 bp, Homo Sapiens
ttatagtcaagatgactccaacagaaagaactttgatgcatacagattgtatttgcagtctcctcatagctatgaagatccttattttgatgaccgagttcactttccagcttctactgattactcaacacagtatggactgaaatcgaccacaaattatgtagacttttattccactaaacgaccttcttatagagcagaacagtacccagggtccccagactcatgggtgtagcatcaagatgcccaacagaggaactctttctttctaaccttgttcagattgaggtgaaaagtccatcttgctgatttgatgattgaaatgtgaaagtgaagtggaaggaatgaatgaagtgtgttttttttttcttttttgaggaattatcagggaagtgaggaaatgtttgggagaggactttctaagctctatttaggtgttagatctaattacttatagattctgtagtctggtgaaggtgtgggtgacgtgatgagaggtttgagaaatgggtgaaatgaaatgggggatatgtaggtcaaatcaaattaaagatgatttttttaatgtgaataaagttatgttctgatagtttgtacagaaaaaataaaatggatgcccatgttttattgctattactaaatgtcaagattgtatgctattatgtcttgtaaatttcttttgttggtgtaaatatggaaatgccacattggttaagtgccatcatttgtaatgcaatgtgtcacttgaaaagagatttgaagaaactgacaacttcaaaaacaaatgagaagcccaaggaactgtgagcaattaaaagcaaaccgcgacaccctttgtctccaccacacatagtgtactttggaagcacaacgtccaggctggtaccgcagcgccatgcccattcctcgcctcgttcataggacacttcactgccattttctattcacataaaagaaaaataaatgtggaaatttcatccttggaaaaaaaaaaaaaaaa

SEQ ID NO: 284241 - DNA, 945 bp, Homo Sapiens
atgtcgaatgaggacatggaacaggataatacaacattgctgacagagtttgttctcacaggacttacatatcagccagagtggaaaatgcccctgttcttggtgttcttggtgatctatctcatcactattgtgtggaaccttggtctgattgctcttatctggaatgacccacaacttcacatccccatgtacttttttcttgggagtttagcctttgttgatgcttggatatcttccacagtaactcccaaaatgttggttaatttcttggccaaaaacaggatgatatctctgtctgaatgcatgattcaatttttttcctttgcatttggtggaactacagaatgttttctcttggcaacaatggcatatgatcgctatgtagccatatgcaaacctttactatatccagtgattatgaacaattcactatgcatacggctgttagccttctcatttttaggtggcttcctccatgccttaattcatgaagtccttatattcagattaaccttctgcaattctaacataatacatcatttttactgtgatattataccactgtttatgatttcctgtactgacccttctattaattttctaatggtttttattttgtctggctcaattcaggtattcaccattgtgacagttcttaattcttacacatttgctcttttcacaatcctaaaaaagaagtctgttagaggcgtaaggaaagccttttccacctgtggagcccatctcttatctgtctctttatattatggcccacttatcttcatgtatttgcgccctgcatctccacaagcagatgaccaagatatgatagactctgtcttttatacaatcataattcctttgctaaatcccattatctacagtctgagaaataaacaagtaatagattcattcacaaaaatggtaaaaagaaatgtttag

SEQ ID NO: 284242 - DNA, 939 bp, Homo Sapiens
atgagaaattccacagcagtaacagactttattcttcttggattgacaagtgacccacagtggcaggttgtacttttcatatttcttcttgttacctacatgttaagtgtgactgggaacctgatcattatcaccctcaccctttcagatccccatctgcagactcccatgtatttcttccttcggaacttctcattcctggaaatttcattcacgtctgtctgcattcccagattccttgtcactgttgtgacaggaaacagaaccatttcttataatgggtgtgtggctcagctattttttttcatcttcttgggggtgacagaattttaccttctggctgccatgtcctatgaccgctgcatggccatctgcaaacctcttcattacacaatcatcatgagcaccagagtgtgtacccttcttgtctttagctcctggcttgcagggtttctgatcatctttccaccagtaatgcttctgctgcagttggatttctgtgcctccaatgtaattgatcattttatctgtgactcttctccaatgctgcagctctcttgcacaaacactcactttctagaactcatggcattttttttagctgtggtaacactgatggtcaccttgacattagttattctctcctacacaaacatcatccggacaattctgaaaattccttctatgagtcaaaggaaaaaagccttttccacttgctcctcccatatgatagttgtctccatctcttacagtagctgtatcttcatgtacattaagacttctgccagagaaagggtgactttaagcaaaggagtagctgtgctcaatacctcagtggctcctctcttgaatcccttcatatacacactgagaaataagcaagtgaagcaagccttcaagagcatggtccagaagatgattttttctttaaataaatga

SEQ ID NO: 284243 - DNA, 945 bp, Homo Sapiens
atggatgtgggcaataagtctaccatgtctgaatttgttttgctggggctctctaattcctgggaactacagatgtttttctttatggtgttttcattgctttatgtggcaacaatggtgggtaacagcctcatagtcatcacagttatagtggaccctcacctacactctcctatgtatttcctgcttaccaatctttcaatcattgatatgtctcttgcttctttcgccaccccaaagatgattacagattacctaacaggtcacaaaaccatctcttttgatggctgccttacccagatattctttctccaccttttcactggaactgagatcatcttactcatggccatgtcctttgataggtatattgcaatatgcaagcccctgcactatgcttctgtcattagtccccaggtgtgtgttgctctcgtggtggcttcctggattatgggagttatgcattcaatgagtcaggtcatatttgccctcacgttaccattctgtggtccctatgaggtagacagctttttctgtgaccttcctgtggtgttccagttggcttgtgtggatacttatgttctgggcctctttatgatctcaacaagtggcataattgcgttgtcctgttttattgttttatttaattcatatgttattgtcctggttactgtgaagcatcattcttccagaggatcatctaaggccctttctacttgtacagctcatttcattgttgtcttcttgttctttgggccatgcatcttcatctacatgtggccactaagcagctttctcacagacaagattctgtctgtgttttataccatctttactcccactctgaacccaataatctatactttgaggaatcaagaagtaaagatagccatgaggaaactgaaaaataggtttctaaattttaataaggcaatgccttcatag

SEQ ID NO: 284244 - DNA, 1000 bp, Homo Sapiens; identical to SEQ ID NO: 220715

SEQ ID NO: 284245 - DNA, 1000 bp, Homo Sapiens; identical to SEQ ID NO: 220716

SEQ ID NO: 284246 - DNA, 954 bp, Homo Sapiens
atgcagaagtcagtaatgagaaaacacacagcaataacaacattcatccttctgggactgacagaagatcctcagctgcaggttctgcttttcatgtttctatttatcacctacatgttgagtgtaacagggaaactgaccattatcgccctcaccatgttggatccccacctgaaaacacccatgtatttttttctccaaaatttatctttcttagaaatctcatttacagctacctgtgttccaagattcttatacagtatctcaactgggaacaaaataataacgtataatgcatgtgtcattcagctattttttgcagacctctttggggtaactgaattttttcttttggctaccatgtcatatgatcgctatgtggccatctgcaaacccttgcattatatggcaatcatgagcaacaaagtgtgcaaaacaatggttatttgttgttggatggcagcacttatgattatcctcccaccacttagcttaggttttcatctagaattctgtgactctaatgtcatcaatcattttggctgtgatgcattgcctattctgaaaataccatgctcagacacatcattaattgagcagatggttgtagcctctgctgtattaacctttattatcactcttgtatgtgtagttctgtcctacacatatatcataagaacaattctaaaattcccttctgttcaacaaaagaaaaaagccttttctacctgttcttcacatattactgtggtttccatcacttatggcagctgcatcttcatctatatcaagccatctgcaaaagaagaggtaaacattaataaaggtgtgtcagtgcttatttcatccatatcacctatgttgaattctttcatatatactcttaggaatgagcaagttaaacaagcctttcatgactcactcaaaaaaattgcatttcgtttaaaaaagtaa

SEQ ID NO: 284247 - DNA, 727 bp, Homo Sapiens
gctgttgagactccaggggtgttcggggctgggagcctgctgagtgttccctgttcccacctccaatctgctccatcctccagctgcatttcattccggatctaccaggatccaactttactactgtcatggagggaattacagtaattctaccaacttttgaggcaaccttcttctgacactgtgtgaaacagactgaaaagactctaaagatggagagagctcaatgcttgagaaaaggaattctgtcctttgaaaggtctctagaacaaaggagtcttattctgtcacctaggctggagtacagtggtgcaatcacagctcactgcagcctcgatctcctggactcaactaatcctcctgcctcagccttctgggtagttgagactacagatacagaagatgagagagagaaaaagagagaaattacagagtgacggagaaggcagacatcatgcaacatgctcaagggctattcattttaagctgaaacatacatgtgtagaaagcatccttgtacttataatcccaatgactatgaagaaaaataatttagccaaatagttcctagaacaggaaaaataaggaattatattttgagataagaagttaagctctagtataacaatgatatgggtcaaagaaaaatgaaaacaaattttaaaaacgttgcaacatgaataaaagtttcaccaaatcgggagtctattataaaaaaaaaaaaaaa

SEQ ID NO: 284248 - DNA, 939 bp, Homo Sapiens
atgtcgtccagcagcagctcccatcccttcctattgactggttttccaggcttggaggaagctcatcactggatttccgtatttttcttgttcatgtatatatccatcctttttggcaatggcaccctccttcttctcattaaggaagatcacaatcttcatgagcccatgtacttctttctggccatgctggctgccacagacctggggctggccctgaccacaatgcccacggtgctgggagtcctctggctggatcacagggagattggaagtgcggcctgcttttcccaggcctactttatacactcactttcctttctcgagtctggcattctgcttgccatggcctatgaccgttttattgccatctgcaaccctcttagatatacctctgtacttactaatactcgagtagtgaagattgggctgggagttctgatgaggggatttgtatccgttgttcccccaatcaggcccctctatttttttctgtattgtcactcccatgttctttcacatgcattctgccttcaccaggatgtcattaaactcgcctgtgctgataccaccttcaaccgactgtacccagctgtgcttgtagtctttatatttgtgctggattatctgattatcttcatctcctatgtgttgatactcaagactgtcctgagcattgcctccagagaggagagggccaaggctctcattacctgtgtctcccatatctgctgtgtcctggttttttatgtcacagtgattggattgtctctgattcatcgttttggaaagcaggttccacatattgttcacctcattatgagctatgcctattttctgttccctccactaatgaatcctataacatatagtgtcaagaccaagcagattcagaatgccattcttcacctttttactacccatagaattggaacctga

SEQ ID NO: 284249 - DNA, 1000 bp, Homo Sapiens; identical to SEQ ID NO: 115291

SEQ ID NO: 284250 - DNA, 1000 bp, Homo Sapiens; identical to SEQ ID NO: 220717

SEQ ID NO: 284251 - DNA, 1000 bp, Homo Sapiens
ggtcacagcagatgtagctttttacactggaaatcttcaagccttaaaaggccttaaagatttggacctaaatatggccgaaatttgggagcagaagaggtgatgtcatcctggaaaactgggtagttcatctgaccatgggatgtgtttgttatgaagaaaatctggatgcctgtgattcgagaattgaacctgaaacccaaagtgaactggggtgggggaagggaaaaaggaaagtatcaagtgttgggaaactggattcagtgggatctacaaggaatgtcatttttgtgcatcctacagtgaggagtaactgatcaggtgtctataacatttttcattctctctggaaacagactcaggtttctttggaccaaatccaaaagaacacatagctgtaacacagctgtagttgactagaatgctctgtatactttatattaaaaaatgctttgcatttcttccagtgcaatgaaattcatatggtgtcccaccttatttaatgatggtacaatttaaaatcttagtcaacttctgtagaaagttttctctatgaaagtaaagctgtttgaaaaattattatttttttacagatctttctataaaaaataaacatcttttgattgcttggatttaggaattcaatttttgtttcagtgaccaatgtcaagttgcaggctttgtgtgttgcatatttaatatttctactaccaccgtatgtcaactgggtaaagccttccagagctctctaaatacctgaaagacttaagcctttttttaagtaattaatacttaaaaaaaaagatcctggcatctatttatgcaactaaatacttttcagaaatggtatataaaaggctacagtttaatatctgtatttttataaaagtatgatgaagggtttggggtgtttttatttgtagcagaggtaagaatatgtattcatataatctgcctacttttgagttctcatattaacatttagataacatatgaagta

SEQ ID NO: 284252 - DNA, 1000 bp, Homo Sapiens; identical to SEQ ID NO: 115292

SEQ ID NO: 284253 - DNA, 1000 bp, Homo Sapiens
gacaaaatccaatagtcagcaggatgtcatattaacaacacaagatatttttgaggatgatatatttgctacggaagcaattaaaccctctcagaaaaccagagagaaggagaaaacattggaatctaatttatttgatgataacattgatatctttgctgacttaactgtaaaaccaaaagaaaagtccaaaaagaaagtggaagccaagtctatatttgatgatgatatggatgacatcttctcctctggtatccaggctaagacaaccaaaccaaaaagccgatctgcacaggccgcacctgaaccaagatttgaacacaaggtgtccaacatctttgatgatcccctgaatgcctttggaggccagtagagcacacagggtatccacatgttaccctgcagctacattgttgagttagtgatgatgttgtatatgctgatggtcttaactggattacaaaaagcaaatactagaacagctagctcatcgttcacccaatgtacttggtatttttctgcactggtttaatcatgcttaatactacaaaacaaaaataaatatttcacagtggttggtttgttttgtttttaaaccacagtttgatttagttagccttgctggggccataatatgcttcagggtgtgtaaaagaagaaatctctttgtggctttcatgggcagggaatcccagagatagcaaatgccacctgaccagaagtctttgttatatggatgggaaccctaacttagggcctgggcaggggaaagagaaagaaggtgagagattatacttcatgagtcttagcaatatgggagcaggttttcactgaattctgagggtgcctctgcatgtcctccaaggcaaagtttggcaaactgtggcccccccactgtcatattttgttaataaaattttattggaacacaaccacaaaaaaaaaaaaaaaaaaaaaaaaaaaaaaaaaaaaaaaaaaaaaaaaaaaaaaaaaaaaaaaa

SEQ ID NO: 284254 - DNA, 1000 bp, Homo Sapiens; identical to SEQ ID NO: 115294

SEQ ID NO: 284255 - DNA, 1000 bp, Homo Sapiens
cattgtcattgcagctcccgaaggcctccgatggttccaactctatgtgcatccagacctgcagctgaacaaacagttgatccagagggtagaatccctaggtttcaaagctttggtaataactttggatacacctgtatgtggcaacaggcgacatgacattcgaaaccagttgaggaggaacttaacactaacagatcttcaatcacctaaaaagggaaatgcaataccttatttccagatgactcctatcagcacttctctctgctggaatgatctctcctggtttcagagcataactcgattgcccatcatcctgaaagggattttgacaaaagaggatgcagagttagctgtgaagcacaatgtccagggtatcattgtttccaaccatggtgggaggcagcttgatgaggttcttgcttcaattgatgctttgacagaagtggtggctgctgtaaaggggaaaattgaagtctacctggatggcggggtccgaactggcaatgatgtgctgaaggctctggcccttggagctaagtgcatttttcttgggagaccaatcctatggggccttgcctgcaagggtgaacatggtgttaaggaagttttgaacattttaacaaatgagttccacacttccatggcccttacaggctgccggtcggtcgctgagatcaatcgaaacttggtccagttttccaggctgtaagaaaaaagggccaataaccagactgctgaggttgcccacaggaggatcacaaactcacagcacagtgtgtgatgctgtccttcctggaccccattctgtccggaggctcatggcccatatttcccacatttctaataccaccacccctgtgcttcaggccctccaaacccctgtgttccccaaatgttccatgcccttctttgtatcactgactattatatgttgctctcttgcctaaatcttcctctgaagtaaaagatctcaaaaggacagatcattaatgactgg

SEQ ID NO: 284256 - DNA, 1000 bp, Homo Sapiens
tgtcggggctcacttgaagcctgtcagggatgctttgtatctaacacaacgccaacagaagcacatttgtcttccagaacaccgtgccttagaaatgctttagaatctgaactttttaagacagacttaataatgtggcatattttctagatatcacttttattaggttgaactgaaagggtttttgtaaattttttggccaaaattttttaaaacatacttactttggactaggggtacattcttacaaaataaataaacagtttttaaaattgtttagacacagatatttggaattagctatcttagtgccaactgctttttatttttttacttcatcaaggtgatgtaagtgactcacctttaaagtttttttagtgttattttttatcactactctgggaaatggtttgtcttcaagatgcaatacttttcttagtaaaggaaaaacagcataaaaagatacctggtctgccttgtacaagaaaaggcaatattagaggaagaaaatttaaagaaaagctagaggaaaaaaaaattttttaaaaaatacttattagaagcaaactgcccttgcatggaaaactgtttatttttttcagtgaaaaggaattctgctttcgtgtttttgggaaagcaggaactgagttcattacatctttaatttggcagaaattagcctttctgtgaaccagatgtggtttggggcagatctgtagtaaacaatggtgattttatttatttttactctctggaaaaggagataatacaattccagaaagtgaactcatatttctaaggttaagattcccttttattgcacctagaatagtgctatgcacagagcgggtgcttgagttgttgtcgttttttgtttgttttttaaatgtaaactggtaaattttgtgcttatcttcaaggctggcttaagtataaaattgttttttaaacacttgaaaaattaaaggatttgttttatattaaaaaaaaaaaaaaaaaa

SEQ ID NO: 284257 - DNA, 1000 bp, Homo Sapiens; identical to SEQ ID NO: 115296

SEQ ID NO: 284258 - DNA, 1000 bp, Homo Sapiens; identical to SEQ ID NO: 220720

SEQ ID NO: 284259 - DNA, 1000 bp, Homo Sapiens
tccgattgcaatttgcaacctccgctgccgtcgccgcagcagccaccaattcgccagcggttcaggtggctcttgcctcgatgtcctagcctaggggcccccgggccggacttggctgggctcccttcaccctctgcggagtcatgagggcgaacgacgctctgcaggtgctgggcttgcttttcagcctggcccggggctccgaggtgggcaactctcaggcagtgtgtcctgggactctgaatggcctgagtgtgaccggcgatgctgagaaccaataccagacactgtacaagctctacgagaggtgtgaggtggtgatggggaaccttgagattgtgctcacgggacacaatgccgacctctccttcctgcagtggattcgagaagtgacaggctatgtcctcgtggccatgaatgaattctctactctaccattgcccaacctccgcgtggtgcgagggacccaggtctacgatgggaagtttgccatcttcgtcatgttgaactataacaccaactccagccacgctctgcgccagctccgcttgactcagctcaccggtcagttcccgatggttccttctggcctcacccctcagccagcccaagactggtacctccttgatgatgacccaagactgctcactctaagtgcctcttccaaggtgcctgtcaccttggccgctgtctaaaggtccattgctccctaagcaatagagggcccccagtagggggagctaggggcatctgctccagggaaaggaaccctgtgtccttgtggggctggagtcagagctggatctgttaaccgtttttctaatttcaaagtacagtgtaccggaggccaggcctgatggcttacacctgtaatcccagcattttgggaggccaaggagggcagatcacttgagatcaggagtttgagaccagcctggccaacatggcgaaaccctgtctctactaaaaatacaaaaaaataaaataaaataaaaaatta

SEQ ID NO: 284260 - DNA, 1000 bp, Homo Sapiens; identical to SEQ ID NO: 115298

SEQ ID NO: 284261 - DNA, 1000 bp, Homo Sapiens; identical to SEQ ID NO: 115301

SEQ ID NO: 284262 - DNA, 1000 bp, Homo Sapiens
tttctatcagctgagcaacctctcaagaaaaaataaataaataaataaacctctctttaaatagcaccaggctgctgggtgtggtggctcatacctgtaaccccagcactttgggaggctgaggtaggaggattgtgggaagccaggagttcaagaccagcccagccaacattgtgagacataatctctacaaataaaataaattagttggacatgatggtgtgcacctatagtcccagctactcgggaggctgaagcagaaggatcacttgagtctgagaattcggtgttgtttaagccaccctgttgtggtatctgctatggctgcacaggcagaaatagggacacaagtgcaggttcagggcaaggtgtgtgagcacactcagtccctggcctcggagtctctctggatggcttcttgcctagggtgactgacagagggagggatgatatgcaaaggcacctgttctcctcatgacctaaccccaattcttactccacgggttcatgacagcctattctgctggagactgtgtcttaaaacttcctcccctagtttctctcaagtacccctcgtgagctgtgatttcactgggctttgaactcttaggccatttgaggctgcagtgagctatgattgtatcactgcactccagcctagatgacagaacgagaccccatctctaatgaataaataaatatggctgggcacaatggctcaggcctgtaatcccagcatttggaagaccaagacaggcagatcgcttcagctcaggagttcgagatcattctggccaacaaggcgaaaccctgtctctaccaaaaatacaaaaattagccaggcagggtggcatgtgcctttaatcccagctacagggaggctgaggcaggagaatcacttgaacctgggaggcagaggtttcagtgagctgaaattgtgccactgcactccagcctgagtgacagagtgagactttgcaaccaaaaaataaaataataa

SEQ ID NO: 284263 - DNA, 1000 bp, Homo Sapiens; identical to SEQ ID NO: 220723

SEQ ID NO: 284264 - DNA, 1000 bp, Homo Sapiens
gggtacctaggagtcaggacttttgacttcaggccagtcatttcctcccgatggggaaagggtgagatttacatccccaaatgcttgagtccctcagtgaaagaattagtttttgtttgtttgtttaagattttggggaagagatttgaggaggaaagaaaggagatggggtgagagggtttttaagtctgaaactctctgtcatgagctgtccccatggttactcaaggacaaggggggacagttttgcctacagctccagagacacagagaacaaaggggtgaccttcatttttcttcaagccggcctctgtgggggtctgtgagcagcttctactggatctttgtttggattctgtgtctgtatttataatttatttgaaatgtgctgggtagtgttctcatttgggggctgaagttagcaactgggccttcagctagggaaagcagttgcgggcagggggtggggggagattatattcactcctgccaaggactcccagcccaggactctctttagagcaaggaagcctcgttctctttcttctcaagaggctctcttgttctccatcaggagagccttgatttaggctacggcctcactctctatggccaccctaagaggaaaggctacttcacctcattacctccagagggctgggcagggccaagtgcctcataggactcatgttctctccaaccagggctggcatcactgctttgcaaagtggggcctgaggtagaagaaggtgtctggtttctccagctgctgtaggaggctaatgggcagggtacttgccctttgtcccactagactctaacccagcaccagggtgcccacctaggacctttcctggacatgagtttccttcactatcatagtcatgagcctcctacttctgggattgcagatcaggggtggggggagaatgttgcatgttgttttctggtgcttgttattatatatttgaataaacagtgctgcaagtacttgccatga

SEQ ID NO: 284265 - DNA, 671 bp, Homo Sapiens
agcgcggcggggcgatgtgtgattaccatggcgaggagtctctgtccgggggcctggctaaggaaaccctattacctccaggctcgcttctcatatgtgcggatgaaatatcttttcttttcctggttagtggtttttgttggaagctggattatatatgtgcagtattctacctatacagaattatgcagaggaaaggactgtaagaaaataatatgtgacaagtacaagactggagttattgatgggcctgcatgtaacagcctttgtgttacagaaactctttactttggaaaatgtttatccaccaagcccaacaatcagatgtatttagggatttgggataatctaccaggtgttgtgaaatgtcaaatggaacaagcgcttcatcttgattttggaactgaattggaaccaagaaaagaaatagtgctatttgataagccaactagaggaactactgtacaaaaatttaaagaaatggtctatagtctctttaaggaccagcaccggtaattgtgccaaacttttgcgaagcactgctccagacagcaatcagtgatgccaaacgtcggtttgttcggaacacgctatgtcccacttcgaaaacctagcctcaaataacaactacgtacctctcgaaaaaaaaaaaaaaaaaaaaaaaaaaaaaa

SEQ ID NO: 284266 - DNA, 1000 bp, Homo Sapiens
cgacagagtgagactctttctcaaaaataaaaaaaaaaaagaagatatgaaaatcagatacataccatctttttagttcctaaggctctcacaagattattttgaataaacaccacccattcaaactggtttttccctttcctgtattatatgaaggggaaaatcctcatgggatggatagtttccagaatttgcccatttccaagccagtacagtaaatgacactggggccgctgagtggaccactgtagaaagcaatggttcttgtttcttattttttacattattttcagggatgtgtgtcccatcaaagtctcattatggaggagttgaattttcccgggacacctatggcagggctgccagacaccagcctaaactgctctcactctcatttccagaccaagggcctctggtggcctgtagggagccatgggcaatcacagcaaccctctctgaggccaaggaagttcaggtatgagctgtacctgaggctgccctggcctctcctctcccgtcagtcctcactgggtgtcttctcaccctgccctctgccagctccactgctttccctgctgggtttcattgcttgtgcaaggaagatacggaagccacacaatgggttggttctttctagcccttcccagactgactataggccagcggggtctgtatctagaaatcttttattactctaagttgaacagtttaatgattagtcattttaatttagagttgagattccattagtatttgactgtggccttcttattgagaactctgttcaactttgaaatgccaaagcaggagcctttgttctttgatcctgccgtgagttaagaaattctgtatttcttcagaagtgtttcattttgtgtaatgaagtcaagggttagagtgactcagtgttccatgagttaagtgtctttgtagaatgaacagtaaacttatctcctaataaaaaaaaaaaaaaaaaaaaaaaaaaaaaaaaaaaaaaaaa

SEQ ID NO: 284267 - DNA, 1000 bp, Homo Sapiens; identical to SEQ ID NO: 115303

SEQ ID NO: 284268 - DNA, 1000 bp, Homo Sapiens
gtgaccaggagtcgacgtgtgcagaagtcctggtaatctggtccttgttcccgtctggataccagcttccttcagcagcgcaggcggtggtccctgaggcccgtggaaggagtcaaacttgcgggaattttgcagtcattgtattcaaagaagaataagcaagaaagaaaagaaggaaggaagagaggtagacagatacaagatgaaatcctgtcaaaaaatggaaggaaaaccagaaaatgagagtgaaccaaagcatgaggaagagccaaagcctgaggaaaagccagaagaggaggagaagctagaggaggaggccaaagcaaaaggaacttttagagaaaggctgattcaatctctccaggagtttaaagaagatatacacaacaggcatttaagcaatgaagatatgtttagagaagtggatgaaatagatgagataaggagagtcagaaacaaacttatagtgatgcgttggaaggttaatcgaaaccatccttacccctatttaatgtagtttaccttgatttttatctgatattaacaataccatatagcttgctttttattagcatttcctgatattcctttgtccatatttctacttataacctgttgctattaatggttttagatgtatctcttgttatctgcatctcattgtttattgtattttgaaccaatctacaagtctctgtcttttaataaaagaactttacacatttgtaaaaaagaggttcttggtaagatataaaatggaaaaaggctaagtaatatgtgaatatcatatttttgaaaggtaaaaagtacatttgtatattacatatatggacataacttgtgaaggatgaaagaaagtacagcctctcggtggtgggattatgaatgatttttctccttttgcttgtttgtattttctatattcctaaaattaacacacattattattgctagaataataaaagttttataaaaaagaagcaacaaaaaaaaaaaaaaa

SEQ ID NO: 284269 - DNA, 1000 bp, Homo Sapiens
tcaaagattagaacgactccgaaaagagagacaaaaccagatcaaatgcaaaaatattcagtggaaagaaagaaattctaagcaatcagcccaggagttaaagtcactgtttgaaaaaaaatctctcaaagagaagcctccaatttctgggaagcagtcgatattatctgtacgcctagaacagtgccctctgcagctgaataacccttttaacgagtattccaaatttgatggcaagggtcatgtaggtacaacagcaaccaagaagatcgatgtctacctccctctgcactcgagccaggacagactgctgccaatgaccgtggtgacaatggccagcgccagggtgcaggacctgatcgggctcatctgctggcagtatacaagcgaaggacgggagccgaagctcaatgacaatgtcagtgcctactgcctgcatattgctgaggatgatggggaggtggacaccgatttccccccgctggattccaatgagcccattcataagtttggcttcagtactttggccctggttgaaaagtactcatctcctggtctgacatccaaagagtcactctttgttcgaataaatgctgctcatggattctcccttattcaggtggacaacacaaaggttaccatgaaggaaatcttactgaaggcagtgaagcgaagaaaaggatcccagaaagtttcaggtgcttgtgactaaattcactaatttcactggctgtcaaggctgtgttaaggaaaatgggtttgaactgctgtgggttttgagtactggactggatgtcagaaacctttgccatcacgggaaattctgtcactctggatttactgtctgttccccacagctaaattcctctgcagtgtgatttagcaccctggatccccatcaaccagttttggcatttatttgaatgcattaccccactggtttccataaactattttacaattgtttaaaataaatgactgtttatttccacaaaaaaaa

SEQ ID NO: 284270 - DNA, 1000 bp, Homo Sapiens; identical to SEQ ID NO: 115304

SEQ ID NO: 284271 - DNA, 1000 bp, Homo Sapiens; identical to SEQ ID NO: 220725

SEQ ID NO: 284272 - DNA, 1000 bp, Homo Sapiens
agtcttaatattaaaagcagcttgactaaatacctgatttaaaaatagaagacatccccagtcctcatgacataccgcaaatatctgtggggtcctgttgaaaagaacaaaataaaggagcccaaggggtcattctgtctcagcaccatccagcctggcacttctcttcccatatatccattggatttttttttttttttcctaaacaaagtttttacactgagcagatgctctgtcatgatggcggttgtgcaattctggtatcctctaaatttgtaagcattcataaaacaggaaaaagtaaactatcattcggaagcacagcccattcctcccattttttgcaatgatgtctggatgttattttaaacagtgtgtctgtgtgttcccaaatccagctggccccaccagctcagattccattttttttgtgtgtgtgtgtgaaacgtagtctgcaactctgcctcccggcaattatacatgtgtcaggatgtcaaaaagcaattctcctgcctcagcctcctgagtagctgggactacaggttcctaccaccacacccggccaatttttgtatttttagtagagatggggtttcaccgtatcggcgaggatgatctctatctcttgacctcgtgatctgcccgcctcggcctcccaaagtgctgggattacaggcgtgtgccactgcgctcggcctcagattccatatttgaacaccagctgattgagagaaggggaatgagaagagctggatgagtttaaataactcattgttcagattcctgaacaggagttgggataatggccatcttttctttcctatcctttcttcccccctcactgtgaaaaataacagtccaccccaagtcatacactggacccagtgcctgcggggacaggactgtgggtttcttggtcacacctgtgttggtgctcaatgcagtgtagacatgttttcaaataaaacaaatgattgtgtacaaaaaaaaaaaaaaaaaa

SEQ ID NO: 284273 - DNA, 1000 bp, Homo Sapiens
ggacaatcttggctattctgttggctttcatcatcacttgggccccatacaatgtcatggtgctcattaacaccttttgtgcaccttgcatccccaacactgtgtggacaattggttactggctttgttacatcaacagcactatcaaccctgcctgctatgcactttgcaatgccaccttcaagaagacctttaaacaccttctcatgtgtcattataagaacataggcgctacaaggtaaaatatctttgaaaaagatagaaggtgggcaaggggagcttgagaagaataaaagggataaacgagctcctagttttaaaatctctgccattgcactttatagtctgattacaaaacgtgcaattcaggagcccagcagtgacacacttatcacgcctaggctccagtttgcaaaaattgcaccttataaactgtcagtattaggagcaatgagacaatgaaagaaacatgttgggatcgtggatttaagaaactatacactgtttctcataatctcttgaagaagggcttctgattctacaattttatcagtctctgcacaagaggaataaccttgttccttttttgttacttttgttgttgttgttctcatgtgtccttaagagaaggaaatgccacagttacaaggtaaacatggagacttaaacataaagaaataggcactatacaatggggacataaaaaaagaaaatcaaagaaggatgcagaaattgtctccggagtgttaagcatattttattcttttgttacggtcctatttagaggattggaatgtaataaatgcttattttttgcctttctttttcccaccatgaagagaaagcaaacaaacagaaaccccaactaggtcacaccatttttcttcttgttatgccactattttgtacatccctgttctatattgtttatagggaaaacctacaggactttcactaaagctagccagagacagccatgaaaatggacgtttcacccctc

SEQ ID NO: 284274 - DNA, 1000 bp, Homo Sapiens; identical to SEQ ID NO: 284273

SEQ ID NO: 284275 - DNA, 1000 bp, Homo Sapiens
gggtatgcggcagccgtgtgatttgcccatcccctagtacacgcagccagcgacacaagcacacagcgaccagtccccacgctgtgccacacaccctccagcggtccggcgcgcagcccctgctccacagcccgggacgcctgcagccaccgccagggtcatggccatggcccacgcagggctctgcgggtggagaggggaagtcagcctagactccagagagaaaccctggggcaacccgaaaggcctgaggaaaactggaattggggttaggcatgaggggagggagtctctggggaaaacgggccgggctgtgcggagccctgagggctcctgcggctgcagcgctgcaggccgcccgcgtctcgccccgccccgccgctgggcgtccccgccaggagcccacccgcgggcggcagcttttctccatgctgcccagggaagttcgatgcctggtgctgggatgcgccagcgcttctgttcgcttctggcaatcctggcgtctcccaatgagagggctctcaaaatgaagcttttaataaactccagagtaaggaactcgggattgtgcggcaaaggccgcgcattgcactttgtgagcaatcggtaaatatgcgcaaccatatgataggaaatatatgcattttcattgataagaaaaaaagagatgatggtatttttaaacagaagccacaaacaggcatacctgtgccattgttggggagctaataataaaggcactgatgatcacaggagtaagaacaattgacttggccaagagacaattttaagctgggaactgtattcggctgcagttcagaaagtggacttttgagacttgtcaaacgaatggaagaattttgtgccaacaatgtcccagctttgcaggcttggcagctgaggactcagaagtaacaaattaatgccaggtgaattattattgttactactattatcaaaatgtgttccagttgcagcaatacaatggataagcaacttc

SEQ ID NO: 284276 - DNA, 1000 bp, Homo Sapiens; identical to SEQ ID NO: 220726

SEQ ID NO: 284277 - DNA, 1000 bp, Homo Sapiens
agaatctgaagaactttccagagtgtgcccatatttacctgatcagagagaaaagaaaatctgcagaggaagctgagcctggctgcttgtcatagctgacacagagccatctgccacaaacctgtggcggcttcagatctccaatccctgccaccaccccaactcaaattaaatacagattcctagagacgttatgatggttacacatgtcctcggcatcacatgtaggagactgttcaaaaaaaatatgtggcctgttgtataaccgcactcatgtatcccatatgtggtgccacattgaatttccggttgaatccgtttttatcctttgtactggatgacatggtgcctgaattctttcttttcgccgacacgatggcagccaaactgcagcttcaaacgctcacacttggctgggtttctacctaggttgccaggttatcatcggagccttcttgtgtcctcaaagggccacgaggcctgaaaggaggatcagaatgctttgggattaattgggcagccatcgcagaattgtttgtgggcaaagggctgctttagcacttttcttttagcaaattaatgactctcaggcacagggggttttaagtgaaggtattaataagaggtctggcaggtattcccatgattcacagagttacatttgcatttaattaatcttaaagttgcaagataaacagctgtaattcggacaaacatgacaaacacagtgaagccaactatcccataaaatgaacactgacatacttgttttaatttttttcccagcgtaaaaatagaaaaatcaaaatactcctaacaaaaccagtgattttgatagaaatatttctccaatatacttgcatccacctacaaatataaccttttcaagataaatcgcttatgatttcaatagtcaaactgctgtgtttgttgatgtaaagatgttttgaatggctagatggtaaaataaattcttaataaagtacccactgcaattttt

SEQ ID NO: 284278 - DNA, 1000 bp, Homo Sapiens
ggaggcacacaggatgcagccttccccctcccaggcctggcttattccaagaggctggtcttgaattcctgagctcaagcaacctgccggcctcggcctcccaaagtactgggattacacgcagaaggcaccatgcccaggctagatgtgtcttatcccaatcctttggcaggcatgcagctccacaggcgatttcttcaagcagctgaagtgtttagccctcctgggttaagagccagataaggagaaatccctttcctaggtttggaatgtgttgtgaaaaaaaagagaaatccctggctcctggagctggtgggagacaagattaagcaaacctcccctgacatgtatccctttgaccccaagctctgcctcctccctgaccacccatgccctttcctttaacttctcaaacagataccagggcctaaactgctttacctcccctcctactgagtcaggttaggtggtgggaggtcacccatttccgagttaaaccaatgcaatatgagtaaaacaaagtcatgtgggtatgtctggggtagagagaggggtagcaagttcatgtgtcctccttggtcacatatctcccaaagctccgatccctgccatgggaagtggacaggaaacatgaggtcatgacctgcaggcatctttactgcagctctgccggcctggagggggagagggggaggaagaagtatgcgctgcacatttctgaggctactgcatttgctttcaaggcagaaatcttgctctgagcagtcagcggctccagtttgggcccgataaggaagttctccgtggcctccctcaggcagagcagggaggaggctgacattgccagtctcttctggggcccaaggcaggttgcaggagatccaatcccatagacagctctgggcctcttgcatttgagtttttcagaattaaactgcagtattttggaaagcaaaaaaaaaaaaaaaaaaaaaaaaaaaaaaaaaaaaaaaaaaaaaaa

SEQ ID NO: 284279 - DNA, 1000 bp, Homo Sapiens
ggatccccaaaaaaccgaggctgggagctagtggcccttttgctttctaggacttggggggccggccctccctcctaagcataacaaaggtggtgttgctccagctcagccccaggggacacagatgcactttgggggtgagggcaggtaatgactccatcgcaccctcagttcagctggacagaggctcaggtgaccccagccttcactgtctcccgctctccaggagcttatcttcgccccatctcccaaataagtgggcccttgtgctgtgaggaagaccaaagcctcagggaagataagagatatggagatgggagggggaggacaaggggcagagagtagggtctagctggctatctctggccttactaacacccccctggaggcatgccccttttctccagcacacaagcacattggggcacctggaaatattggttccaggctcctgttctctggacttcagatcctgggggagcccctcccccccctgaatccctggcttagctaccttcctgcctgtgcacctaaaaacctcaggtcagaactaggaaaagagttttgtttttatttttttgaaatggagtctcgttctgtcgcccaggctgaggtgcagtagtgcaatctccgctcactacaacctccactccctggggctcaagcgatcctcccacctcagccgccgaagtagctgggactataggtgtgtaccatcacacctggctaatttttgtattttttgtagacacagggtttcgccatgttgcccaggctggtcttgaattcctgagctcaagcaacctgccggcctcggcctcccaaagtactgggattacacgcagaaggcaccatgcccaggctagatgtgtcttatcccaatcctttggcaggcatgcagctccacaggcgatttcttcaagcagctgaagtgtttagccctcctgggttaagagccagataaggagaaatccctttcctaggtttggaatgtgttgtg

SEQ ID NO: 284280 - DNA, 1000 bp, Homo Sapiens
ccaagaccgatgaggagaggcctccggtggagcactctcccgaaaagcagtcccccgaggagcagtcttcggaggagcagtcctcggaggaggagttctttcctgaggagctcttgcctgagctcctgcctgagatgctcctctcggaggagcgccctccgcaggagggtctttccaggaaggacctgtttgaggggcgccctcccatggagcagcctccttgtggagtaggaaaacataagcttgaagaaggaagctttaaagaaaggttggctcgttctcgcccgcaatttagaggggacatacatggcagaaatttaagcaatgaggagatgatacaggcagcagatgagctagaagagatgaaaagagtaagaaacaaactgatgataatgcactggaaggcaaaacggagccgtccttatcctatttaatgtgttcggcctttaattctgttttgcctgctaatagtattgccattgccacctggactttctgtttgcattttcttaatgccttttcccatattctgaattttaactttttgtgaggctttattttagatgtttagcatgtaactcgcttaaagttgaggtttccccctaaaatctacaagtttccctctttcagtcatgagccctacacatttgcatgaaagatgtacattatatattgtgaaacgaaaaaagcaattttcaaatggtatatattgtatcccatttttgtaaaaaaaatgtatatttatatattaatatgcaaagaaaaagctaaaagtatagacttcaaaggcataacagtggttgtgtggtaagataataggtgattttttaaatttttgttttatctgaatttctcattttttcaggacaaacgttttacttgtgttgcaaaaatatataatgaaaaaatcacacaattttgaagaaaactgtcaatcagcttataacgacaatgtggcacttaataaatacttgtcagaactttaaaaaaaaaaaaaaaa

SEQ ID NO: 284281 - DNA, 1000 bp, Homo Sapiens; identical to SEQ ID NO: 220727

SEQ ID NO: 284282 - DNA, 1000 bp, Homo Sapiens; identical to SEQ ID NO: 115305

SEQ ID NO: 284283 - DNA, 1000 bp, Homo Sapiens
aaaagtcttgtgaagaaaatgagggaaaaccacagaacatgccaaaggccgaggaagatcgccctttggaggatgtaccacaggaggcagaaggaaatcctcaaccttccgaagaaggcgtaagccaggaagcagaaggaaaccccagaggagggccgaatcagcctggccagggatttaaagaggacacacccgttaggcatttggaccctgaagaaatgataagaggagtagatgagcttgaaaggcttagggaagagataagaagagtaagaaacaagtttgtgatgatgcattggaagcaaagacattcacgcagccgtccttatcctgtgtgctttaggccttgaattcatttttgcctaatattaaaatctggccccagctttctttctgttagcattttctgatgtatctttgacctccattttacttttaatcatctgatgaaattttgttttaggtaatttccttggtaccagcatctcattggattttggattttgacccattttccaggtctatttttcaattggaaactttcacacatttgcatgggaatatgttcattccatgttgtaaagtaaaacataacaggttatggcaaagcagcatatttaatatcagctcacatatgtaggataaaattccaaactttgtgtgtgtgcgtgtgtgtatacatacatccatataacatatatcacaaacttaaccaagcttatttctgtgtggtgtgaaattttatttgttttcttctttttgttctttttgcttatatgtactttttaatgaacacgtgtctcacacacaaaaagaattaaggattttttttacaagtaagagtcaaataatttgcaaccagcttatgagggcaatgggggcacctaaactcttgatgaaagaactttaaaaagaaatgtaaacctcaaattacctctggatctcttagccagaggaataaactggcaattattacagataaaaaaaaaaaaaaaaaaaa

SEQ ID NO: 284284 - DNA, 1000 bp, Homo Sapiens
gaagaacagccacaagacgagagaaagccagaagtaacttgtactctggaagacaagaagttagaaaacgagggaaagacagaaaacaagggcaaaacaggagatgaggaaatgttaaaggataaaggaaagccagagagtgagggagaggcaaaagaaggaaagtcagagagggagggagagtcagagatggagggaggatcagagagagagggaaaaccagagatagagggaaagccagagagtgaaggagagccagggagtgaaacaagggctgcaggaaagcgcccagctgaggatgatgtacccaggaaagccaaaagaaaaactaataaggggctggctcattacctcaaggagtataaagaggccatacatgatatgaatttcagcaatgaggacatgataagagaatttgacaatatggctaaggtgcaggatgagaagagaaaaagcaaacagaaattgggggcgtttttgtggatgcaaagaaatttacaggaccccttctaccctagaggtccaagggaattcaggggtggctgcagggccccacgaagggacattgaagacattccttatgtgtagtgtccctggcaggcatttaccaggccatgtgctttaacgttacggtaatactttactttaggcatccctcctgttgctagcagccttttgacctatctgcaatgcagtgttctcagtaggaaatgttcatctgttacatggaaaaaatgttgatggtgcattgtaaaattaaaaaacacaacttgcagaaccaaatatatggcatcagtacatttttgtaaaactacaaagatacttacctagtaatatagtatagaaaacaattctgaaagctgtgtccactaaaagattaacagtggttatctctgggtgattttttctgttcttttttgttcatctgtccatttttctcctaaaaacagatttctttagtcataaaaataataaaatataaagtattggaaaaaaaaaa

SEQ ID NO: 284285 - DNA, 1000 bp, Homo Sapiens
tcatagactccatcaggaggctggagaacttgtatgttgtggaggagaaggatctgtgtgcggcttgcctgagaaaatgccaaaacgcccgggacaacctgaatagaatcaagaacatggccacgacgacaccgagaaagaccatctttcccaatctgatctcacccaattccatggccaaggactcctgggaagactggagaatacgcttgacatcttcctagagtagctgtggcaaaatcttgaagactactcagctaacagaataaacgactctgaagaggagaagcccccagttaggagaagacagagtggcaagtgagatgttctggaaaccaggctcgccggagctggccaagccaccgacttgcttctcaaattcacttcacctcccttagctttagcccacctgtgtgtgaaaatgactttgggaaatatttgatgtggtttttaaaatgtatatagaaaaaaatttaagaaaattacagattatatattatagacaactaaatatttaagactttaagacttaaaaggcttactgcctctacatttcactcagactagtacatctcaatgccagtagtctgtgataaatttatgtaggtataatgagatactgatatggtttgggcatttgtctcctccaaacctcatgttgagatttgatccccagtgttggaggtggggcctaatggaaggtcatgggggtgggtccctcatgaatggcctggtgccatccttttggtaatgagtgagttctcactgtattagatcctgttgaaaattgattgttaaaaagaccttggcacctccctctcctctctctctcttcctctcactatgtgatgcctgctccccttcaccttccaccatgagtggaagcacctataccccaaagccctcaccagaaggaggtgccggcacctgtacagcttgtaagaaccatgactcaaataaacttcttttctttataaaaaaaaaaaaaaaaaaaaaaaaa

SEQ ID NO: 284286 - DNA, 1000 bp, Homo Sapiens
agcgcggagggcgagtggctcgtgcccatcggcaaatgcgtgtgcagtgccggctacgaggagcggcgggatgcctgtgtggcctgtgagctgggcttctacaagtcagcccctggggaccagctgtgtgcccgctgccctccccacagccactccgcagctccagccgcccaagcctgccactgtgacctcagctactaccgtgcagccctggacccgccgtcctcagcctgcacccggccaccctcggcaccagtgaacctgatctccagtgtgaatgggacatcagtgactctggagtgggcccctcccctggacccaggtggccgcagtgacatcacctacaatgccgtgtgccgccgctgcccctgggcactgagccgctgcgaggcatgtgggagcggcacccgctttgtgccccagcagacaagcctggtgcaggccagcctgctggtggccaacctgctggcccacatgaactactccttctggatcgaggccgtcaatggcgtgtccgacctgagccccgagccccgccgggccgctgtggtcaacatcaccacgaaccaggcaggtaggcggagaaactccgtcccgcagcgtcctggtcccccagcttcccctgcctcagacccatccagggatcagagctctgccggggacgtgctgtgggcctttaggcaagtgcctctctggccctgcgctcctcaccaggacccagagctggaggctcttcattgcctttagaaaagtggaacacattctataagtaagagaaatcccaaaagctcagaggcaggctagtgtggccgtcgaaagcctaggttccagaactttccctctctgtgcctcagtttcctccctggtgcaatgggaataatagtacctgcctgaggtcctctcaggaggcttaaatgagaggaatgaaattgcttagcccagcacctggcccgtggtaaatgctcaataaatgtcattaaaaaataaaaaaaaaaaaaaa

SEQ ID NO: 284287 - DNA, 1000 bp, Homo Sapiens; identical to SEQ ID NO: 220728

SEQ ID NO: 284288 - DNA, 977 bp, Homo Sapiens; identical to SEQ ID NO: 115306

SEQ ID NO: 284289 - DNA, 1000 bp, Homo Sapiens; identical to SEQ ID NO: 115307

SEQ ID NO: 284290 - DNA, 1000 bp, Homo Sapiens
tttcagctttgttcgtgttatttccctgggactggttgttttcttagtttctgctctttcattgggtcctttcctggccttgaatcagctgcctcaagtcttttcccgactctttcctttcaagaggggcctctgtcatgcatattgggctccaaacttctgggctttgtacaatgctttggacaaagtgctgtctgtcatcggtttgaaattgaaatttcttgatcccaacaatattcccaaggcctcaatgacaagtggtttggttcagcagttccaacacacagtccttccctcagtgactcccttggcaaccctcatctgcacactgattgccatattgccctctattttctgtctttggtttaaaccccaagggcccagaggctttctccgatgtctaactctttgtgccttgagctcctttatgtttgggtggcatgttcatgaaaaagccatacttctagcaattctcccaatgagccttttgtctgtgggaaaagcaggagacgcttcgatttttctgattctgaccacaacaggacattattccctctttcctctgctcttcactgcaccagaacttcccattaaaatcttactcatgttactattcaccatatatagtatttcgtcactgaagactttattcagacggagtttcacccttgttgcccaggctggagtgcaatggcacgatctcagctaactgaaacctccgcctcccagaaaagaaaaacctctttttaattggatggaaactttctacctgcttggcctggggcctctggaagtctgctgtgaatttgtattccctttcacctcctggaaggtgaagtaccccttcatccctttgttactaacctcagtgtattgtgcagtaggcatcacatatgcttggttcaaactgtatgtttcagtattgattgactctgctattggcaagacaaagaaacaatgaataaaggaactgcttagatgtgaaaaaaaaaaaaaaaaa

SEQ ID NO: 284291 - DNA, 1000 bp, Homo Sapiens; identical to SEQ ID NO: 115218

SEQ ID NO: 284292 - DNA, 1000 bp, Homo Sapiens
aacaagggaggaagcagtggatggaccaggattaattcctttcatttcttagtaaattaaaacctgcagctggtggattgtgatcacacattcccgaagtaataagtgaggacgaatgcactgctctggaacataacccagtgctaactgggggtttcatttattcagtcaagcacatcttactcacatccagatttattttcctacagtgcaaacacaccagatgaaactttaaaatgttactttttgtaagcttatcataaatgagttgcagtaatttgtttgcttgtttgtttaaccacaaccactattttaatgatatactaaagataacactatttagttttttcagaaacatctgcattatatgtgtgttggttgtggattttgtttctaaaattggcttagtccaataaataaagaaaagcattaaggacttaaagcaacaataaccaaataaaaacttgataggatctttgaagtctatttaaatattcattccattacatctagactcaccaagaactacatgttatgatgttaagttgaagttgaaacatgatgttttgcattaaatttaagatatgcaaatttatgtagagaaaataaatgttatataccctataatctttcacctaattagtatttaattatatggatttgttttatattataaaagatgttttgattttgtcttttgatattgacaaaattgtttggatatccttatgttctcaagtctgtatctgcctcccctgccttatttcttatgttttgccacagttaacccattgtgcttctttgtaatcaaacagtttgtgggagaatgggcttattgaatgtctaaaaaataagtttaaagtgtttgttaccctaagttttttacatttttaaactctaattacatatgtgaatgttattactctcagtgaattgttattgtttgcaaaaatgcactgggcagtaacattttgtgataaatcctataagatataagtca

SEQ ID NO: 284293 - DNA, 1000 bp, Homo Sapiens
acggcaccaaccagacaccaaacttccaacagaaatcactcgggtatcagatgaagaattgaatgccctgcagtcttattgcaccatgaagataaatttgattcatcgtagaggggattctaagaagaagacgagcagcagacataaaaagctgcatcttggattggatgtagaggcttcagagagagatgcctttagttgtactgtacccgatgaacttttgaacagaatctactttaaaaacatgaggacaacgccaaaacaggaggcagcagctaagcaacacatatcttatcagtgtccctattgtaacaggaaaagagcggagctggccctgtctgcctttctgaaacaaaagaagactttactggagtcatttctactccaagagagaatagatgaacatcttcataccaaagactttctcacccgtattggagaagcacatcaagactttcccaggctttcagatgaccccagaataatctggaaaagactgactgagaaaagtcatatcagatactctggttttgaaagatcagagacagagcagaagatgcagcgagatggaaatagtgcttgtcatttaccattttctctgccatttctcaagcgacttactctaatcaaaccagagctggtgattgttaatgataatgtgtaatgtggatagatgtctttgttgtgtatttgagtaattaccataatttctacaggcacttgggaaactaacttaagactttactatgcttccttcacagatttgaggactaagaactttcactttttttttcctattatagaaggcactgttgtagttggaatagttataaaaacttttacaaaattccaagagaactatgttggtagtttgggccaggatgttgatggtacagaagcaaagtagtatggggatgtaagagaaacttaaaaagtaataactgtctttggcgatcaaatggctatggggaattaataaatagtagatgtttgaaatgtt

SEQ ID NO: 284294 - DNA, 1000 bp, Homo Sapiens; identical to SEQ ID NO: 115311

SEQ ID NO: 284295 - DNA, 1000 bp, Homo Sapiens; identical to SEQ ID NO: 115312

SEQ ID NO: 284296 - DNA, 1000 bp, Homo Sapiens; identical to SEQ ID NO: 115313

SEQ ID NO: 284297 - DNA, 1000 bp, Homo Sapiens
gcctcctccagcccctctcatggcaccaatggaagtgtcctcctgttctctggtcaatatgtgtgtttactttgcttgctttgactcatgccttactccatggccaccctctcccaaagagggggctcgcttcccccattttcaacttgatccactgaggagagggaagggggtgactttcccttcttcagtaggaaaggcacatttgtagggcctgaaactctcccgtatttgctgactcattggtggagtagacttctggctcccagctccactggcccatggggcctccattgtatgaagtcagcataggctgcccacctaatggtggagagcatgaaactgggagcatcctgtggggggcttgtgggggaaaaaggtggttgttttaacccaccgttgttttggggtggtgttgcacactagtagagaatagagtctatgcctttggcaaatttaactgggagtttggattcccacttaagggttttacttcttgggtcctgtggatggtggttcttcgtgtcaggatcccagcccgattctgcaaatgcctccatggggtttaaaaacatgaggctttccaagttcttgcccagtatctggggcagcctccagagtatcacctgggagttcaggttctctccagggctccaggtgtgtgtttatctcgccccctccagctctcctcatcctgctccccattgctccatgtcaggctgttccccattgtgccctgctgatgctttgggtccagggcctcctcccaagtgtggctttaaggagtaagcttgaggatgatgttttttaattattgtaaatcattacctcatttccagcctcccaggctccatccatcccagcatcttttattctgccattttcctcaccttgtgctatgacaatggggcgttgtgtttccacagagacttataggagtgttcagtgtatagtttcttaataaacactttattttctaatgaaaaaaaaaaaaaaaaaa

SEQ ID NO: 284298 - DNA, 1000 bp, Homo Sapiens
tcaccccacgaataaaactggcaggaaagaagcccgcctctgagaaagcaaaaaatggccgtgatacatctctcgggagtccaaaagaatctgagaacgcccttcccatccaagtagattatgacgcctatgacgctcaagtgttcaggctgcccggcccatcccgggcccagtgcctcaccacctgcagatctgtgcgagagcgagagagtcacagtcgaaagagtgccagctcctgtgatgtttcatccagcccttccctaccaagccgcacactgcccactgaggaagtgaggagccaggcttctgacgacagctccctaggcaagagtgccaacatcctgatgatcccacacccccacctgcaccagtatgaagtcagcagctccttgggatacaccagcactcgagagcacctaggataaagtgcagtgatgcaatcacagctcacctcagtgcggccttgaactcctggactcaatcgatcctcccacctctgcctcccaagtaactgggactatagcatgccaccacacccagctgattatcatatttttttttgtagaggtggggaagtgcagtgatgcaatcacagctcacctcagtgcggccttgaactcctggactcaattgatcctcccacttctgcctcccaagtaactgggactatagcatgccaccacacccagctgattatcatatttttttttgtagaggtggggttttaccattcccaggctggtcttgaactcctggactcgagggatccacccattggcctccaaaagtgctgagattacaggcatgaaccaatgttaccgcaccctgcctctattatactattttttgtttagcctttcttcatccatcatttaactgtatgcctttccatatgttaatggaaagcttttcttaggcctagggtcaaaagggtttatttccttatgatttccatttgtgccatatataaaacaacctctgtctaaaaaaaaaaaaaaaa

SEQ ID NO: 284299 - DNA, 1000 bp, Homo Sapiens; identical to SEQ ID NO: 220731

SEQ ID NO: 284300 - DNA, 1000 bp, Homo Sapiens; identical to SEQ ID NO: 220733

SEQ ID NO: 284301 - DNA, 1000 bp, Homo Sapiens; identical to SEQ ID NO: 115315

SEQ ID NO: 284302 - DNA, 1000 bp, Homo Sapiens
ctagttttcctgcattgtgagattcatctctgtgattctcttaatgaacagtgccagccttcttgctcaagaagtcaagtccgcagtgaagtaccggccatcgacctagcccgggttctagatttggggcccatcactcggagaggtgcacagtctcccggtgtcatgaatggaacccctagcactgcagggttcctggtggcctggcctatggtcctcctgactgtcctcctggcttggctgttctgagagctccgctgagcatctggccttgaagtttgtgttcttccctctggcaatggctcccttcagcacttctgctttccactccaattcacacaggcttggtattaacagaatcaaggccaggctaggttaggaaaagggaagagctttcaccttctttaaaactctcggctgggcgcagtggctcatgcctgtaatcccagcattttgggaggctgaggcaggtggatcacctgaggtcagcagttcaaaatcagcctggccaaaatgctgaaactccgtctctactaaaaatacaaaaattagccaggcatggtggcaggcgcctgtaatcccagctactcgggaggccaaggcaggagaattgctcgaactcagggggtggaggttgcagtgagttgagattgtgccattgcactccagcctgggcaacagagcaagactctgtctcaggaaaaaaaaaaaaaaaaaagaaaagcaacatagtggggtttctgtcaatctgtcctcggctgcccttctcatttgttgatgggaccttgaaagcaagcttgctaggtgccctctgtggctccagcctttaccggaagtgtggtgcatgtttttaacttcagggaagcggtatcctgtcactggggtatgggatgagcatggagaagaggcaccagccacgattccttcctaagcatctcctgttctgactgctcatgaattgaagaaactgacccttgtgttcaaaaaaaaaaaaaaaaaa

SEQ ID NO: 284303 - DNA, 1000 bp, Homo Sapiens
gaactggccagaccttagaagagtcttcagcaagctgccctagggtaggggcgtattctctgtttgttttgtactggtaccccaggaggatgccttgtaactgctctttggtcatgatagtggtaatgaatccattcatgtaaaatgcaatatgtctgttagtttggggcacccgaggctcagtagaggtttagtatgatgccttccctttcttctttgagttatgaagaaactaatttctggcacagtgtgactgcttcaaacctatgttctgctgctatctcctatagaggagggcagacttttttttcttagtgcatttgctggtaggtcaaggagggatggactttgaattagtgttcagagtcacagatcctacgtatgtgctcttcagtagaggattttctgtgatcctacaatgaagggaaagctatataatttattggtacttcctaaagatagagactaaagtcatggtagtattggccaaattaattttaaaactgaacaagtcatgaattttcatataaatcaaagaactttttccttataaaagcttccatttttgaaaagttggatcagttgtaagacctttcatctttagtattgtatgatataattctacattgaaaaataaacacttggcattaaatgggacttggagtcaaaagatctggttttatggtccatcttttaccaatcatttgctgtggatctctttaaaggtcctggaacctttgagcctcagttacctcacttgtaaattggcaaaaatacctacctcacagggttgttgtgaggattcaatgagctaatgtatgttgaaagcactttgtgaattgtaaagtgctacacaaatgttagttgttgttgctgctgtatctgagatgtcttaattttctttttcttcagaaatagtctaataaacctccagggcttttctgttaaagtatactagttggtaaaatgttgaataaacagtttattacaataaaaaaaa

SEQ ID NO: 284304 - DNA, 1000 bp, Homo Sapiens; identical to SEQ ID NO: 115316

SEQ ID NO: 284305 - DNA, 1000 bp, Homo Sapiens
cagtaatttattcgcccaactggctgaaaacatagccagcagcctgcacgttgcttcatgttatgtctgtgggggaatgaacatgggagaccaatggccatgggaagcaagggaactaatgccccaagataatttcacactaaccgcctcttccctcgaacctgcaccatcaagtcagagcatctggttcttaaaaacctccattattggaaaattctgtattgctcgctggggaaaggcctttacagacccagtaggagagttaacttgcctaggacaacaatattacaacgagacactaggaaagactttatggaggggcaaaagcaataattctgaatcaccacacccaagcccattctctcgtttcccatctttaaaccattcttggtaccaacttgaagctccaaatacctggcaggcaccctctggcctctactggatctgtgggccacaagcatatcgacaactgccagctaaatggtcaggggcctgtgtactggggacaattaggccgtccttcttcctaatgcccctaaaacagggagaagccttaggataccccatctatgatgaaactaaaaggaaaagcaaaagaggcataactataggagattggaaggacagtgaatggcctcctgaaagaataattcaatattatggcccagccacctgggcagaagatggaatgtggggataccgcaccccagtttacatgcttaaccgcattataagattgcaggcagtactagaaatcattaccaatgaaactgcaggggccttgaatctgcttgcccagcaagccacaaaaatgagaaatgtcatttatcaaaatagactggccttagactacctcctagcccaggaagagggagtatgcggaaagttcagccttactaactgctgcctggaacttgatgacgaaggaaaggttatcaaagaaataactgctaaaatccaaaagttagctcacatcccagttcagacttggaaaggatag

SEQ ID NO: 284306 - DNA, 1000 bp, Homo Sapiens; identical to SEQ ID NO: 221033

SEQ ID NO: 284307 - DNA, 1000 bp, Homo Sapiens; identical to SEQ ID NO: 115317

SEQ ID NO: 284308 - DNA, 1000 bp, Homo Sapiens
gggagaacaagccggatcagaagacgaaaactctgcggaagttctgaatcaagaggagtgaatgagagccacaagtctgaatttatagagctgaggaagtggctgaaagctaggaagtttcaagattcaaacttagcgcctgcttgttttccaggtacaggaagagggctgatgagtcaaacatccctgcaggagggacagatgattatttcgttgcctgagagttgcctgctcaccacggacacagtgattcgaagctacttaggggcatacattactaagtggaagcctcctccatctcctctgctggcgctgtgcacctttttagtttcagaaaagcatgctgggcaccgatctctttggaagccttacctggagattttacccaaggcgtatacctgccctgtttgtttggagccggaagtggtgaaccttcttcccaaatctttaaaagcaaaggctgaagagcagagagcccacgtgcaggagttctttgcttcctccagagactttttctcttctctgcagcctctgtttgcggaggctgttgacagcatcttcagctacagtgccctgctgtgggcttggtgcaccgtcaacaccagagccgtgtacctgaggcccaggcagcgggaatgcctttctgcagagccggacacctgtgcactcgctccgtacctggacctgctgaatcatagcccacatgtccaggtaaaagcagcgtttaatgaagaaactcattcttacgaaattagaacgacttcacgttggagaaagcatgaagaggtattcatctgttacggccctcacgataatcaacggctgttcctggaatacggatttgtttctgtccataatcctcatgcttgtgtttatgtctcaagaggttggaatcaactttgttcttaacattaacactatataatttttttccccatttggagatgtgtattttcagttttaataaaaatatcaaaaccttaaaaaaaaaaaaaaaaaa

SEQ ID NO: 284309 - DNA, 1000 bp, Homo Sapiens
ttgggcaggctgggctcaaactcctggcctcaagcagtcctcccgccttggcctcccaaatgctgggaatacagaatgaatgagagccacaagtctgaatttatagagctgaggaagtggctgaaagctaggaagtttcaagattcaaacttagcgcctgcttgttttccaggtacaggaagagggctgatgagtcaaacatccctgcaggagggacagatgattatttcgttgcctgagagttgcctgctcaccacggacacagtgattcgaagctacttaggggcatacattactaagtggaagcctcctccatctcctctgctggcgctgtgcacctttttagtttcagaaaagcatgctgggcaccgatctctttggaagccttacctggagattttacccaaggcgtatacctgccctgtttgtttggagccggaagtggtgaaccttcttcccaaatctttaaaagcaaaggctgaagagcagagagcccacgtgcaggagttctttgcttcctccagagactttttctcttctctgcagcctctgtttgcggaggctgttgacagcatcttcagctacagtgccctgctgtgggcttggtgcaccgtcaacaccagagccgtgtacctgaggcccaggcagcgggaatgcctttctgcagagccggacacctgtgcactcgctccgtacctggacctgctgaatcatagcccacatgtccaggtaaaagcagcgtttaatgaagaaactcattcttacgaaattagaacgacttcacgttggagaaagcatgaagaggtattcatctgttacggccctcacgataatcaacggctgttcctggaatacggatttgtttctgtccataatcctcatgcttgtgtttatgtctcaagaggttggaatcaactttgttcttaacattaacactatataatttttttccccatttggagatgtgtattttcagttttaataaaaatatcaaaacctt

SEQ ID NO: 284310 - DNA, 1000 bp, Homo Sapiens; identical to SEQ ID NO: 220735

SEQ ID NO: 284311 - DNA, 1000 bp, Homo Sapiens
cctggcgcctacaccccctctcagccactgtcttcagtctccacagaaacagcatcaagtgtgcggagacaggcggctgaaagccagcagcacgaactgcccgtcagagaagtgcacagcctgggccagatactcccacaggatggactcactgcagaagcaggacctccggaggcccaagatccatggggcagtccaggcatctccctaccagccgcccacattggcttcgctgcagcgcttgctgtgggtccgtcaggctgccacactgaaccatatcgatgaggtctggcccagcctcttcctgggagatgcgtacgcagcccgggacaagagcaagctgatccagctgggaatcacccacgttgtgaatgccgctgcaggcaagttccaggtggacacaggtgccaaattctaccgtggaatgtccctggagtactatggcatcgaggcggacgacaaccccttcttcgacctcagtgtctactttctgcctgttgctcgatacatccgagctgccctcagtgttccccaaggccgcgtgctggtacactgtgccatgggggtaagccgctctgccacacttgtcctggccttcctcatgatctgtgagaacatgacgctggtagaggccatccagacggtgcaggcccaccgcaatatctgccctaactcaggcttcctccggcagctccaggttctggacaaccgactggggcgggagacggggcggttctgatctggcaggcagccaggatccctgacccttggcccaaccccaccagcctggccctgggaacagcaggctctgctgtttctagtgaccctgagatgtaaacagcaagtgggggctgaggcagaggcagggatagctgggtggtgacctcttagcgggtggatttccctgacccaattcagagattctttatgcaaaagtgagttcagtccatctctataataaaatattcatcgtcataaagacaaaaaaaaaaaaaaaaaa

SEQ ID NO: 284312 - DNA, 1000 bp, Homo Sapiens; identical to SEQ ID NO: 221747

SEQ ID NO: 284313 - DNA, 1000 bp, Homo Sapiens; identical to SEQ ID NO: 115319

SEQ ID NO: 284314 - DNA, 1000 bp, Homo Sapiens; identical to SEQ ID NO: 115320

SEQ ID NO: 284315 - DNA, 1000 bp, Homo Sapiens; identical to SEQ ID NO: 115321

SEQ ID NO: 284316 - DNA, 1000 bp, Homo Sapiens; identical to SEQ ID NO: 220736

SEQ ID NO: 284317 - DNA, 1000 bp, Homo Sapiens
cacaggttctgcaaaacactagtgtggcagaaagtgttgaaaactagttctagacctggcatgaatttgaccaggttcagccttagtctcctctcttagaaataaggtcatctgggccaggtgcggtggctcaagcctgtaatcccagcactttgggaggccgaggtgggcggatcacgagatcaggacctcaagaccagcctgaccaacatggtgaaaccccgtctctactaaaaatacaaaaattagccaggcatggtggcacgtgcctataatcccagctagtctggagggtgaggcaggagaatcgctggaacctgggaggcagaggttgcggcgagccgagatcatgtggggaaataaggccatctggaaatatccttcccatcacaggatgatacccggcaaattcttcaaagcagtgttctccaacttgaatgtttgtgatgtgggcgattctgactgagggggtctgtagaccacatcttgataaacaatgctttttaaaaaattcctagaagagaatatttgatttctggaaggatagagaagaaactaataagagtgtttacctccgaggaggaggagaattgggaagctgagagcagaggagggaggaagacttacttttcaccgtgttcttttttgtaccttttgagttttgtacgacatactgaatctttgacccatttgcaattataaataaaggcacatttatttggccgggcgcggtggctcatgcctgtaatcccagcactttgggaggacgaggtgggtggatcacctaaggtcaggagttagtgaccagcctggccaacatggtgaaacctcgctctactaaaacacaaaaattagccagatgtggtggcaggcacctgtaatcccagctactcagaaggctgaggcaggagaatcgcttgaacctgggaggcagaggttgcagtgagctgagatcgcacgactgcactccagcctgggcaacagagtgagactctgtctc

SEQ ID NO: 284318 - DNA, 567 bp, Homo Sapiens
atgttctcgtgttgcttccccacttcgagaggttgctgcttcaggaatggagggagtgagagccttttccgacgatgccgaagaaggctcatccctcaccccagacgcctgtcgcccgttgtaataaggcgcatccaggtaccacaggacagcctggggcaggccctagcaggccaggccacaccagagatcccattggggctgcagctgcacactgtccttgtccaggagattcaggagctcattgaggcacagacacttgctcctggtccatgtgcagaagtaagagcactgccagcaccagcggcggagccagagccagcatgggaagaggcccctccagagagagcactggagctggagggagctccagccaaggaccagaccaacgaggagctgcctgaaatcacggaggtgccggagagcattaaaagaaggctgggaagaagagttccagcagctacgcctgctcccagaggcaacctcctcctccaggcatggatgcgggtccacagctgggcatccaggctgtttgcccctaatgtgctgcccgggacaggcccttaa

SEQ ID NO: 284319 - DNA, 1000 bp, Homo Sapiens
ggctgccgtagaggggccatccagaggagctccctacttgaagacatgcaaagcccctccctcagaatgggcctccaggttcggtatttgggcacctttgccctgctgcagttcagagctccgccctctgcccccttcccccattgaagattctcagctggacccgggctgctcccgctcctcctcccggtcaccctgcagggcccgccgccgcctctttgagtgctaatcagccctctagacccagacccacccaacaatcagagacatgtctggtggagcccagccagctgtggactttaagtttttggaagagtctcagatgtaggttgtttactattcctcagtacagagtacacctcctggactcatgcaaggcccctctatttgctatttctctttactttcttgtttttctgtttgcccttcaaccctgatactggcaccttttctcctccccagactgtcctgggcccgccctctagtagatttgctgtgagtcctcaaacatgcatgcatgcaaccttgtaaaatgagcttatttaagctcaatccaacctgtagaagcgctcagttagaataggcctccaggtttggtatttgggcacctgtgccaccctccagcccaggactctctctgcccctcctcagcaaagaccctcagcaggatccccgcatccctggccaccctgtggggcctgctgctgtctcttccagcattggtgtgtcctccagggaaccacacactcaagcactttggaacccatggaatccagtgagcacgtgctgtgggctctgcctagaagcttccaaaacctgtttgttccagtggacacagagtaggaaatgctgactcgttcagagcgctagtgcccttgggtccttgcgggtgtgctcttctcactcctcaccccatcagcaccttctggggtaatgcacacaccagtaaaatgtacagtgcatgcttttaaaaatttttaaataaatgatactatgctat

SEQ ID NO: 284320 - DNA, 1000 bp, Homo Sapiens
tagctgtgtctgggaacattagtttatgtgcgccagctacatcagggtcttcccatggtggttcagaatagatgagcatagcaaggttttgtttttgctttcgattttctcatttggcatggacccatatgtatttgctatccttttttctaatatattaatatatgctacatttgtatttgcattactataatactttgagttgaaaaagagtttcattgtggggagaaaaagcaaatggtataccacaaggtcactctgatttgagaaaagagaggaggaggggaagatagtctgaatggaaatctgaaatatggaatgttttagagaaatatatcacttgcatatagaatgttttgaggtataaattaatgagacaaagtgaagaagaaattatattcagataggactgcactatgtgtgattatttgtcacacatggatctgttaccatcaggtcaattcctagcatgcataaattttttaaccttcagcttttaaaagagacctatgttgaattctattagtatgtaaacccctgaaaattcactgaagaaaaatcattactctttttctcagtaaatcatatcatctgaaatattacaaatttcaaatttctaggtgctatattaattcaatattataataactcttacctaattattcttacaagttttgagttgtggtagtgtttagggatttttttaaagatgtgtgaaatattctctgcaaaatcaggccactgtctccttttatatattaatacaattgtgtattacaaagaccagtgaattataatatttaaagtgagataacgtaattatttgcaaaggtaagttacagcttgtttttcgagagaatcaaatgagtttacttttcctcctattgtttttaaactagcttttagtttaaagatggaagctaaccaatggaaatgttactatgtttttgacgtttattaaacagtaccaataaagtattttattgccagaaaaaataaa

SEQ ID NO: 284321 - DNA, 1000 bp, Homo Sapiens
attgtgaatccaattcttgaaggcccttactatctgtgcctgggtctagcactcagggcccactgcctatgagtctagaaggctcagtgtgtaggacctacaaacctataggggcccatcataacgttctctttaatttatattaaaatcagaagaaaaatgaatacaataataatgcatatgtaataatgactccatccagctctatctttgtgtttacatcatggcaatggaaacacaatttaagtattaatacaggatgggcccatgaaggcaaaggtgcctgtctcctagggaagccttaatgtggtattccctcttcaggataccaactatttctgcaaaaatttatgtctttcttggccctctttacctaccacaactcccatttcctcagctatataatctcaccatgctgaattgtgaatgaattatgagattaatagaccctcaaatgctagtgactgaggtgtcaatagcctttaccaagataagatcctttggagtttctctggatcctcaaggcatgactcttactccagtgtcatctttgtccacctgaagtccacctctggagagcccaacatcccttgactttggtttatttataaacgtgacgttccagttgctcaactactgcaggatctcaggactaaggagacagaaggctaaatagagaggagtttagaggaaagtttagaagcaggggaaatacaattttggttgccagagtaaagactcagtctccaaaaaagatctgaagaatcctcctttatgtaaaaccacaccaagattctgagaggaaacattttcaatgagaaaaatgtgggaagtaacttttctgtacccagaggctaagtataagtctgtgatctgccttatgagactgtgaatgcattgtcttactcatgtctgtggccctgtgtcaatatgactcctggcacatttaactgcttagaaggtactctttaatgtcacccaattaaaaagaacaaattgt

SEQ ID NO: 284322 - DNA, 1000 bp, Homo Sapiens
ttatgtagagatcttattacaaagtgattttctacattaaaaagagactgaaataaattgtatagttacttaactaatgaagacatttcagaactctgggatgattttaatcttgaagtagtaggtggtatagtcataaaaccattcatccccttcttgattgtatcttaattttctggctttaaggtgacatctgagaggtaatgcattcttttttatattgaaatcataaactatcacccgctgcttctctgagttacttttaattttgccttgtggttatggtttggcgtttccttctgtttggttttcagagccccatgtctatatagtcctgagtgcaagtaattactatacttgtaaatgaagatcagtatttctgcctagatctgataaaaaaattttcttgtcttagttataaaaattcaaagaaatgtgttacaaagatacttagtatagctcctcagccataacctgagacttgggatgaaatttaaaccagatacgatttactttgcagatcataaggctttttatactcttgttatcaaaatggcttatttttcaggcactaaggattgttaagagaaaagcttttcaacgaaggattgcctttcttctcccacactgttcttgatttcctctctctttcaggcctcaacaggcactgtattcattgccaatgttccaaattatcaaattcaagtgaatttatttgtgtgttctttacttatataaaaaaagataactttaaggatgtgcaagtacatttccaactgctagcacaaccagtattttgtaattaaacaaatcgctgtatggtatggtcttctacacatttatgtctatagatatctatcgatcatctttctattctgtttcatgactgaataatgtaaaaccagtgttggcaattggtatcatcaatgatactcattttttaataaccaaaggcaggggaaaatcattttacttattaataaatattttatgatgtgaa

SEQ ID NO: 284323 - DNA, 1000 bp, Homo Sapiens; identical to SEQ ID NO: 220401

SEQ ID NO: 284324 - DNA, 1000 bp, Homo Sapiens
gcatggcttagtgatcgcggtggtgtccctcttcctgcaggcctgcttcctcaccgccatcaactacctgctcagcaggcacatggcccacaagagtgaacagatactgaaagcggccagtctccaggttcccaggcccagccctggccaccatcatccacctgctgtcaaagagatgaaggagactcagacagagagagacatcccaatgtctgattccctttacaggcatgacagcgacacaccctcagatagcttggatagctcctgcagttcgcctcctgcctgccaggccacagaggatgtggattacacacaagtcgtcttttctgaccctggagaactaaaaaatgactccccgctggactatgagaacataaaggaaatcacagattatgtcaatgtcaatccagaaagacacaagcccagtttctggtattttgtcaaccctgctctgtctgagccagcggaatatgatcaagtggccatgtgaattccaaatatttttaatggggtccagttctctatggattcttacatttaatttgtagggaaatgccatttttcccccttaaacaaggcatggggctcacaagtctatggagacaggccaaaaagaatgtggagaagaaaactgataaatacacagaggtcctcaagacccatggactcctggtctgtacccaaaaaagctgttcgttcctcaaaaacaaaaacaaggcttggctgggaaaacaggccaatgccccggcaagaaaggttgagatcagatgttaggaagaactttcaggtaaagtatgagaactatggagtccatcagcagagatagtagtgaagtctctccccagggaaaattttaaaaaggttgaatcagctgttgtagagttctatttggcaatctcatggttaaatgacttccctttgagctctttaattattggcaataaacaacttctttaaaagttttaaataaaatagcaaccaccaccagttcctcttt

SEQ ID NO: 284325 - DNA, 1000 bp, Homo Sapiens
gagaaggcaagatggagaatcccaagggcgagagcttaaagaacgcaggtggagggggattggagaatgcactcagtaagggaagggagaaatgtagcgctggatcgcagaaagcaggcagcggggaaggtcctgggaaagctggcagcgagggtttgcagcaggttgtcggcatgaagaaatcaggtggtggcgactcagagcgggccgctgcgttaagcccggaggacgagacgtgggaggtgctggaggaggcgccgccgccagtgttccccctacggcctggcggactcccagggctatgcgaatggctgcggcgagcgctccccccagcccaggcaggggcactgctgctggcgttgccaccagcatctcccagcgctgcccgaaccaaggctgcggcgttgcgagccggggcgtggaggccagctctgctggctagtctggcggcggcggcggcaccactcccagggctgggctgggcatgcgacgtggcacttctgcggggtcagctggcggagtggcgacggggcctggggctggaacccacggcactggctcgacgtgagcgtgccctgggcctggcttctggagagctggcagcgcgcgctcatttcccaggcccggtgacgcgcgccgaggtggaagcaagactgggcgcctgggcgggcgagggcactgctgggggcgcagcactgggggctctctccttcctgtggcctgcgggtggtgcagcggcgacaggtggcctgggctaccgagcggctcacggcgtcctgctgcaggctctcgatgagatgcgggctgatgctgaggctgtgctggcaccccctgagcctgcccagtgaggagtgggagggggcttgggagtccagactctgacaggggatgcctgggcttaatcctgggtgcttgaaggggatgtggactcttgacttccagctgggatgtgtgacttcttatcacctggattcagagagtctgggggacaggaatcctg

SEQ ID NO: 284326 - DNA, 1000 bp, Homo Sapiens; identical to SEQ ID NO: 115155

SEQ ID NO: 284327 - DNA, 1000 bp, Homo Sapiens
acaagatgctggtggctgtcaaggcactgaaggaggcgtccgagagtgctcggcaggacttccagcgtgaggctgagctgctcaccatgctgcagcaccagcacatcgtgcgcttcttcggcgtctgcaccgagggccgccccctgctcatggtctttgagtatatgcggcacggggacctcaaccgcttcctccgatcccatggacctgatgccaagctgctggctggtggggaggatgtggctccaggccccctgggtctggggcagctgctggccgtggctagccaggtcgctgcggggatggtgtacctggcgggtctgcattttgtgcaccgggacctggccacacgcaactgtctagtgggccagggactggtggtcaagattggtgattttggcatgagcagggatatctacagcaccgactattaccgtgtgggaggccgcaccatgctgcccattcgctggatgccgcccgagagcatcctgtaccgtaagttcaccaccgagagcgacgtgtggagcttcggcgtggtgctctgggagatcttcacctacggcaagcagccctggtaccagctctccaacacggaggcaatcgactgcatcacgcagggacgtgagttggagcggccacgtgcctgcccaccagaggtctacgccatcatgcggggctgctggcagcgggagccccagcaacgccacagcatcaaggatgtgcacgcccggctgcaagccctggcccaggcacctcctgtctacctggatgtcctgggctagggggccggcccaggggctgggagtggttagccggaatactggggcctgccctcagcatcccccatagctcccagcagccccagggtgatctcaaagtatctaattcaccctcagcatgtgggaagggacaggtgggggctgggagtagaggatgttcctgcttctctaggcaaggtcccgtcatagcaattatatttattatcccttgaaaaaaaaaa

SEQ ID NO: 284328 - DNA, 1000 bp, Homo Sapiens
tgtgttgaatactgtccagaagtgaatgtgatggtcactggaagttgggatcagacagttaaactgtgggatcccagaactccttgtaatgctgggaccttctctcagcctgaaaaggtatataccctctcagtgtctggagaccggctgattgtgggaacagcaggccgcagagtgttggtgtgggacttacggaacatgggttacgtgcagcagcgcagggagtccagcctgaaataccagactcgctgcatacgagcgtttccaaacaagcagggttatgtattaagctctattgaaggccgagtggcagttgagtatttggacccaagccctgaggtacagaagaagaagtatgccttcaaatgtcacagactaaaagaaaataatattgagcagatttacccagtcaatgccatttcttttcacaatatccacaatacatttgccacaggtggttctgatggctttgtaaatatttgggatccatttaacaaaaagcgactgtgccaattccatcggtaccccacgagcatcgcatcacttgccttcagtaatgatgggactacgcttgcaatagcgtcatcatatatgtatgaaatggatgacacagaacatcctgaagatggtatcttcattcgccaagtgacagatgcagaaacaaaacccaagtccacctaatcatcctgtgaaagtggtttctctatggaaagctttgtttgcttcctacaaatacatgcttattccttaagggatgtgttagagttactgtggatttctctgttttctgtcttacaagaaacttgtctatgtaccttaatactttgtttaggatgaggagtctttgtgtccctgtacagtagtctgacgtatttccccttctgtcccctagtaagcccagttgctgtatctgaacagtttgagctctttttgtaatatactctaaacctgttatttctgtgctaataaacgagatgcagaacccttgaaaaaaaaaaaa

SEQ ID NO: 284329 - DNA, 1000 bp, Homo Sapiens
actaggccagtatggctttgcactagaggattttaaacaagctgcactgataagccggactaacgggagcctttgtcacgccactgccatgtgccatcacagaattaatgagtttgaagaagctgtcaatttctttacttgggctcttaaaattaacccatgttttctggatgcttatgttggacggggaaattcttacatggaatacggtcatgatgaagccaccaagcaagcacagaaagactttctgaaagcactgcatattaatccagcatacataaaagccagaattagttttggctataatttgcaggcccaaggaaaattccagaaagcttggaaccactttaccattgccatagatactgatccaaagaactacctagcctatgaaggaagagctgtggtctgtcttcagatgggtaataattttgctgcaatgcaggatattaatgctgccatgaagatcagtactacagcagaattcttaacaaatcgtggggtgattcatgagtttatgggccacaaacagaatgcaatgaaagactaccaagatgcaattactctaaaccccaagtactcgctggcttactttaatgcaggaaatatctactttcaccacaggcagttttcccaggccagtgactacttctcaaaagctttaaaatttgatccagaaaatgaatatgttctcatgaatcgagctattacaaatacaatattaaagaaatatgaagaagcaaaagaagattttgcaaatgtaattgaaagctgtcccttttgggctgcagtatattttaatagagcacatttctactactgcttaaagcaatatgaactagctgaggaagaccttaataaagccctgtctttgaagcctaatgatgctctagtatataattttagagcaaaagttcgtggtaaaataggtctgattgaggaagctatggctgactataaccaagcacttgatcttgaagactatgcctcagttatatga

SEQ ID NO: 284330 - DNA, 1000 bp, Homo Sapiens; identical to SEQ ID NO: 115325

SEQ ID NO: 284331 - DNA, 1000 bp, Homo Sapiens; identical to SEQ ID NO: 115326

SEQ ID NO: 284332 - DNA, 1000 bp, Homo Sapiens
ccagtacctgccccttgatgaggcccaccccacgggtggttgtaccaacccttacggcaagtccaagttcttcatcgaggaaatgatccgggacctgtgccaggcagacaagacttggaacgcagtgctgctgcgctatttcaaccccacaggtgcccatgcctctggctgcattggtgaggatccccagggcatacccaacaacctcatgccttatgtctcccaggtggcgatcgggcgacgggaggccctgaatgtctttggcaatgactatgacacagaggatggcacaggtgtccgggattacatccatgtcgtggatctggccaagggccacattgcagccttaaggaagctgaaagaacagtgtggctgccggatctacaacctgggcacgggcacaggctattcagtgctgcagatggtccaggctatggagaaggcctctgggaagaagatcccgtacaaggtggtggcacggcgggaaggtgatgtggcagcctgttacgccaaccccagcctggcccaagaggagctggggtggacagcagccttagggctggacaggatgtgtgaggatctctggcgctggcagaagcagaatccttcaggctttggcacgcaagcctgaggaccctcccctaccaaggaccaggaaaagcagcagctgcctgctctccagcctctggcaggaactcagggccctggagctgctggggccaagccaaggcctcccctacctcaaaccccagctgggcccgcttagcccaccaggcatgaggccaagggctccactgaccaggaggccgaggtctctaactcttatcttccacagggtccaagagttcatcaggacccccaagagtgagtgagggggcaaggctctggcacaaaacctcctcctcccaggcactcatttatattgctctgaaagagctttccaaagtatttaaaaataaaaacaagttttcttacactgggaaaaaaaaaaaaaaaaaaa

SEQ ID NO: 284333 - DNA, 1000 bp, Homo Sapiens; identical to SEQ ID NO: 220737

SEQ ID NO: 284334 - DNA, 1000 bp, Homo Sapiens
tacaggcatgagccactatacccaacctgagtttaagttctaataatatagatttctatttgtactaccttaggcagtgactcatatctctgagcctcagtgtctttatttgtaaaatgatgtctgttctcaaaaagagtttgttttgagcatcagactgtatggtacattttaatccttaaagtacaaatgtggaggatttttttttaaaattgctcaatctctttttgtacttgttttctccttttcaaattaggataattacttactcaatgctcattttctggcctgtagcaaggattgtaaaataacctaatttgctttgagcttatgagtagtatatacttctgagaggagtcttgtcctttaaaacttcatgagcacctgagaaattcttaacagagaatggaaagcttggaatggggtaaatacagtggtttgaataacagtatttgcagaaaggaaaaagtattatttgctagggtagttttaggaagactgacagctctgaagaaatctttagggtaaatgtaggtaattttgcacctaattgccaggccaagtcactgtttagaggaagaaccagccccagcagggggcataatcacctggttcacctcttccggtgtgaagataagtgataaggtaaagaatgatgccagtaagtatagtagaaacactctattgcatttataaatgctaaaaatttccgaatgaattaaactcttattgggtggtttctttttttaaaaaaattaaataattgcattatgggagaatatgatttattttagcataaagtgaattttagtcttttatggcttcagaattatttcaaaatatactttattgaaaatcaatatttggttattttaattgttcaaaagtaatttgttctttacatttattagtaaaagtatggtgtgtgaaactatatttccatgcaacataataaaatcaataaaaggaatggattttcaagaaaaaaaaaaaaaaaaaa

SEQ ID NO: 284335 - DNA, 1000 bp, Homo Sapiens; identical to SEQ ID NO: 115327

SEQ ID NO: 284336 - DNA, 838 bp, Homo Sapiens; identical to SEQ ID NO: 220739

SEQ ID NO: 284337 - DNA, 1000 bp, Homo Sapiens
gctgctgctattgtgtggatgccgcgcgtgtcttctcttctttccagagatggctaacaggggcccgagctatggcttaagccgagaggtgcaggagaagatcgagcagaagtatgatgcggacctggagaacaagctggtggactggatcatcctgcagtgcgccgaggacatagagcacccgccccccggcagggcccattttcagaaatggttaatggacgggacggtcctgtgcaagctgataaatagtttatacccaccaggacaagagcccatacccaagatctcagagtcaaagatggcttttaagcagatggagcaaatctcccagttcctaaaagctgcggagacctatggtgtcagaaccaccgacatctttcagacggtggatctatgggaagggaaggacatggcagctgtgcagaggaccctgatggctttaggcagcgttgcagtcaccaaggatgatggctgctatcggggagagccatcctggtttcacaggaaagcccagcagaatcggagaggcttttccgaggagcagcttcgccagggacagaacgtaataggcctgcagatgggcagcaacaagggagcctcccaggcgggcatgacagggtacgggatgcccaggcagatcatgtaggacgcggcatcctgcccctggtagagaggacgaatgttccacaccatggtctctacgaaaaagaaatagttagtcaccttctgaccttctcctctttctcaaagccttctgtccctggtttttgcaagtgctgcatttccgccgagaatccgcgttgcctactgctgccacctcctgttcatttagaactatgcaaagactccgcttccgttttcctgagctcctcgggccccagagtctctgtttgattatttatttatttatttatttatttgccaaaaattctcctcttcaacttatagaatgcacctaataaagtaattagtcttgtgtcttaaaaaaaaaaaaaaa

SEQ ID NO: 284338 - DNA, 1000 bp, Homo Sapiens
aatgttcaattctttgttggctttcttcttgattctgtgggggtgtataacaagcctgaaggacattgtaatcatttcttacaaggtgaaaattaagaaagattgtgtatgagagcctatatagttgttttatccattatcatctttgattaagactttaaaaaaatgctatttccagttaatgcatttggccctattgaattttcagggaccagaaaacattaaaaagttctgcatcttataatggtaaccaattaagcttgagattgttctgaaagtatcaattgctttaaaactgttgtaagtacagttggcaagatctccaagctgaaacttccacgttaaaacttttgcctgtaagaatttgcacatgaatgttaatggaaaacacaaaacttaagatggcccaaaacaaaagccacaaacagttcatcatttggtgcttagtctttgtaagggctctctgtggtttgacttaccccagctaccgttaaatgaggacaaatcaccttaaaacatgttcatttgattcataacaaggaaaattgggtctatgattttttgccaatcttagcctaaaagaaattgctttagcttctggtcagcactgattaaaatgtgaatagtgaagtggctatcctaaactggtttatctccacccacactatcatagatttcttaggtaaatacaattcttatctagtggtattctacttgtattcagaatactgtattaaaattttactatttcatttttgtattctgtgcttattttttttgctcacgcatgtatgcttagtataaatgtgtcacttctaaagttttgtctctgacttttagaaataaatttcagaaaaattgtttcaaaagattttgaaagcacattttgttttgtgagtcaatgacaaatatatttcctgattacaaaacaaaaaaaaaaaaaaaaaaaaaaaaaaaaaaaaaaaaaaaaaaaaaaaaaaaaaaaaaaaaaaaaaaaaaa

SEQ ID NO: 284339 - DNA, 1000 bp, Homo Sapiens
ccactagatccatcagaaaacaaaaagatcatttcaatggctctttgtaaaaatattggtgtggatgatgttggaaaggatattggaccagatactaccagcattaacagagttgctgacactttgaataactggagtatccatccagatcccaagggagaacccagtgaagagaagaatgcaatggcaaagactttttatgattcctcttttcccacagaacatgtgaaaacaaagcctctgatatcaactccactacaaagccatttgcaggcaatcaagacgactaaaaatacttctggtgatgatgactggcagagcctcattacgaatcaactaaataaaagtgaaaatttactaagtttagaaaatgacaaccagccaaaaaaaagaaaagcagaagagacgttggaaaaaaacaacagattaaaataatgtagataagtgctttcagtagtgaaattatgtaactgaaattctggtatagtttttactagaataaaatgactgttgtatttaaagctctacagtttgtctttgcttttccaagtttttctaatgtgaagaaattgtattactctacttctgtcttctctctgtatattatcctttctttaaagtgctcattgcttcttcaatatccttttttaaagaacagaatttatgtattgtatgacagacattgtgaccccttgtaatttattacttcatatcctctggagtttgtgattttagtataaatttgagacaataactgtccagactaggcaaatttttttagtttataatgttttactatgatttagggcttttttttcaaagaacaaaaattataagcataaaaactcaggtatcagaaagactcaaaaggctgtttttcactttgttcagattttgtttccaggcattaagtgtgtcatacagttgttgccactgctgttttccaaatgtccgatgtgtgctatgactaaaaattgaaaaattaaacacagtgttagtc

SEQ ID NO: 284340 - DNA, 1000 bp, Homo Sapiens
aaacctgttagccacttctctgtgccatatacttcccatgttaccaaaatacccccaactctttagccaaaagagaaccctgacctcctgagtttccatgctcctttctgtaccaggtttaaatgtagtcttctggagaagtatttttgacattgagctctgggacaggacaccttgggtttgtggactgcagcccactatgatgttattacttctctggccaggcctccagtggaagtgcacaggcactcccaatgttgttaatgctctgtcttccatttgttctggaatcctacgtgttggtctgtggttccatgcattagctgtttgtaaataatgcatttgcatactgaaaaaggaatgccacctgccacagttgatggtgaggaagctcctttgacgtggtgcaattttgatgagatgtctctggggacacgaggatgccctaatgatgctgacttgtcatggttgcagcatttgaacttttggtgttaaaaaaaaaaacctgtaagtctgtaacctggcaacattttacaaccctgtatttttaaagatggctttctaataaaaaatccagaaccacacagccctatggtcaaacaatcctacgtttgtgcctctgcttttaaaggtgctgtgctggacagttggcatgccagggttcgagaagagtgaatggcttgacgtacttgcagttaactgtgcaaaattggctggctgcctctgttcctactgtactgtaactttgatcatgtctgttcctgttccattctcccaggagcttctctgcagactgacacaccctcccccaccccgggtagtggagatgctggtgtctgggtagtcatggatttctgctggacatttgaatgtgataaacaatccagcattacttaggaaatgctacatgcggaatgtgcacgtttccaggggcgagtattgtcaatcaaaaggtttgcaatgatttccttcctgccaaaaataaacatgtgaaactgca

SEQ ID NO: 284341 - DNA, 1000 bp, Homo Sapiens; identical to SEQ ID NO: 220740

SEQ ID NO: 284342 - DNA, 673 bp, Homo Sapiens
tgaagccggaagctacctatctggtagggagctcccccagcaccgaagactgcgatgacttctgcactgacccaggggctggagcgaatcccagaccagctcggctacctggtactgagtgaaggtgcagtgctggcgtcatctggggacctggagaatgatgagcaggcagccagtgccatctctgaactggtcagcacagcctgcggtttccggctgcaccgcggcatgaatgtgcccttcaagcgcctgtctgtggtctttggagaacacacactgctggtgacggtgtcaggacagagggtgtttgtggtgaagaggcagaaccgaggtcgggagcccattgatgtctgagcctgccggagggcgagggtcggagaagcggattgggtcctgggcctctgtgatgaggcaggcacacctgtcggtcttggcttgctgctagaactagggccttctgctcgcccacctcccacccctacctggacgggcccaggcttggggactctgagctgtgttaaggagaacaagggcaaggagacctccctttgtgctccctcactccctaataaacatgagtctgatgttctccaaaaaaaaaaaaaaaaaaaaaaaaaaaaaaaaaaaaaaaaaaaaaaaaaaaaaaaaaaaaaaaaaaaaaaaaaaaaaaaaa

SEQ ID NO: 284343 - DNA, 1000 bp, Homo Sapiens; identical to SEQ ID NO: 115329

SEQ ID NO: 284344 - DNA, 1000 bp, Homo Sapiens; identical to SEQ ID NO: 115330

SEQ ID NO: 284345 - DNA, 1000 bp, Homo Sapiens
catcctctgtttattataattttagcaccaacttcacacctagctaatttttttcatcataaagtggatgaaatgagcaagtacctaaaaattttatttcagataaaagtcaggagttactgctaaaaaacagacatgtaggagacattcaacaggagtatgaaatgagagttagaccatatgggctgacaacaccataaataacaagaaaagggagtgctgaaataggagagaacagagcaaatgttagctcaaagtatagacttagaaatatcaaagtaagagctatctggataaatatatagatattgagtgcttggaatcctagcctactatgtgaaaattaagtctaatgtcagaataacttacagaaaaatagaaaatgcacagctttaaaatgggcagagttaaaatctattcccagctttatcacttatttagccatgctagcctaggcctctatttccttgtctccaaaatgagaataataaaatttaggtcaggattactatataaactaagataatacagtgattctcaaagttgttcagactgtatagtaaggagaaagtctggttgcactttgaagagcttgaagatttgaaagattcccaaaaaagcattttaaagtttacatttaagggaccttggacctcaaccctctcaagtttacaagtctgaaactttagacatcaaaagtttgagcagtttttccaaggcaacattgatagttagattcagggccaggctgtaagtctagaatttagatatcctgatcccccagataccgctcttctggttatacacagaccagctataatttgctaaacataaaatattgcagtgtattagccggctgtggctccagagtctgtgccctttaccaccgtgcccaactgtttcacatgctgtgtttggtagtttttcctagtactctccttaataatggtggtgtttagcaaattgtattacataaataaatatttatttcatggattga

SEQ ID NO: 284346 - DNA, 1000 bp, Homo Sapiens; identical to SEQ ID NO: 115331

SEQ ID NO: 284347 - DNA, 1000 bp, Homo Sapiens; identical to SEQ ID NO: 115332

SEQ ID NO: 284348 - DNA, 1000 bp, Homo Sapiens
agtgtgccatggaaagtgataagaaatgaacttctaggctaagcaaaaagatgctggagatatttgatactctcatttaaactggtgctttatgtacatgagatgtactaaaataagtaatatagaatttttcttgctaggtaaatccagtaagccaataattttaaagattctttatctgcatcattgctgtttgttactataaattaaatgaacctcatggaaaggttgaggtgtatacctttgtgattttctaatgagttttccatggtgctacaaataatccagactaccaggtctggtagatattaaagctgggtactaagaaatgttatttgcatcctctcagttactcctgaatattctgatttcatacgtacccagggagcatgctgttttgtcaatcaatataaaatatttatgaggtctcccccacccccaggaggttatatgattgctcttctctttataataagagaaacaaattcttattgtgaatcttaacatgctttttagctgtggctatgatggattttattttttcctaggtcaagctgtgtaaaagtcatttatgttatttaaatgatgtactgtactgctgtttacatggacgttttgtgcgggtgctttgaagtgccttgcatcagggattaggagcaattaaattattttttcacgggactgtgtaaagcatgtaactaggtattgctttggtatataactattgtagctttacaagagattgttttatttgaatggggaaaataccctttaaattatgacggacatccactagagatgggtttgaggattttccaagcgtgtaataatgatgtttttcctaacatgacagatgagtagtaaatgttgatatatcctatacatgacagtgtgagactttttcattaaataatattgaaagattttaaaattcatttgaaagtctgatggcttttacaataaaagatattaagaattgttatccttaacttaaaaaaaa

SEQ ID NO: 284349 - DNA, 1000 bp, Homo Sapiens; identical to SEQ ID NO: 116194

SEQ ID NO: 284350 - DNA, 1000 bp, Homo Sapiens; identical to SEQ ID NO: 220743

SEQ ID NO: 284351 - DNA, 1000 bp, Homo Sapiens
tgggaaagggatgttgtcatttctggcacaaatgaaaagtaggacggaaagctcctttcattcagtttatctttccaggatatatgaaaagggaccagctggaagactagcctcactctgtcctcgaaagcctgagctttcattcaactccctatttccatgcaaagacgctgggcaaaccacatgttctgtctgagcctcagttttcctatccataaaatgaaggtagccaggcctgcctcaaagagcattcaggaggctctgagaggacatgagagtattttgcaaagtgagggcaaggcccagtgtggagtgatattgttattccaagattccactgcaaaagtggctgctttggatgccagcccaggatgagtagttcctgttctcagggaggtcatccgctgagcatcccttctgcacagatgtctctgattcttgtccttgcaggtggaggacagggcctgctcccctaagctgggaagcctggaatgacctcttgcacaagcctaaattccaggaatcttccccaaatcccagatcctctgcaatctacctgcacccctgacccacccaggagttggaccgggagttgggaagcctaggtcttagtcctacactccttctaatttgctgtgtaaccttaccattaatctctctgggtctcagttttctcatctgtattggaggtagcagtgctagctctgccttcaggcatgcaatatgccagaactacagacaacagcccacaggatgcaaaagtgctttgccatcttaaaaatgccagatcactcagagcctatgaatgtggatatcaacaccaggtctctagcaccgctggatgaaaggagaaggctagaggctgagggaggaaagagcagttaacaaacaaaggcagtagctcatcacttgggtagcaggtacccattttaggaccctacactcaaatgtgcaaaataaaatttctatcattttgctataaaaaaaaaaaaaaaaaaaa

SEQ ID NO: 284352 - DNA, 1000 bp, Homo Sapiens
gttagtggatattttgtgttttgtttacagattattataagtataggcctcatgttttatgtagttcatcgagctcaagtggaattgaatgcagctattgtagcttgtgaaatggaactgaaatcttctctggttaaaggcaatcaaccaaataccagtggctcttcattctacaacaagaggaccctaacattttctggaggtggaatcaatgttgtatgattctaatgagatacgtgattgtcaagagcctagtgtgctatctaaggtctagcagtcacttcactagtgggcagagacaagttctaattgtattacagcacaaacaaaactgactagtttttaaattgcacaattttttttttttaaagcaagaatcattttctgggtatgtaagtgtaaatgtagatgcaaatttggctgcacctctttatcatgcctgtattggcctataggtctgcactttagtgttttttaattgttttatttctgtgtatttacgaacagagaaataacccaaatattatttctgcttagtgtctttatttataaagcccatgagtagtttgtatgcatctttcctacttgtaaagatgagtaaaagtatgcagttttaaatttataatattattggatgttctttgctttggtagtctttccagaaaggataaacagtggtttttgttttgttttgttttattgtttaagtgggaccacttagcttcccgtttccttactagttaaagaacagacattaattttcagttgaatgtatttttgcaggcatcatattgttacagggccatttacacctattcacaaagctttcatccctacccttggggggaactgaaatggctccttaaaaataaactggttttatttttccacctggggtaaaatatggccacaagccaaaaacacggcaaaatattatttttggggtgggaatgggctcaacctcccaaaaaattgggggaaacctcccttgggttctcct

SEQ ID NO: 284353 - DNA, 1000 bp, Homo Sapiens; identical to SEQ ID NO: 115334

SEQ ID NO: 284354 - DNA, 1000 bp, Homo Sapiens; identical to SEQ ID NO: 115335

SEQ ID NO: 284355 - DNA, 1000 bp, Homo Sapiens; identical to SEQ ID NO: 220744

SEQ ID NO: 284356 - DNA, 1000 bp, Homo Sapiens
ccagtttcagcacatcatggttggccttatcctgcctggtattgtcatcctgtcctgctattgcattatcatctccaagctgtcacactccaagggccaccagaagcgcaaggccctcaagaccacagtcatcctcatcctggctttcttcgcctgttggctgccttactacattgggatcagcatcgactccttcatcctcctggaaatcatcaagcaagggtgtgagtttgagaacactgtgcacaagtggatttccatcaccgaggccctagctttcttccactgttgtctgaaccccatcctctatgctttccttggagccaaatttaaaacctctgcccagcacgcactcacctctgtgagcagagggtccagcctcaagatcctctccaaaggaaagcgaggtggacattcatctgtttccactgagtctgagtcttcaagttttcactccagctaacacagatgtaaaagacttttttttatacgataaataacttttttttaagttacacatttttcagatataaaagactgaccaatattgtacagtttttattgcttgttggatttttgtcttgtgtttctttagtttttgtgaagtttaattgacttatttatataaattttttttgtttcatattgatgtgtgtctaggcaggacctgtggccaagttcttagttgctgtatgtctcgtggtaggactgtagaaaagggaactgaacattccagagcgtgtagtgaatcacgtaaagctagaaatgatccccagctgtttatgcatagataatctctccattcccgtggaacgtttttcctgttcttaagacgtgattttgctgtagaagatggcacttataaccaaagcccaaagtggtatagaaatgctggtttttcagttttcaggagtgggttgatttcagcacctacagtgtacagtcttgtattaagttgttaataaaagtacatgttaaacttaaaaaaaaaaaaaaaaaa

SEQ ID NO: 284357 - DNA, 1000 bp, Homo Sapiens
ggaggtaggcaaggagaagtgcctgcctgtgtactacgagcagctggtgctgcaccccaggcgctcactcaagctcatcctcgacttcctcggcatcgcctggagcgacgctgtcctccaccatgaagacctcattggcaagcccggtggtgtctccctgtccaagatcgagcggtccacggaccaggtcatcaagcctgttaacctggaagcgctctccaagtggactggccacatccctggggatgtggtgcgggacatggcccagatcgcccccatgctggctcagctcggctatgacccttatgcaaacccccccaactatggcaaccctgaccccttcgtcatcaacaacacacagcgggtcttgaaaggggactataaaacaccagccaatctgaaaggatattttcaggtgaaccagaacagcacctcctcccacttaggaagctcgtgatttccagatctccgcaaatgacttcattgccaagaagagaagaaaatgcatttaagtggaaatcggacctctaatccaagcatattgcttgctattaatcgccaaaacaggactgctgatgaggaatgtatttgcatatgtttgcaaaagctgaatcattgaaaacgtaccttgaaactctctatctctggacactccagggtagagaatgaagggtatggaagtagtccggcttttgaaacttaggtattttatatttttcccctcaagaacttttttttaagagacagatttgccatcctccttaatttgcaggactgccttggtggctttgtttgctgggacaaggcccacaacctgtgcctctcctattgacccttactttgaattcaaagaatctatttaagagtttaatatatgaggctttctttgattcctcctcagttctacctagtttcacagaggaaaaaaatactctttgaataaagtgaacagaggctcatttgtttgtgccttactttactgaaaaaaaaaaaaaaaaaa

SEQ ID NO: 284358 - DNA, 1000 bp, Homo Sapiens; identical to SEQ ID NO: 115338

SEQ ID NO: 284359 - DNA, 1000 bp, Homo Sapiens
agctgcacctggaggcgcactatgaggcactgcggcacttcctgctgatggaggacggcgagttcgcccagtccctcagcgacctgctctttgagaagcttggagctgggcaaacgcccggagagctgctcaacccgctggtgctgaactctgtgctgagcaaggccctgcagtgcagcctgcatggggacaccccgcacgcctccaacctctccctcgctctcaagtacctgcccgaggtgtttgcccccaacgccccggatgtgctgagctgcctggagctcaggtacaaggtggactggcctctcaacattgtcatcaccgagggctgcctgagcaagtacagcggcgtcttctccttcctgctgcagctgaagctcatgatgtgggcgctcaaggacgtctgcttccacctcaagcgcacagccctgctgagccacatggccggctctgtgcagttccgtcagctgcagctgttcaagcacgagatgcagcatttcgtgaaggtcatccagggctacatcgccaaccagatcctgcacgtcacctggtgcgagttcagggccaggttggccaccgtgggcgacctggaggagatccagcgtgcgcacgcagagtacctgcacaaggccgtcttcaggggcctgctcacggagaaggcggcgcccgtcatgaacgtcatccacagcatcttcagcctcgtgctcaagttccgcagccagctcatctcccaggcctgggggccccctgggggcccgcggggtgcagagcaccccaactttgcactcatgcagcagtcctacaacaccttcaagtactactcccactttctcttcaaagtggtgaccaagctggtgaaccgcggctaccagccccacctggaggactttctgctgcgcatcaacttcaacaactactaccaggacgcctgaggctgctctgcgggggacgtgcacaataaaggtgttctcggaccctgaaaaaaaaaaaaaaaaaaaaa

SEQ ID NO: 284360 - DNA, 1000 bp, Homo Sapiens
tacttttccaggtatgtgggagagaacaataacaataggaagtgctggaaagactttcagtgtaactggctggaagcttggctggtccattggtccaaatcatttgataaaacatttacagacagttcaacaaaacacgatttatacttgtgcaactcctttacaggaagccttggctcaagctttctggattgacatcaagcgcatggatgacccagaatgttactttaattctttgccaaaagagttagaagtaaaaagagatcggatggtacgtttacttgaaagtgttggcctaaaacccatagttcctgatggaggatacttcatcatcgctgatgtgtctttgctagatccagacctctctgatatgaagaataatgagccttatgactataagtttgtgaaatggatgactaaacataagaaactatcagccatccccgtttcagcattctgtaactcagagactaaatcacagtttgagaagtttgtgcgtttttgcttcattaaaaaagacagcacactggatgctgctgaagaaatcatcaaggcatggagtgtacagaagtcttgatttgtgcagaatggattaatgtttctgttagatgacctagtatggaattgttacttagtgctgccacctgctggatgttaaaaggtatttcagtacaactggaatttaaatatttccattgtttttccaaagcagttaacccaactcctaacaacattttcgggggatctgaccttttttttccagttgaaatgtattaacacaccttccacaatcattttataagagtcagcataacatagtggataagaaatgtgagatgtttaacctctcagtaactcggttctctcattataaaataggaataaaatcagtacctgtttcatatgaaggtcgtttctgagaattaaatggactaatgtatgcaaaaagcctggcaaacaataaacactcatctgactttagccggtaaaaaaaaaaaaa

SEQ ID NO: 284361 - DNA, 1000 bp, Homo Sapiens
tggaacccgctcacagacactgttcccatccactcttggatccacccatggctgccccttatgcaggcacggctggagccactctattcccccatccgtagtaagctgtccagcgccctgcagaagtggcaccccagcgactcctctgccaagctcatcctccagccctggaaggatgtcttcactcctggctcctgggaagcattcatggtcaaaaacatagtgcccaagctggggatgtgtcttggtgagctagtcattaacccccaccagcagcacatggatgcattctattgggtgattgactgggaagggatgatctctgtctctagcctggtgggacttcttgaaaagcacttcttccccaagtggcttcaggtgctgtgctcttggctcagtaacagcccaaattatgaggagatcaccaagtggtacctgggttggaagtcgatgttctcagaccaagtgctggcacatccatctgtcaaggacaaatttaatgaggcacttgatatcatgaaccgggcggtgtcctccaacgttggtgcctacatgcagccaggagcacgggagaacattgcctatctcacccacacggagcggaggaaggacttccagtacgaggccatgcaggagaggcgggaggctgagaacatggctcagaggggcattggcgtggccgctagctctgtgcccatgaactttaaggacctcattgagaccaaggctgaggagcacaacattgtcttcatgcccgtcattgggaagcgacacgaagggaagcagctctacacctttggccgcattgtgatctacatcgaccggggagtggtctttgtccagggcgagaagacgtgggtgcccacctcactgcagagcctgatcgacatggccaagtgaactgtggcaggtccagaaccagtcagagacttgcccctaagagggatgtactgtaaataaacagtatttttagatcaccttcaaaaaaaaaaaaaaaaaa

SEQ ID NO: 284362 - DNA, 1000 bp, Homo Sapiens; identical to SEQ ID NO: 115340

SEQ ID NO: 284363 - DNA, 1000 bp, Homo Sapiens
ggctccaccaggtaccaagggcagctgcttttcctgtcttttgtgcatgggcgacccattacagtatgagataagattgagttctgatgcgttaaacggaggtggcagaaatttgtcaagaaggccttatccatttcgattgtgtgacagattgaaatttattgtttacattggggaatgtatctcaaatttttaaatagaagagtaataaacagactttaaagcaaatattaagatttttactcattcaaggcaagtaaatgaatggaattatctgagctctatggcactggttgtttagagtgactgatgaagtgcaactttcaaaaacatttttgatgacatcaccagcctactgcagaagtgcagggcaccagtaaacaccatgtattattgaagatgaatctgtttgtatgtatccttgtcaaatatattctataatgaaataaaatctgaaaagtggatttcttattgacctatattcatgaaagcatataaattaaaatatttaaaattagatatgattcacactatattctgtttcatatgcagattttattctcacctgggccatttgcagatgagactgtagtttgcagatgagactgtagtttgcagatggcgtggaagcattcatcaggggagataaccataaaggatttggcctaattaccatactcaattgtcagtttacgtggttttgtgaatactggcaaaagcaattgtttttaaattaacaatggagagaatgataagatgagggaaggaaaaggcattcattattgacttacatgtcagtaaggtctgcttttatttctatgtactcctgtttgccaagctcaataatggacaaaggatacaaacacacacacatctactattttagataaatgtactgttatatatatatgtaaactactattgctctctttataatgattaatcactttattatgaatgaatgaatgaatttgatggatttaaaaaaaaaaaaaaaaaa

SEQ ID NO: 284364 - DNA, 1000 bp, Homo Sapiens
ggaagaagaagtaaaagcataccttgacttcagagaaaaaggaggctacagaaccacaacagtcattttttatccaaaagatcccacaacaaaaccattcagtgtattgctatatattggaacatgtgataatcctgattatcttggtcctgcacctctggaagacattgctgaacaaatttttaatgcagctggtccaagtggaagaaatacagaatatctttttgaacttgcaaattctattaggaaccttgtgccagaagaagcagatgagcatcttttcgctttggaaaaattagtaaaggaacgtttagaagggaaacagaacctcaattgcatataatttagtcttcagagaattaacttcagtgcacaatgacaatatgatttggaaatacgtttacttaaagatcttatttttaatgtagtgaggatattatttaaacttttattttaactggaaatgtcctgaaacacatatttaaaatattgggatacagtgaaagaaaaattcaaattttaataacataaagatttcctaactttatgttattgaacacttactcactagaagtgagttctttagaaaaatacagtgaaggactcagttcagtcttgtttttatcagagtgataatcatcctgtttcacatcccaatactattttgaaattctaaacaattaaaccaaaattccaataaatataaggttatgccttcaatatattcctatacaattctgtaaccatggtttaaaatacacaagcttaaaataacatgcttagaaatacacaataatatgaacagtatttcagccttaattgtgaatttccttgttattcaagtattaaatgaaatcttttgagtttttagccaaaaattggcatttttaaaatacgaaaatttccttggaattataatgtactgtacctcttcttttttaaataaaggcattttactatatggaaaactaaaaaaaaaaaaaaaaaaaaaaaaaaaaaa

SEQ ID NO: 284365 - DNA, 1000 bp, Homo Sapiens
tacagaaaattcacaccctgcagaagcgtctcatcagcaagactgaagaggtggttgaaaaagagctgctcctccaggaaaaggagaaactctacatggaactaaagcacgtcttggcccgccagcctggacctgaggctgcggaacagctgaagctgtaccgacgcacgctgcatgacaagaagcagcagctgaaagttttgtcttcagaattgaatatgtatgaagtacagagcaaagaatataaatatgaggtagagaaacttaccaatgagctccagaatttaaagaagaaatacctcgctcagaaacgtaaagaacaacttcaaaaaaacaaggacacagcacccatggataacaccttcttaatggtcaaaccaaatggtcctggttttactgggggcggatttcctctcaggtcaaccaaaatgacgttctaacctgaagctgctggctgtttccagttgaacaactcatgaaatctgctctgggacattttgggggaatctcaaagtccttggatcatagaactgagtgctgagaatccaggatggaaagaaatgcagaactatcatagtcacatacatataagagggatggtgttttgtctggttcacgttgatattaacagatcataattctctctgttcagttaggctgacctattgcatgaagcaaatcttttgttgctaccccattgattgaaatgtactagaccttaatttctttattacagacattggtgtacttgaaggttttatatttaaaagtatttttgaaatgcaatgtgtcccctctcaccttattaacaataatctattttaattattcctcattaacaagtcattgcatgagatgagaaagaaggacaaactcttaagaatttaaaaagtgttttgagaatgatttctatatggaatttcttttcaggcccggaatgggaaaatctattccaaagagacacactaataaatacttcattataaaaaataaaaaagaa

SEQ ID NO: 284366 - DNA, 1000 bp, Homo Sapiens
gatgaagtcgtcttcttcggtgaccacttccgagacccaaccctgcacgcccagctccagtgattactcggacctacagagggtgaaacaggagcttctggaagaggtgaagaaggaattgcagaaagtgaaagaggaaatcattgaagccttcgtccaggagctgaggaagcggggttctccctgaccacagggacccagaagacccgcttctcctttccgcacacccggcctgtcaccctgctttccctgcctctacttgacttggaattggctgaagactacacaggaatgcatcgttcccactccccatcccacttggaaaactccaagggggtgtggcttccctgctcacacccacactggctgctgattggctggggaggcccccgcccttttctccctttggtccttcccctctgccatccccttggggccggtccctctgctggggatgcaccaatgaaccccacaggaagggggaaggaaggagggaatttcacattcccttgttctagattcactttaacgcttaatgccttcaaagttttggtttttttaagaaaaaaaaatatatatatatttgggttttgggggaaaagggaaatttttttttctctttggttttgataaaatgggatgtgggagtttttaaatgctatagccctgggcttgccccatttggggcagctatttaaggggaggggatgtctcaccgggctgggggtgagatatccccccaccccagggactccccttccctctggctccttccccttttctatgaggaaataagatgctgtaactttttggaacctcagttttttgattttttatttgggtaggttttggggtccaggccattttttttaccccttggaggaaataagatgagggagaaaggagaaggggaggaaacttctcccctcccaccttcacctttagcttcttgaaaatgggcccctgcagaataaatctgccagtttttataaaaaaaaaa

SEQ ID NO: 284367 - DNA, 1000 bp, Homo Sapiens
ttcaccatgtgttggtcaggctggtcttgaactcctgaactcaagtgatccacctgcctcgacctcccaaagtactgggattacaggcgtgagccactgtgcccagccttgtacttttttttttttttattgtagctctgtatagcacttggataatgtctgggtgtctccttaaccatcaaactgttctttatttaaaatgtttaattaccgtttagaaattctagtcctcaataagtgggtggctcatgctattgttgttcctaaagctaagctttgctgggaaggaaatgacctatagtttcttaaagaatcattaatccttataggattcctgagttactgttttgttcctccccactgcttcccattcctgagttttgtaattcctaatccttctataatttctattaccttcaccatagtcattctttccttacgcaaagcccaaggaatgagctgctgctactttaaagtgtggtcattatgatgaatgtgaaaagagttttggcttgttctaaataatttttacaagttatggtacagacagttgttacatatcaaaaaaaacctgtttattgaaacaggaaataaaaaagggatcttttacattatagaattaaaactaattttttcttgtatataaactaattggtttgattttaaatatttctggcttttattaatatgtcctaattttgagtttgaaaatgttaagtgcaataaaaacatactagtacagattttgttttgttccaattggcatactctggggatgatcacttaaaaaaacagattttacataatgcctacttctggtagatgtcttatgagattgttctgctttttctaagttacttagatgttggatatgtacatagctgtttcttgttctgtatacatttctcaaatgtacacttgtattataataacctcccagttctaggggatatttgtgcaataaatacacatgtcaacttgaaaaaaaaaaaaaaaaaaa

SEQ ID NO: 284368 - DNA, 1000 bp, Homo Sapiens
ttaattttattttgcttttccttaagatccttaaggctgttatgccatttgtccatgaggcaatcttttgagtaggtctctttcaagaattggaatatacacaggaatctctaaaagaagtatcaatgtgactcacaacaattacacatttacagatacatgttgggattgggggaagaaaaaaaagttgtgatttggaatcagttttctatagaaaaatagaaaaaggaaacgcagataccctaaacaatgtatcagctgtaaaattcctgaatgtcaggcagaggatgggggtggcatacaattgctttacacatggcactgtgagtggcgcatagaagggctcaggtaaaattcatggttggcggaccaacgcttttcataacatggaagatcaaaatgacactgaggtagagcacaatcaactgtgcttctctgtgacatcatgaagctgagcattcttccaaagatctaaagaagaacaaaagacttcaccaattacagtgatgctgttaaattaaaactagaaatcgagactcttgagacccaaaagtgtctgaagtcagactgctgggtacgaacattggctcttgtcagactgtttatctctatgcttcagtttccccctctgtaaaatgggattaatagcagtgcctcccctcagaatgtgagagttgaggggctcacacatagcacatactatgtgctccacaaaggtgatctatgtggggcactgagcactgggtgagcctgactcccccgagctccgctgagcactgcacgtcgctggcaaagccattttcttttccttccctcatctgaatctatccaaatactctctagcaaatggttcagatcaaataaaactcaacattttgcaaaaaaaaaaaaaaaaaaaaaaaaaaaaaaaaaaaaaaaaaaaaaaaaaaaaaaaaaaaaaaaaaaaaaaaaaaaaaaaaaaaaaaaaaaaaaaaaaaaaaaaaaaaaaaaaaaaaaaaaa

SEQ ID NO: 284369 - DNA, 1000 bp, Homo Sapiens; identical to SEQ ID NO: 220745

SEQ ID NO: 284370 - DNA, 1000 bp, Homo Sapiens
ccagcagagccgcagcactgcagggcccttctgttgtgagtgccagggcccttgctggctgcctgagcaaggcaaaaggttcaaaacaggaagtctctgggcagctattcccaggtgcagaggggagcagcggccacacaggtgccagtgtggcaggagctgcagtcagaggcagcatctcaagagccctgggagcaggggccagccacgtgaagcccacgagtgtcgctggcacagggaagggacacgaggatcacactgacccaagagaaggcccacagtgaggaggccccaccgaagcatccccagcaacagggactgaggcatctgaggcagccagcccactcggaaaggcctgctgactgcactccagatgtcaagagcacccttgggaaaaagaaaggcaggagtgcagcactttctagagcctcagctcacttctctccttctagctccagccggagtgatggaagaggctgcgctgggagctgcctccctgggagcctaccctgcccagcctgagagtggaggctaccagcatcacgcttcccctagtgaaatccatctgtcctgaagggaaccctgggacggggtcaaggaaaccctgttcacccccaccacggggtcaggtcttcaccaaagggaggccgcacggattcccagtcgcaaacccaaagccttgctgcctttgcctctgtttccatagttgtttcaatgtcttttttaaaaatcacatacactcgagtaagactgagtctcctcaccgaagagatctggctgtatcccgagtctctgaaacctttgctccagtcccgtgggagcgtgccgtcccgaggatgtggagccgcaagggctcgccagagggatctcaggagctaggcctcaaggagcgctgttgagtgacaggtctgatgcagtagcttttactattggtggaaatcgatgttttttccttgaaagtctacctttctaagttcagtaaaccaaattagatcatgta

SEQ ID NO: 284371 - DNA, 1000 bp, Homo Sapiens; identical to SEQ ID NO: 115344

SEQ ID NO: 284372 - DNA, 1000 bp, Homo Sapiens; identical to SEQ ID NO: 115345

SEQ ID NO: 284373 - DNA, 1000 bp, Homo Sapiens
ctgaaaaattcctcacagttcttccagagctatgtcgaaagaggccttcgggtgattgagatggagagggagggcaaaggtcgtatttccacttcaacaggcatctcccctcagatggaagtcacatgtgtgcccacgcccacaagcacagtgtcctccataggtaacacaaatggggaagaagtggggccatctgtctacttggaaaggctaaagatcctccgacagcgatgtggtctggacaacacaaagcaagatgaccgacctcctttgacctctttgctctccaaaccagcagttcctactgtcgcctcttccacagacatgctccacagcaaactctctcagctccgggagtcacgggagcagcaccagcattcagacctggattctaaccagactcactcttcaggaactgtgacctcctcctcctccacagctaacatagacgacttgaaaaaaagactggagagaataaagagcagtcgcaaatgaagctgccccactcccccggcaccctgcagctttagtttactaaactagaagtcctcatagtttaaaatggcctcagcaggcctagtgtatacaaactggttgtatgtatcatgccgtggagctagggggaggagtcattgtggcacaagtatttgtacatactctgcttctctctgtcagcgtcctgctgctctagaagactgtccgtggatgagtttagtgtacagacttgtaaacagctgccccctctctgctcagtctagttcccagatccttttcttttctttttaattgctcatttgtaaaattgtcctaatctttcctagctttttaatagttaatattagaaactctttaatagttttcctttcagtttgtgagctcttctctgtcgccctgaagggtcactgtattctgtatgaatgcatggcatgatacaactaatttaagagtcttttataaataaagtttgcattaactatacctgacaaaaaaaaaaaaaaaa

SEQ ID NO: 284374 - DNA, 755 bp, Homo Sapiens
ctcttcctgtctgtaccagggcggcgcgtggtctacgccgagtgacagagacgctcaggctgtgttctcaggatgaccgagtgggagacagcagcaccagcggtggcagagaccccagacatcaagctctttgggaagtggagcaccgatgatgtgcagatcaatgacatttccctgcaggattacattgcagtgaaggagaagtatgccaagtacctgcctcacagtgcagggcggtatgccgccaaacgcttccgcaaagctcagtgtcccattgtggagcgcctcactaactccatgatgatgcacggccgcaacaacggcaagaagctcatgactgtgcgcatcgtcaagcatgccttcgagatcatacacctgctcacaggcgagaaccctctgcaggtcctggtgaacgccatcatcaacagtggtccccgggaggactccacacgcattgggcgcgccgggactgtgagacgacaggctgtggatgtgtcccccctgcgccgtgtgaaccaggccatctggctgctgtgcacaggcgctcgtgaggctgccttccggaacattaagaccattgctgagtgcctggcagatgagctcatcaatgctgccaagggctcctcgaactcctatgccattaagaagaaggacgagctggagcgtgtggccaagtccaaccgctgattttcccagctgctgcccaataaacctgtctgccctttggggcagtcccagccaaaaaaaaaaaaaaa

SEQ ID NO: 284375 - DNA, 1000 bp, Homo Sapiens; identical to SEQ ID NO: 220746

SEQ ID NO: 284376 - DNA, 1000 bp, Homo Sapiens
ctctgcacaaataaggatctgaagaaagccattttggaagatatggtgaggttaggaaaagaaagtggactccattcttttgagcaggttaaagccattcacatccattctgacatgttctcagttcaaaatggcttgctgacaccaacactaaaagctaagagacctgagctgagagagtacttcaaaaaacaaatagaagagctttactcaatctccatgtgaagttcaaggaaagttcttctcagtgtaatgaactgtctagcaatattatagttattcttgaaagtaatgagtcaaaatgacacagctgaaaatgaataagcatctgattttatgactgagccttttcctgtcccaagaggtctttaacaatattttctctatcatcaatgagtatattttatttttattataaaaatgatattgtggtggactgctaaaaatatcacaaatggcaatgtaaaaatcaagacattttctcaagaactgtgtaccactaaaagtaatatattgtcaatgttcacagaactattaaacataaaggaaaaacataagtgatatattctacttaattatttgtgaatcagtaaccagatgcagcaaatatctaggcaatgtggactacctcattcagtaactgattgtcaaaatcacaattaaatcagacttcaaaaattaaagctaggtgtatagaatcatgctaaaagaaaacatgataactcatagtctacgtaacttcagagtctttaaacatgacaatccacattgtcatatgtgaaaattttctctctgatttttactttcattcatgaaaaatgaaaattcagaaattctttttttcctttttgttttgagacggggtctgctctgtcacctaggctggagtgcagtggcttaatcatggctcattgcagtctccatctcctgggctcgagtgatcctcctgtctcacctcccaagtagctgagactacagtacaggcacatgccaccacacc

SEQ ID NO: 284377 - DNA, 1000 bp, Homo Sapiens; identical to SEQ ID NO: 115347

SEQ ID NO: 284378 - DNA, 1000 bp, Homo Sapiens
gccagcttacctggaagccacagagccagcagtgacacatgacaaaaacacctgcattatttacgaaagccatgtctaataccaaccccgaaaagctatgcatatcaagaaaatcaggggctgctccttgtaatacagatgtagtacgcacttgccgctaagccttaccaggagactctcatcccttaggtaggagtgatgccactttaaaaggagaaacacctgcctgcagtgaatgggactggaatttccccagtagagaagggtgcgagaaacatcagggtgcagaattgataccagacagaaggtgtctatgtgataatgagtttcagaggctgatctctgccaaataccttaattggtgatgccttcttggcaaagagtacaccactgtaagatattctgagttcaagaaccctgtccagtgccccctgcattgcttttccttttaaaaagtataggtctgctacaatagcaaacgcacgtacgtgggttttttgcagtttcttctcagttttaattttgcttttcctttataatggggtcattgttattaatactaattgttctttctggtttagtcctcattgccacttttgtccttatgtttccctagaacacgtacctcagagactttggtatcagtcaccagtaccagggctgatatctacaagtcacattacatttgtcatgttccaaagtagttacgaggcttgttatttttttttcattccccaggcctatttccatagatagctttttttgtttgtttccaacgaagctgctgttaaacgaaactgagaaaaactttgccccggaatagcactttaatagtcaaaaatgtgtttacctgtctgattgagtgagccttttggtgagctcagctgagatgtagagggagattgtaaaaggttaaatatacccacaccacccatgaaagtcactgtttaagttacatcatcctccaaataaagactgattctttacctggaaaaaaaaa

SEQ ID NO: 284379 - DNA, 1000 bp, Homo Sapiens; identical to SEQ ID NO: 115348

SEQ ID NO: 284380 - DNA, 1000 bp, Homo Sapiens
ataaatcggattccttgtgtcctttgtgctagtgtaacccgggactggaatgtaaagtgaagttcggagctctgagcacgggctcttcccgccgggtcctccctccccagaccccagagggagaggcccaccccgcccagccccgccccagcccctgctcaggtctgagtatggctgggagtcgggggccacaggcctctagctgtgctgctcaagagactggatcagggtagctacaagtggccgggccttgcctttgggattctacctgttcctaatttggtgtggggtgcggggtccctggccccttttccacactcctcctccgacagcagctccctgggcagtggcctggtctcaccgtgtgcagccttgtggtttatgcttaaatgtacattttcctgctggtaaaaggagaaactgagaggtgtcctgcagaccggctgaccactccttttggagacggcaggaggcctgagcgatccgtactcagaacgtccaggagagacgcatggcccgaagtcaaagtgctggaattttccaaaacagcctgttctctcctctctcctccccagagcaccccctgccatcaggggggttgaaatccctctcccccaggagccctgctgctttgcttggtggtagggcaggagagcaaacaaacagtcatggtctaaaacccacatagcactttgctcttagttacatgtaaaattttagatttctaaaacaggtgggcaatcattttgaatactgttctgtgaccctgactgctagttctgaggacactggtggctgtgctatgtgtggccatcctccatgtcccgtccctgtagctgctctgtttagacagcggacagacgctcacgcccaggggatgtcctcacgctgtcgccgcgcggtttcccttcgcagatgtgtatactcatgataggtcagaaagtgtatccgctacaataaagttctggttctaactaactccaaaaaaaaaaaaaaaaaa

SEQ ID NO: 284381 - DNA, 1000 bp, Homo Sapiens
aaccagttcccagctggaagtaacaacatctacaatcagatagcagaactatggaaaccctggcttagtaatgagtccatcgctctcttcaaaaaaggtgccttctactgtgagaagctgccgggtcccagcggggctgggcgaattgtggtcctcaacaccaatctgtactataccagcaatgcgctgacagcagacatggcggaccctggccagcagttccagtggctggaagatgtgctgaccgatgcatccaaagctggggacatggtgtacattgtcggccacgtgcccccggggttctttgagaagacgcaaaacaaggcatggttccgggagggcttcaatgaaaaatacctgaaggtggtccggaagcatcatcgcgtcatagcagggcagttcttcgggcaccaccacaccgacagctttcggatgctctatgatgatgcaggtgtccccataagcgccatgttcatcacacctggagtcaccccatggaaaaccacattacctggagtggtcaatggggccaacaatccagccatccgggtgttcgaatatgaccgagccacactgagcctgaaggtcaggagtcctgcggaggccagaggaggagggtgggaggggcttaaatgcatcaccaccttccctcactctcagcttatccaccttcccctgaccactgagcctcaggaaggttgagctccttccacccttctccagctcaggatcagaaccctggaggcacctgccaccgagtcagggcagtgcctcaccaagtcaccttttcccctggatgactgtcacagcctcatacctggtctccctgcctctggccctgccctgctatggcccatccgctacacaagagagaagaaactaatctcctatagcaccactttcatcttgtctccgtcctgctcaaaaaccttcagtggctccccagtgccttcaagataaagttgtgtctccttgacctagtaaaaaaaaaaaaaaaaaa

SEQ ID NO: 284382 - DNA, 1000 bp, Homo Sapiens
cctactcatattttgaagaaatcttgagttaagtgagttctgaggctgctgggggaaccagatcaattcaaagctaaatacttctttcagaaaggggccactgtggaaagtgctggtggggtttgcccttgatcaagtgcctccattgtgctgcaagggctgtagacagcagggtgggacagtcagtcctccgagcagcaggaatcatcccgtcacctgcagccttcccatgcttccgcctttattcagaactttctgtgccactgtagatagctcaggcaaaactattacctgggtatttatccactaatgagtcacaagaaaaggagtggatttggtaagaatagagatttgttttatttaaaccacttcccattactgaccattaaaagctcaccactagagttcctgaaacaggtgaaacctgtatgacagcccttccactttggggagccacgcttttgatgtgacagtaccgcagagtgattcccccactgaggatgtcatcatcaaactcttctttggtgtgtgaattattagtggaaaagacccagctgtaattagacctccactgtgtacttagctggaagaacatgttaattctgcaatatgtttcttggttaaacattgcacagttcttacctcatttctgtaaataaagttttgtgaatctgttttgtattgtgacaaattcataagataacattgatattttgatttgtaatatttctaattggtagatttaattgaaaagtaaaattaatttatttttatatgttcaggggaattttaaagtcaaatcttttgtagataatttaaaaaatcagtgtggtttattttacttatttaacccactggttgttattctgtaacagtttgtataaatggtaaattttgaatgtgttgttattttacctagatgtaaaattccacatgtattaaaatgtacaaaatgttttgttaataaaatttaataatgttaaaaaaaaaaaaaaaaaaa

SEQ ID NO: 284383 - DNA, 1000 bp, Homo Sapiens; identical to SEQ ID NO: 117676

SEQ ID NO: 284384 - DNA, 1000 bp, Homo Sapiens
aaaaggacttccctagaagtgagtcttggggagttggggggagaaaagtgtcgaggagggcgtcggagtttcccaccgctggctgcttcccggcccgcacgcccgggagggtggcggtgggcgcgcagagatctttgcaaaacagcgtccagggcggaaaacaactcacaggcctgccgcccccaaaggcgggcaggtccggacgcgctgggccctggtcccttcggccgcaaacggcgcaagtcacgcactgcgttcaccgcgcaacaggtgctggagctggagcggcgcttcgtcttccagaagtacctggcgccgtccgagcgagacgggctagctacgcgactcggcctggccaacgcgcaggtggtcacttggttccagaaccggcgagccaagctcaagcgcgatgtggaggagatgcgcgccgacgtcgcctcgctacgcgcgttgtccccggaagtcctgtgcagcttagcactgcccgaaggcgctccagatcccggcctctgcctcggccctgccggccctgactcccggccccacctgtcagacgaggagatacaggtggacgattgaagacaaagccgccgccaatcctgggctctggggccctggactcctcacctcgcgctctgcctctggccagagttccagggtggaggaaggaggtccacttgggcctcttccggcccacagtccagacgctcacctttcccggtttttttgtaagtttgttttgttgtctgagacagggcctcgctctgtcgcccaggctggagtgccgtggagcgatcaccgctcactgcagtcgcgacctcctgggctcaagcgatcctcctgcctcaacctcccgactagctggcattacaggcgtgcagcaccaccccaggctaatttaaaaaacttttttttttagagaggaggtcccgctatgttgtccaggctactttcccaatatttgagaataaagtcgagactctgccgcaaaaaaaaaaaa

SEQ ID NO: 284385 - DNA, 1000 bp, Homo Sapiens; identical to SEQ ID NO: 115350

SEQ ID NO: 284386 - DNA, 1000 bp, Homo Sapiens; identical to SEQ ID NO: 115351

SEQ ID NO: 284387 - DNA, 1000 bp, Homo Sapiens; identical to SEQ ID NO: 220749

SEQ ID NO: 284388 - DNA, 1000 bp, Homo Sapiens
ctttagtaaatggggaaattaacaggactttcttcttcatcttcaaactcttcagaagcagcaacagggctagttaattcaactcccaattgttctgaaagtttttttaccttctcttctaagagaatattcttcttcacttcttccttgtaattatacttaagatcttcaatttcttcaaaaaatgaaggatcaaaattttccagttcttttttcagcttctttatttcctcctaatggaaacattatctttaaaagttgcatataggaaatatacatattttacgtttgaacaaggagatttaattgtaaatatgaaagccaaagtattcctgaatggtcaaatacagcaataaaggcagaagaattaagatttttctttgttccattgtacagtgtaaataactaagttgttaactgtcaagtccagttatgtattctgtaagttgtgttctagtctttgactaaaatttatcatctcttataatgggacttaatctttctctaaaagcatataagagcttgtcaatagagcaatcaatcaaaaagattttgtgattcataacattgaagttagtctggttaagagttttggtttagacttcatttatattttccttactaatatctaatatttaatgaataatgatcaattttttataaagttattaatatgatcagggaaacctttgggacttctgacaggcatctggtgaagagacaattcaagccttagtgactatttagaatagccagtgatcactagctaattctcatatccatgcctttttgtcctgtttacagtcttaaaagaggtaaaacagcaaatatttttttaagggaactataaccttaggattcctgaaaagaatttcaaaaaaaaaataaagacactgttgccaatgtgacccaaaacttaagaacatactaatggcatatatttgttacaattaaaaaataaatttactacttaatcctaaaaaaaaaaaaaaaaaaaaaa

SEQ ID NO: 284389 - DNA, 1000 bp, Homo Sapiens; identical to SEQ ID NO: 220750

SEQ ID NO: 284390 - DNA, 1000 bp, Homo Sapiens
aggctgcaacacgaggctgccgttcagcacccgtcgagcatcattggttgcagagtgaggagagatccccctaactccaccgaacgatacacacgttggatcaaccagctgacgccggagcagctcctaacccaggttttcacctcaaatggccccacggtgatcatgcccacctggttctgctcgcgagcgtggttctcccacgtgggcccctttaacgagggaggtcagggcgtcccggaggacctgctgttcttctacgagcacctcaggaagggcggcggcgtcatccgcgtggaccagagtctcctgctgtatcgccaccacccacaggcggccacgcactgcgtcctcgagacgaccatctggacccaccgcgtccgcttcctggaagagcaggccctgccccgctgggcggccttcaccatctggaacgctggcaagcaggggcgccggctgtaccgcagcttgactgccggcagccagcgcaaggtggtggcattctgtgacgtggacgagaacaagatcaggaaaggcttctattgccacgaggactctcaggaaagacccaagccccgaatccccatcctgcacttccgagccgcccggccacccttcgtcatctgcgtgaagctggacctcacagggggcgcctttgaggacaacctgaggtcactgcacttgcaggagggccaggacttccttcacttcagctgacggacccatggcagctgctcccagtgcatcccaggccagcaggagctttgtgagctgcaggcatggcgatggtgcgcctgttccacacccagcaggcgcaaccagagtctcgtgtgtgccgaccacaggagccaagccttttccactgtgtggactcatgtggccaaggctaggcctggtcacccaggaccctcaccacgtgaccccagccaatcgggacagttcaaggaggaggagacccctattacacaggttggaataaaatatttaaatctcgtaaaaa

SEQ ID NO: 284391 - DNA, 1000 bp, Homo Sapiens
acaactaaataaacagacgttgttttaaaggaattaacacttaaatcccaaccatcctcatatagaataaaatatcaacctaaatctttactatagatagtataattctattatgtacctgtaatgataagcattgaaagattatttacattttgaaaaacatggaattgattcttattaagaaaaaagatattttccaatggagtaacttgttttaatagaggtacaaccagaaccaacaattgtatttctctatagttattttaaaatagtaatcaatgctatgtatttgatgtatatgtttctaaattagaaatttcttttggctttgtgtttttttaatgtgcgttaaatatgtaaactgaacctgttcctaaaatgcattaaacttgaatgctgtgtctatccaatgccaaaatgctcagaagaaaagtgaataattcagtcattcatctggatgtagttttctgtgtaatctcaaatatctgaatattgaaaaaactaggttgctaacttttttcattccttatgcaaatgtttagcatcatagtgctgtttcagatacagatctgtttcatcaaatatcctcaattacaagtctaagacagttatatgtaaagaaaatgtattattttagatgaacaatgtggataactgaactaaaacgatatttgtgaactttgctataatgaaatcttttatttttatagctcaggtattgtaattagcactaattgcagcagagactgaaataattattgacaccgtagagtaccatagagtaggttgaactggccagacctagacaatgaagaaaacacatactgtttacttaggagacattttcttagtcgtgtgtatagtcctaaatttccccaaactatgtgttcatttggattgtgttatataataacagtcgaatgatgaagaataaaagatgctgaaagatggcctatttttgttcaataaagattgttacaagaataaaaaaaaaaaaaaa

SEQ ID NO: 284392 - DNA, 1000 bp, Homo Sapiens
caacaatggtccctcatttaaagaagcctctacccagtagggccgagtctgctaggactttttattgggtttggtaatacgtcacaccctttagcctctactgtgtcagccatgtcccatttatacaagacaaattgctgggtctgtcctgagcggtttgctcagttcagtaacactaaggaacctcttgatgacttggtatttactgtcttagcattccctttgttagctttacctttagccattaaagacttgtcaggcataaatggaacatggtatgggaacactttcaactgagtaactaactcctcccaggaaagcatttcctccctggtgccagaaaacactttccccaaagataagcctcacaccctcaggctaggaaaagttggccgggtaatagcaaatgcctcctcctgttttaaaagcagaggaaaaggaccatacctgggagatctcaaatattataacaccatacttgtaattgctgaaagctcggaagtttggagaaaaagacataagaaggatgatctaagaaaattggaagccatatggaggggaggctttcagaattcagcgtctcctcctggttgaaagtcctgctgggaatggcaggctctgggtaaccaccctgacacatggcactataatgtaaaaaacaacacataggccttcccagacatgcaccctcatgggattccagaccccctgtatgatgcttagtagtagtggcctacaaatctgtgggtgaacagaacaggagacttctggactgacagcccctgtcacaagggggcattatctgagatattggccagggcatatcgtgtccctggtcttttgaaactccatttgtcggccaggtgtggtggcttacgactgtaatcccagcactttgggaggctgaggcaggtagatgatgaggtcaggagttcaagactagcctggacaatatggtgaaaccccgtctgtactaataatataaaaaaaaaaaaaaaaa

SEQ ID NO: 284393 - DNA, 1000 bp, Homo Sapiens; identical to SEQ ID NO: 115352

SEQ ID NO: 284394 - DNA, 1000 bp, Homo Sapiens; identical to SEQ ID NO: 115353

SEQ ID NO: 284395 - DNA, 1000 bp, Homo Sapiens; identical to SEQ ID NO: 115354

SEQ ID NO: 284396 - DNA, 1000 bp, Homo Sapiens; identical to SEQ ID NO: 220752

SEQ ID NO: 284397 - DNA, 1000 bp, Homo Sapiens
ggatttaataaggctggtggttttcatggaatatatgctggcgttccttctgctgctattggatcctttcctaatgctgctgcattttttatcacctatgaatatgtgaagtggtttttgcatgctgattcatcttcatatttgacacctatgaaacatatgttggctgcctctgctggagaagtggttgcctgcctgattcgagttccatctgaagtggttaagcagagggcacaggtatctgcttctacaagaacatttcagattttctctaacatcttatatgaagagggtatccaagggttgtatcgaggctataaaagcacagttttaagagagattcctttttctttggtccagtttcccttatgggagtccttaaaagccctctggtcctggaggcaggatcatgtggtggattcttggcagtcagcagtctgtggagcttttgcaggtggatttgccgctgcagtcaccacccctctagacgtggcaaagacaagaattacgctggcaaaggctggctccagcactgctgatgggaatgtgctctctgtcctgcatggggtctggcggtcacaggggctggcaggattatttgcaggtgtcttccctcgaatggcagccatcagtctgggaggtttcatctttctgggggcttatgaccgaacgcacagcttgctgttggaagttggcagaaagagtccttgaagcagagacaagcctcacctccacttctgtcaagagaggggcctgcagtgcaaaccctcttccgctgagcagctgtctgaactataggccccagtgctgaagaccagttgtgctaagataccggcatggagattgtgccatccgtggtataggctggctggtatgaagtcattggcctgtatgccagagagctaagagaagagaacggggtctgtggcggtactctgaacaatttcctcagaacctcttaataaataagtttggtaatgctgagaaaaaaaaaaaaaaa

SEQ ID NO: 284398 - DNA, 1000 bp, Homo Sapiens
ggtgggccgtggagtcggagtggacaccgctcagtattactttctgccgctgtcaaggccgagggccaggcagaatggctgcacgtaggttccccagagagcaggcaggggcatctgtctgtctgtgggcttcagcactttaaagaggctgtgtggccaaccaggacccagggtcccctccccagctcccttgggaaggacacagcagtattggacggtttctagcctctgagatgctaatttatttccccgagtcctcaggtacagcgggctgtgcccggccccaccccctgggcagatgtcccccactgctaaggctgctggcttcagggagggttagcctgcaccgccgccaccctgcccctaagttattacctctccagttcctaccgtactccctgcaccgtctcactgtgtgtctcgtgtcagtaatttatatggtgttaaaatgtgtatatttttgtatgtcactattttcactagggctgaggggcctgcgcccagagctggcctcccccaacacctgctgcgcttggtaggtgtggtggcgttatggcagcccggctgctgcttggatgcgagcttggccttgggccggtgctgggggcacagctgtctgccaggcactctcatcaccccagaggccttgtcatcctcccttgccccaggccaggtagcaagagagcagcgcccaggcctgctggcatcaggtctgggcaagtagcaggactaggcatgtcagaggaccccagggtggttagaggaaaagactcctcctgggggctggctcccagggtggaggaaggtgactgtgtgtgtgtgtgtgtgcgcgcgcgcacgcgcgagtgtgctgtatggcccaggcagcctcaaggccctcggagctggctgtgcctgcttctgtgtaccacttctgtgggcatggccgcttctagagcctcgacacccccccaacccccgcaccaagcagacaaagtcaataaaagagctgtctgactgc

SEQ ID NO: 284399 - DNA, 1000 bp, Homo Sapiens
tttccaatttaatttagatcctctaatctttctacatggacaagctgttttcttttctaggttactgataacccctacaattttcgacttaacttcaaaacacagtattgtgttatctatcacataacaggaccatgtttttaacctaccatcaagagcctgtattttgagttattccaacagagatgatggattcctgtagaactagaggtgggtgacctatggttatgtggcacggcaaagcaagtacctcttaagggactctaatatatgctaacgctggtcctcttagctctgtgctctcaccagacaatgaatgaactatgaaagatttagtcaacagaaactattttagggtatgtttagttggtaaatgcttcatgttcatggatgacacaatgtttttgcaaaaaaaccctgaaactattctttggcattggtgtccatggccctataccgccatcttacacgaaagccacagagttgaaagccacagagttgaaagccacagagttaagtgacctcaggtaacataatggtgatggttggccatttgagtctttgtaacctaggaaagacaaaggtctgattcagattgcatgggggatttttaacatatttgaaactcagggggaacatgattaagaacacaaactggtagctacacatgaaggtttacttgagcttttgtgattcaaagttcaggggtggtaaggactctggtaccagggaagagggagaattaatttattgtgcaaatgctggtatttcttacatgattttttgttttcctctgttgctagataaatagaaactaataatagctctatttctctgccaatataaaatctacctttcatataatgctacattgaaggcacagaatttgctaccatctctctctccccctacctaccaaactatccacaatttaaataaagaactgctgtgtctgacttactctcaataaaagtgtgtgtctttaaaaaaaaaaaaaaaa

SEQ ID NO: 284400 - DNA, 1000 bp, Homo Sapiens; identical to SEQ ID NO: 115355

SEQ ID NO: 284401 - DNA, 1000 bp, Homo Sapiens; identical to SEQ ID NO: 220755

SEQ ID NO: 284402 - DNA, 1000 bp, Homo Sapiens
tgtgcccgtcttgccacactctttgagagttacaagtgtagtatggaacaaggtctgtaccccacttttcctcctgtgagcagtctggacttctcactgctacatgatgagggtgagtggttgttgctcttcaacagtatcctcccctttccggatctgctgagccggacagcagtgctggactgcacagccccggggctccacattgctgtacgcacagagatgatatgcaagttcctggtacagctcagcatggatttcagctcctactacaaccgggtacacatcctgggggagcctcgaccacacctctttggtcagatgttcgtccgcctgcagcttctgagagctgtgcgtgaggtgctccatactggcctggctatgctgggtctccctccactgagccacatttaaggccacagaggctccaatacctgggaatgttcacaaagtcatcaactggaaaaaaagcaaaaacccacggccaaaataaattggtactgtttgttacaaagttctgtcttgtcatggggagtcgggcatattcttggcagcactccactcaccttcagctcctgcaccgacatcaggaacccacggccaccacctcctcccctcaaggcatgctgagcatgggcacagacagcccatccctgctccatgctgtctgtgagcaggccccatgcccagcacgccagccaccgcaggatacctcagtcataccagttgtaaacctcaagcccctgacccccaagggcacaacggtggccaaactcagggctcacaggccagcagtccatgtcagccacatcaggcacatggaacacagtgctattcatgaaggtgggttcaccatgccccagacgccagaaggtcagccgttgatcaatggaggctgagaccatgatgcttgggcttaggatcttgaggcctgtcacatgggcagcatgtgcacaggggacagagtattcctctagcacacgcagctggggtaccagcc

SEQ ID NO: 284403 - DNA, 829 bp, Homo Sapiens; identical to SEQ ID NO: 115356

SEQ ID NO: 284404 - DNA, 1000 bp, Homo Sapiens; identical to SEQ ID NO: 115357

SEQ ID NO: 284405 - DNA, 1000 bp, Homo Sapiens
gtaactctgttactagtctgttattggctgttgttactggatgcatcttgatattcagaagaataactgtgaggcattcttcagttgcgggttaagtggggttagtttctgttctgtcagatgccctttttcagtcaaaggttagccccttgtttctccctccttccagggtttagggagtgcagtgatgtcgatttcatttcccttccccgcaccccttgacactcagcaggattgcactgaaacccttcacagatctctcgttcactagttgtctcctatttttccataactagcactagtttggccttatgacctggttagaatcactcttctgtattctcatttccaatttttgtgccccactaacgtggactagagaaacttggcctgctgtgcagtgggccttctgttcaacttaccctccaccgctgaccctgtgtgaagagagatggtgcgttactgccatctaatgggaaaagagaaaactgcagttgggaaaagcagctgtgcatttaagggtagggctttctgaaggatttctgatacagtccagaaaagggaaaatgatgacacagcagttgccatcttgaaaaatgccctttcctgcggaaagggtgttttgaagtctaatacaactatcatcacaaggtccctggactaaggctggatcgtgtaatttagaatctcaaattgtattttaattaatatgctggcaacagaatcattgaaacaggcgtctcattttgtcaagttcttagccgttcagtttgtcaggggctttaatattttagatatcaactaatacatagtttcaacttttaaaaatgtttgaagattgtatgtaatataggtgtctatctatagtgccttagtaatttaaatcagaaatattttataaaacttctggttgttttgcagtagccaatataggcttcatgccctcctgaagatagtttcctctgaaatgtaactttaaataaacattattccaagaaaa

SEQ ID NO: 284406 - DNA, 1000 bp, Homo Sapiens
ttcatgtatcatctttggaattgtcatcgtgggcatgttctgtgcagcattctacttcaaaagcaagaaacaagctaaacaaatccaagagcagctgaaagtgccacaaaatggtaaaagctacagtctcaaagcatccagcacaatggcaaagtcagagaacttggtgaagagccatgtccagctgcaaaattattcaaaggtggaaaggcatcctgtgactgcattggagaaaatgatggagtcaagttttgtcggcccccagtcattccctgaggtcccttctcctgacagaggaagccagtctgtcaaacaccacaggagtctatcctcttgctgcagcccagggcaaagaagtggcatgctccataggaatgccttcagaaggacacccccgtcaccccgaagtaggctaggtggaattgtgggaccagcatatcagcaactcgaagaatcaaggatcccagaccaggatacgataccttgccaagggtattcatccagtggtttaaaaacccaacgaaatacatcaataaatatgcaactgccttcaagagagacaaacccctattttaatagcttggagcaaaaggacctggtgggctattcatccacaagggccagttctgtgcccatcatcccttcagtgggtttagaggaaacctgcctgcaaatgccagggatttctgaagtcaaaagcatcaaatggtgcaaaaactcctattcagctgacgttgtcaatgtgagtattccagtcagcgattgtcttatagcagaacaacaagaagtgaaaatattgctagaaactgtccaggagcagatccgaattctgactgatgccagacggtcagaagactacgaactggccagcgtagaaaccgaggacagtgcaagcgaaaacacagcctttctccccctgagtcccacagccaaatcagaacgagaggcgcaatttgtcttaagaaatgaaatacaaagagactctgcattgaccaagtga

SEQ ID NO: 284407 - DNA, 1000 bp, Homo Sapiens; identical to SEQ ID NO: 220760

SEQ ID NO: 284408 - DNA, 1000 bp, Homo Sapiens; identical to SEQ ID NO: 220761

SEQ ID NO: 284409 - DNA, 1000 bp, Homo Sapiens
tcaccagctaggccgctacagtctggcggagaagatcctccgggacgcggtgcaggtgaactcgacagcccacgaggtctggaacgggctgggcgaggtcctccaagctcagggcaacgatgcggcggctacggagtgcttcctgacagccttggagctggaggccagcagccccgccgtgcccttcaccatcatcccccgcgtgctctgagcaggcgcctgccagcctcacctgccgctcaggcctcagaggccctgccgggcaccagggcttgtgccatcgccccaaggggatgaatctgccacactgaggccagggacgagtgttcagtgggccacagtgaaccaaccaaaccaaccccgaatcatcgctctcgccatgtgcgtttctcttgttttttttgccagcccaatggtagtttctgaacctattgacattgttcaaaatggatcatgtgccatattttgttagttgacatctgagttttcagtaaaatgattatggaattaatcagcaaatgtagaagaatatattcaaagttaaaattcagtggcagcacagattatttttatcagagctgtaaagaaaacaactgtccttttctccccaccacccctcctgccccactttggcccagaaaccaaatgtgaacttcctgtctcccacctcagcactagtccatgccaggacaccagctgacaatttcttggttttactgtcaataattgtaccatgtgatcaattactgtcctcacttagaacaaagcctgagtccgagaatatttatattttaccaatatatgcctgttacaagagaaggaaatatgagttatttaagtttaacttttttatgtgaattcagagtttatttatcgagggaaatatgtacaaagaagcttcaaatggaatatttaccgacattccttatacatgacagacacttggctacatgggaagatgatgttaataataaaatgatttttaaatggaaaaaaaaaa

SEQ ID NO: 284410 - DNA, 1000 bp, Homo Sapiens; identical to SEQ ID NO: 220762

SEQ ID NO: 284411 - DNA, 1000 bp, Homo Sapiens
aatgttatgaatgagaccagcagaccaacagcaaacacctagaaggaacagctgttcttcatgggtgactgctgtgaaaccaacaggatggcctcttttctatttaatcctaagagtgggcataaggtaaaatattgggtaggtcctttggagttctagactcagtttgagattacagaagatatgctcaacatcctcctttgacctggtcccagtttcaccatatttgctagatgctttatagtctctggtaaggaggtgtacaattctctgattttatttcagtttttagggaattttattttgttcatttcaacaagaaaaattacataaacaggtaacagctccactcaaagctgttttaaatgaacaaaatattggactttgtgaacaaatatgatactttttctttctgcaattattggctagcaatcttattttactaaatctatactgacaaatttaatttggtccatttatttgagtttaaagactatttcaaactctccccagtgaaacagtcatgggccattgctatcctcaaaagaactaaatatataaatagcagctttcctcaaaaaagatgataaagtcttcttttccctttagagcataaatttcagtggcaggtaaaactattttagcaacaatatgctcacttcttccatgatatgtttttcttccctactaagttgaaagtttttctcagtttccatagccactcacaagtttttctctacctaactgaagttgccctcttctgctggtcattaggacattaacttttagaatgatttctgtttcagcctcttgttttgaaggcaggcttttaatttcctcagagaaattgcaatggaacgaaaatttgttctctcttttacatatgtacacttgtataagagatgtaatgtttttaaataaaatttttaattcatgcaaaagcatgtctctaaaaaaaaaaaaaaaaaaaaaaaaaaaaaaaaaaaaaaaaaaaaaaaaa

SEQ ID NO: 284412 - DNA, 1000 bp, Homo Sapiens
ccgcagcctgcggtggacccgagcgagtcccgacccctgcccccgcagcctgcctcctgaagtgtgggctgcaggtgaacaggaattgctgctgctgctggagcccgaggagtttctgcagggcgtcgccacactgacccagatctctggcccaacccactgggtgccctggatctcccccgagaccaccgcccggccccacctggctgtcatcgggctggatgcctacctgtggtaccgctcactctcatgcccacagcagggctggctgggacgggggttcaggggaggtgggctctggcagaggccaagctcgggcagggcaggccccatggggagcggggaggaatggtcacctctgctcaggtctcgccagcacgtttcccgggggacacagcagccagagagcccgaaggtggccggtgccgaggtggccgtcagctggccggaggtggaagaggtgagggcctgtctgagctgggccctggtactcctgcagctctgggcaaacctggacgtgctactggtggcctcttggcaggagctgagtcggcacgtgtgcgccgttaccaaggctctcgcccagtatcccctcaagtgcgtgatgccaaggctgaaggggggcaggatcacctcaaggcagtaccgggaatcccaggccttctccttctgcacagcagggcgctgggcagccggcgagccagtggcaagagacggcgcagggctgcaggcggcctggcggaggcagatcaggcagttcagtcgggtcagcccagccgtggctgatgcagttgtcacagccttcccctccccccgccttctgcagcaggcgctggaggcctgcagcacggagcgggagcgcatgggcctcctggccgaccttcctgtgccgcccagtgaaggcgggcgtccccgcagggtggggcctgacctctcccgccgcatctgcctcttcctgaccacagccaaccctgatctcctgctggacctgggctcctga

SEQ ID NO: 284413 - DNA, 1000 bp, Homo Sapiens; identical to SEQ ID NO: 220402

SEQ ID NO: 284414 - DNA, 1000 bp, Homo Sapiens
caggcctgacagtgctgtgaattccctcctaatcagagaaaatcttactctttcaatgggtatctttgaaatatatatactggcatctcctaaaaggacgtgtctcctaaatagccctcataaataactagataatggtggaaaggaaagccaggaagcagtcggtggaggtttgtgaccattgctcttcaaatacacagatattggggcaaatattctgaaaaaagaagagcagtttcaagaagatatactcagagaacacattgcgaaagcagaagctgaagtatgggctcaggaagtgacagctaaaactaagacagagatgtatcaaaacatggatgacgaaatgaagagagagcacttggctgcagaactgcgcatggtccacagaatccaaaggattatgatggaatgccacagagagaaggtcgaagctgtggagaaagccagggctgaagaaagacacatcgcccaggaagcaatccaggcccagaaaagcaaagccgtggaggaaattgtgaatactggtgtcacagttattaaggatgagaagaccagtgtggcccgactgatgagggaaaaagaacatgaaatgagcatcctctatggcatagctcagaggcagaggcaagaagaggtacaggaagtgcttcaagaagcagagaaaacacatcaggccactcttggcaatatgatggataaactggctaacacccagggggagctgctgtctatagcaaaacaactgggaatcatgacaaattggaaagatttcctagaggaggaattacaggaaaccaggatggcatttcaaaaatacatcaattatacctttcctaagctttcaccaggacatgcagattttattctgccagaaagaaagaaaacaccttctaatcttgttattaaggagaacaaaacaactcttgattagaagtcttcagttgaaattccactacaaaagacatcattccagactaaataaatttactcaaaaacc

SEQ ID NO: 284415 - DNA, 1000 bp, Homo Sapiens
atgagaaagtcaagttgtgtagaatcttttgatgaccagcgcaggatgtcattgcatctacatggagcagattgtgatcctaaaacacagaatgaaatgaatatatgtgaagaagaatttgtagagtataaaaacagggatgccatttcggcattgatgcctttgttctctgaggaagaaagcagtgatggaagcaagcacaataatggtttaccagatcatatctcagctcaactacagaacacctacactctgaaagcctttactgttggatctaaatgtgttgtgtggtcaagtctaagaaacacatggtctaaatgtgagattttagaaacagctgaagaaggaacaagggttttgaacctttcaaatggtatggaggagatagtgaaccctgagaatgtctggaatggcatacccaaattggataagagtccacctgagaaaaggggtttggaggtgatggagatttaaccgtggatctatagctgtggccaatcagtcagaagctgcccttgaacaagtggcatcttacgcagaccaacagagtatttgagaaaattgaaaacatgtaaccacaagaagttgtcattttcaaaaacttctatataggtggaaaacaaattaggtctcaggttgatggtggggtgtgtttatagtgatcctgttatatatacagatctgggatctttcgtctttattgtcttacgtttctaattagttgggaggatttattttgctaaacagtttactaacacattacatttcaaaaactattttggtacctttcaaatacagtgtttaaattaaaatagaaaaataagggctcatgacaagtacattatttgattctacttaggatagctttttagcaggatctccttcagaatttttgtcttgactttgaatctttgcctgtttgtctaaacatttgactaacattctgtttgaatttggaagtattctaatacaagatttgaataaagtttatccttaaata

SEQ ID NO: 284416 - DNA, 1000 bp, Homo Sapiens; identical to SEQ ID NO: 115358

SEQ ID NO: 284417 - DNA, 958 bp, Homo Sapiens
atcagcttaggtagaacagttctcggtgagggccagctacatacctggctaagcgctgcccactgcagaaaagctcatcacccgggacctgatctccaggactcagaagcacttggaggaaggcctattcacttagaagcagttaccagtgctgggcagtgtcctccaagtgccagaggagtgctgtggagaaaagaagtccatggaagccaggagatgggcaagattttgcctcttcaaggtgaatgcggcttcaaggggctatctttgtgctcctgccccacctggggcccatcctggtctggctgttcactcgtgatcacatgtctggttggtgtgagggcccgaggatgctgtcctggtgcccattctacaaagtcttattgcttgtacagacagccatctactctgtcgtgggctatgcctcctacctggtgtggaaggacctgggagggggcttggggtggcccctggccctgcctcttggcctctatgctgttcagctcaccatcagctggactgtcctggttctctttttcacagtccacaaccctggtctggccctgctgcacctgctgctgctgtatgggctggtggtgagcacagcactgatctggcatcccatcaacaaactggctgccctgttactgctgccctacctagcctggctcaccgtgacttcagccctcacctaccacctgtggagggacagcctttgtccagtgcaccagcctcagcccacggagaagagtgactgaggccctagggcatgggagaggagggacgcccagggtggggaggaagagtctgcaagcagggctgtggagttagggttcaccccaatgggaccaccctcctgggtcccctggtgccgtttttccttagaaatcagagaaatgggaaagggggggaaactgattttacacttaaataataaaatcctattagtaactctgaa

SEQ ID NO: 284418 - DNA, 1000 bp, Homo Sapiens; identical to SEQ ID NO: 115359

SEQ ID NO: 284419 - DNA, 1000 bp, Homo Sapiens; identical to SEQ ID NO: 220764

SEQ ID NO: 284420 - DNA, 1000 bp, Homo Sapiens; identical to SEQ ID NO: 220765

SEQ ID NO: 284421 - DNA, 1000 bp, Homo Sapiens
atgtgggatggcctttcgatatcattaccaacttattgaacattgccaaattcatactggtgagaaaccctttgaatgtaaagaatgtggaaaggcgtttactcttctgacaaagcttgttcgacatcagaagattcatactggtgagaaaccctttgaatgcagggaatgtgggaaggcctttagtcttctcaaccagcttaatcgccataagaacattcacacaggtgaaaaaccgtttgaatgtaaggaatgtgggaagtcctttaatcgtagctcaaaccttgttcaacatcagagtattcatgctggtataaaaccatatgaatgtaaggagtgtgggaaaggctttaatcgtggtgcacaccttattcagcatcagaaaattcattccaatgagaaaccttttgtatgtagggaatgtgagatggcctttagatatcattgccaacttattgaacattctcgaattcatactggtgacaagccatttgaatgtcaagactgtgggaaggccttcaatcgtggctcaagccttgttcaacatcagagtattcacactggtgagaagccctatgaatgtaaggagtgtgggaaggcttttagactttacctacaactttcccaacatcagaaaactcacacaggtgaaaaaccatttgaatgtaaggaatgtgggaaattctttcgtcgtggttcaaatcttaatcaacatcgaagtattcatactggaaagaaaccctttgaatgtaaggaatgtgggaaagcctttcgacttcatatgcaccttattcgacatcagaaattgcatactggtgagaaaccctttgaatgtaaggagtgtgggaaagcctttcgacttcatatgcaacttattcgacatcagaaattgcatactggtgagaaaccctttgaatgtaaggaatgtggaaaggtttttagtcttcccacccagcttaatcgccataagaacattcacacaggtgagaaggcatcttga

SEQ ID NO: 284422 - DNA, 1000 bp, Homo Sapiens
aaaaatctccaactagcctccagacaaaacatactcaaattcaaacagcagttagttttaattaacatacagaagtaattttagactttcagatttctatgctgactagaacactttgcaggctgaagctgacattattaccaaatacttcatttaagtacatactctgaagtgtcaggcttccagtatatatagcaacgctctgagagacaaactgggctcatatgacggggttgcattttattttcttaacaggtctttaaattgggcagttctgaaattctgtttggtcagttctagatggtacgtcatgtgaatgcaaccaagcactgtagttgaaattgtgttatgccactactcatgttgtcttaggtactacgcataatgttaatagctgagatgttaaagaatttgaagtctaaaatataaaagatgaatatacccatattaatcctatgttaagatgctctggaaataaaggccttattcccttacacatgcgatttttgtaagataatatatacacagtatattttaaatgtttgtgtgggtggtctgtgtagttactccccatacaacaaagctgacaaaatttttaatttacacaatgtattctgcattttcaaatgtttatgttgtgtatatagcaaagaaattatcttactgatatgcgttgaccaaatcccatggagaaaagacatctcatttgaggttccccttcctctcatgtgtttgattttttggaaggtgatacagtatgtgggtaaccatgcaaatgtttatgaataactttactgaagtgattccatccgtattctgttctaatacttggagaatgaccttcatatttatatattttatttctttgtttcaactatccagtgataattcaggaaatgtttccttttttttttttttttacaaaaactttttatttgtaaaatgtttgtaataatgtaaaggtgaacatgttcaataaaaatcatatattaaaagttta

SEQ ID NO: 284423 - DNA, 1000 bp, Homo Sapiens; identical to SEQ ID NO: 220767

SEQ ID NO: 284424 - DNA, 1000 bp, Homo Sapiens; identical to SEQ ID NO: 115360

SEQ ID NO: 284425 - DNA, 1000 bp, Homo Sapiens; identical to SEQ ID NO: 220769

SEQ ID NO: 284426 - DNA, 1000 bp, Homo Sapiens
acaaaaaaatgaggaagaagaagaggaagaagatgaagaaaaagacgattctgactacatagaacaggaagtggggcttcctcttttgacaccaatctctgaagatttagagattcagaatatacccccctggacaacacggttatcctcaaatctcattccacaatatgctattgcagtccttcaatccaacctttggcctggagcatatgccttctccaatggcaaaaagtttgaaaatttctacataggctggggtcataagtatagtccagacaattatacacccccagttccaccaccagtttatcaagaataccccagtggaccagaaattacagaaatggatgatcctagtgtggaggaggagcaggctttcagggctgcacaagaagcagttctactcgcagctgagaatgaagaatctgaggaagatgaagatgaggaagatgattatgactaataaacataaaattagcctggttttatgtgacactgatacacacacaccccttatatgggactaattttacacttttctgtgttatgtgtgtatatacatacacatgtaagaaattattcaactgcaaaatctcaatcttgaaaatcaagcttgaaatttcataggtagaaatattagcatttttattgaaagatactcacaggattttccagaggctaaataacatgcaattgcataattgttctgagggttatggataatggaatatgtgtttgtacattcctgtttttaaaagggctcaggtttcacatggtccaggtgaggtaaaacaattaaaataaataaataaatggtctcaggtttaatttgtaatacgacaaacactggaagatataacccacaggaaattcttggaaacatcaatactttttaaagagtgtcaaggggtatgaagacaaaaaatattgatagtcactagagtaatgtattcttaacctttgtaagaactgatctcagcatgtattcttaaacctttgt

SEQ ID NO: 284427 - DNA, 1000 bp, Homo Sapiens
ttctgaccctaaatacagtggaaaaatgaaggtccttcagcagcttttaaatcattgcaggaaaaacagagataaagttcttctcttttctttttccaccaagttgcttgacgtgctacagcagtactgtatggcgtctgggcttgattaccgacgacttgatggaagtacaaaatcagaggaaagactcaagattgtaaaagagttcaacagtacacaagatgttaacatttgccttgtctctacaatggctggtggactaggcctcaattttgtcggtgccaatgttgttgtattatttgatcctacttggaatccagccaatgatcttcaagccattgacagagcatataggattggacaatgtagagatgtcaaagtgcttaggctgatatccttgggaactgtggaggaaatcatgtatttacgacagatatacaagcagcaacttcactgtgtggtggttggaagtgaaaatgccaaacgatattttgaagcagttcaaggatctaaagagcatcaaggagagctttttgggatccataacctcttcaaatttaggtcccaagggtcttgtcttacgaaggacatcctggaggtgtgaacttcttctctgaccttttcaataatattttaaatacagtttttcttcctcaggaaatctgaaatacaattgctgttgccttttcagagaaacttttggttttctttatcaaaaatgccttggaatttttacttttagagaataagaaatgaattattgtacctctaaactaagattttcccatgcataattacaaataatgcacacacacaaatgtatatgctgggtagtatgaactccaaggcaattttaaataggcagagagaagtttatagttttgaaaacagctgctgaagtcaggaactaaaaaaagaggttttcctaaataaacaaaaatataaaatgtgttttaattaaaagttaccaaatactccctgagatgtactctcatgtctc

SEQ ID NO: 284428 - DNA, 842 bp, Homo Sapiens
gcctctctctggagtcggctagccggggctcggggagcggggtgcgcagggctcggggccacgccttgccacctgcagcgcccgggtgggccgcgggggcctcggcgggacgcgctcggccctgtcgcaggagctaacgcagggggaatccttgcaggtgggagcatttcagagcgcacaagccatggtggccaaacagcggatccggatggctaacgagaagcacagcaaaaacatcacccagagggggaacgtagccaaaaccctgaggccgcaagaggagaaatatcctgtgggaccatggctgttggcactgtttgtttttgttgtctgtggctcagctatctttcagatcattcagagcataaggatgggcatgtgagaaagccagggatttgacaccacctccctcccactggaggcgggaggacaacggaagcggtcagccagtttctgcgggaaacaagcaggccacacggaatagaaaaaaacgctcccccacttgttccctgatcacttcatcgtggatgtcagaccaaattgccttctcacaggacatcttggtgcatccgcgttctcaagcggaaaggacattttgcttttctgttggcaggattagtagccacgcgggtcgtccgcagcagtgctgtctttttggtttttcccttggtttcactaatgcgtgcatgtggccctctgaacgatcactggtttactttctatggatacaatctctcctccattgagaattgattttacaaataaatgtcttcgttcaaccttaaaaaaaaaaaaaaaaaaaaaaaaaaaaaaaaaaaaaaaaaaaaaaaaaaaaaaaaaaa

SEQ ID NO: 284429 - DNA, 1000 bp, Homo Sapiens
ctagagaaatggagctgataccttgcacctctcccatctcatgggattggctaggagtcagtgagaaaatggatgtgaagagttctgaaaattacctagtgccatgtccatgtaggcactatagcttcttttgggtagttttcaggaagtggaggagggcttcaatgggctggactgccatggattgttgcacaggggtgcactgctcaagagcaccatactccaggaggtactattcatgtcctagacattgtggatttgtagatttatcatgacagttttgcagctggtagcagtaacatgtcttgagaaaagggctattttttgtatttgcacaaaggtgaagtgtgggggtgccagaggctctgccttctgtatagctcaacagtttcaatagcttgactcaggtgtgaaatttgccacatgttcatatctatgtgcaggaaggacaagactgtagacagacagtcggctcccttggacactgcccagaacatgtggtcatgggggaaagggtgttaaacctggatggcaagtgagatcttgtgacccttggggacatggtattgccgtgttgaacctgctgtcgcaccatggggtaggactggggaggaggagcagtctagagcggagaggccctgggtgcttatatgggactggcctccaacctgaggcactggcttcataagctcaactcagcctatccggaaagccatttagtttttattgctgcttctgagaagtgggggagaggtgagctatttgtggatttgttttaggcagtgttcacaatcatagcacctaaatatgaaggatcagaataagttatgaaatgaaggtcaggaaccttttgtacatagtttcttatttggaatgatgttctttaagccctatgagtatttggtatgtgctcctgatgctggcatctgagtctcatttttgtaccgtgttatttgagcaaataaatacattaacttgcacaaaaaaaaaaaaaaaaaca

SEQ ID NO: 284430 - DNA, 1000 bp, Homo Sapiens; identical to SEQ ID NO: 115361

SEQ ID NO: 284431 - DNA, 1000 bp, Homo Sapiens; identical to SEQ ID NO: 115362

SEQ ID NO: 284432 - DNA, 1000 bp, Homo Sapiens; identical to SEQ ID NO: 220770

SEQ ID NO: 284433 - DNA, 1000 bp, Homo Sapiens
gtggaagagaagccggggttctaggaaagaagagccaaactttggtggcctttggtgccccctctcagctccccatgacaagacaacggggctgcagacactgtgtgttcagcctgcccaggggctggggctctttaaggctttgtaggtgaggtttccatggaccttcaaaggtgccagcagcctgcaggggaaaggcaaactccctccttgcaaggaaaggagatgtccagccaatgatgcccggcttctgaggcccagaggagcaggtgggatgggagcagcccctggggctggtgtcccgaagatgaaatgaagggggctgcctatctcagttggcgggaggtgttagaagtggatgtgcaagaccagccactggaggtagctctctggagtcaaagagaggcctgcttttctaccagacatgggagcagcatgtaggatacaagggcctacccagagaccagagagagtcagcctagtccttgcagcctcaggaagtcctcggcccaagtgagtcctggtccaaggatccccctggagagccgcagttcagtgggctccaccgcagcccctggccacggcctatgccctccctgggcccctgtggggctgggcattgtgtctgacctgtgcatctcccatgggagggctgggcacaggcagtgctatggccttttttttttttttctttttccaataaaagaacttgcccagcgtgaagctctgtgatgctttctctgccccgtgacgatggagggtcagttctatgctccaggaccacatgaggggatactcagctgcctgaactggacctgacatggggagcaggatgaactctgtcttcttggagcttgcagtctactgaagaggcagacacctcagcatctctaatctggaatctttggggcacttgtagccttgggtgggggaacaggttggactgaaagcgaggccaaaagtaatcaattaatgatatcaataaatcctcatttcttga

SEQ ID NO: 284434 - DNA, 1000 bp, Homo Sapiens
acaataaaattgtaatataataaatttggctgacaagaaaccaaagtgattcttaattagtatacatcagaatgatgctcttatagttgtaccatctataaaaattactttaagggctctcacattttaataatttatcttattatgtattaagtatacaggaacaatattatttttcctttaacaaaatgaagagacaggctatctggttaatgttacataggaatttaatagtaatgcttgaacttcatccatagatcatactctgtacaaaatttgttagctaacatcctatctcataattattttatgttttgtggagaaatttgttgattttgtaccaaagtgtttctgaagacaataaattgtgagtcaactttagaacaaaaaaaattagagttttttcaatgtttatattctgattaagcttactttaccttacattttttctaagtaacaatgaatcctgatttctagtgtcctaaaaattgcttagtgatttgattgtggtaatatcatttcttatctacaatgtctaaagttttatgggacagtttttcttttatttattttgcctgtttgtgcagataagaacagaaacttttctaagacccacatttggttattgaaggccacagcgaatcttaacctaacagccttgacaaactgcaccataggtgtttttagactcatataatttgttatttttcaaacaatagtgaataattaatatttttgtttggaatttgagaacaattaaatttgtacttttagtaactaccattctttgattagaaaattaagagaatgcatatcttactttggttgtaaattatcaagggctttctaatagaaatcatatataacatttctaaatataagtcctttcacatactgtgtttccagttgtcttgatattgaaaagtgtaataaacttcatgctcacctattggagatttgggaaggttgaaaataaacttcctaatttttaaaaaaaaaa

SEQ ID NO: 284435 - DNA, 1000 bp, Homo Sapiens; identical to SEQ ID NO: 115363

SEQ ID NO: 284436 - DNA, 1000 bp, Homo Sapiens; identical to SEQ ID NO: 115364

SEQ ID NO: 284437 - DNA, 851 bp, Homo Sapiens
acgttcctgccgggcaggacaggtgcatagggaactcctcagaggtctgtacctcgagggctcccatggatagccttgacagatcctgccaggactggtgcgacaggaagcaacactggttggagatcggaccaccggacttggtggagcgcaagggctccctgaccctccgctcccatcacaagaaatactcgaagccggtgttggtgtattcctggcaccgtgacagagaagcttttcccaaaggttatgatatagagggtcctgagaaagttaaaaaactgtgtaattcaacatatcggcgactgggaaccgatgaatccccaatttggacatcagaaacacatgaaaagttgtcacaaatgtgtttaaacacagaatgggttgaaatgaagagcaaggctttattgaatgaggaaacagtgagctccgggattatcgaaagggtcaccggattgcctgccacaggttttggagctgtctttcctagacatccaccggattggagcaaaatgtgtgcattgacaacgtactcagaagattatgttccaccatatgattatcagccacatgcttatccctgtcaagatgattattccatagtccacagaaaatgccgttctcagttcacggatctaaatggttctaaaagatttggcatcaacacttggcatgatgagagtgggatttatgctaattcagatgtaaaacagaaactctatcccttgactagtgggcctattgtgccaatttaaaaataatgtatagaatcagcatctctgactaatgaaaaatggatgtagcagttgatgattttctatcttaataaatgcaatggaagtgttactata

SEQ ID NO: 284438 - DNA, 1000 bp, Homo Sapiens; identical to SEQ ID NO: 220774

SEQ ID NO: 284439 - DNA, 1000 bp, Homo Sapiens
gaccccgtcgccctcctgatgctgctcgtggacgctgatcagccggagcccatgcgcagcggggcgcgcgagctcgcgctcttcctgacccccgagcctggggccgaggcgaaggaggtggaggagaccatcgagggcatgctcctcaggctggaagagttttgcagcctggctgacctgatcaggagtgatacttcacagatcctggaggaaaacatcccagtccttaaggccaaactgacagaaatgcgtggcatctatgccaaagtggaccggctagagaagtcacctgcaccggtgcccgtgacgtacgagctgcccacactgtataggacggaggactattttcctgtggacgccggggaagcacagcaccacccccgcacctgccctcggcctttgtgagctttgtggtcttcccatcaggaacgctggaaagtgacattgtgtacacactgcagcttgggggttttttctttgtattgctgtttattttatattttaaaaatatttaaaaaaatgtcgagatggggtctcactatgttgtccagactgatctcaaactcctgggctcaagtgatccacccaccttggccttccaaagtggtgggattatgggcaggagcctccgtgcccaggctgctgccattttcaaatttcctccctgcctcatgtgagaccacagggtttggagaagcagttggaacccacgtgtggtgatgcctcccacatcggcctgcttggggttctacaggggttgagggaccaggcctggccggggctgatggacagtggggactttccttctctccatgatggctttgcaggggctccatggtccttctctctgtgatgggtttttgcacggggtgtgctctgccactgtggtgggtgggtggatgctgcttctgttgcctccagacctcggtgcccacagccttgaggatccttccaataaaggtgtcaagagctcaaaaaaaaaaaaaaaaaaaaaaaaaaa

SEQ ID NO: 284440 - DNA, 1000 bp, Homo Sapiens
ctgagaagaagggggctccgcagaaagacagcaccgggggagtcctagaagaatccaacaagatagaaccatctcttcatagcctccagaaatttgttcctacagattacgccagctacactcaggagcattatcggtttgcaggaaaggagattgtcatccaggaatccatagagagttacggagcggtggtgtggccaggggctatggctttgtgtcaatacttggaggaacatgccgaggaattgaatttccaagatgcaaaaatacttgaaattggtgccggaccaggccttgtttccattgtggccagtattttaggagctcaagtcacagcaacagatttgcctgatgtcctgggaaaccttcaatacaatcttttaaaaaacacactacaatgtacagcacatctgcctgaagtgaaagaactggtatggggggaagacctggacaaaaactttcccaagtcagctttttactatgattacgtcctagcctcagatgtggtctaccatcactacttcctggacaagctgctcaccaccatggtgtacctttcccagccagggacggtgctgctttgggcaaacaaattcaggttcagcaccgactatgaatttttagataaattcaagcaagtttttgacacaacactgttggctgaatatccagagtcatcagtcaaactttttaaggggatactaaaatgggactaaatccaacaaaatgcctttcacaacgttactgtgtcttttgagcaatgtgttagaaattgctttggtaatagacttctttcacaggattgagaaggtagtgcatagaaacaacttgtatacttggaacaaatgtaacaatactgcagaaactttctaatttctaagataatttaagattatctggttaatctaaatatctaaaaagaacaacataaaaacatgaaagtagctttgttggttccaacgaagttacatgtttaataaatcttacatggataaagtaa

SEQ ID NO: 284441 - DNA, 1000 bp, Homo Sapiens
gagtacgggtttgtccatgtgtttgagtagagatcagggttctggcttccaggctgaaggtgagggaaaagccacttctaactcctttgggcatccatgctcacggccaaaagagccccttctcaacacatccaagtgctaaggattcctgcttcattcaagctactacttaggcccaaggagcaaggggtagaatggcatctaaccagagcaaagccatttctttgagggctcaagccataaacaaatatgctcccctaaacatattcggcttgaaaaagttgttttggggcagctgtggtggtgcacccctgtaatcccagccctttgggagtcagaggcagtcagtcacttgagcccaggagttcaagactagcctgggcaacacggcgaaacctcgtctctacaaaaaatacaaaaattgaccaagcgtggtagtgcacgcctgtattcccagctacttgggaggctgaggtgggaggatggcttgagcctgggaggcagaggttgcagtgagctgagatcgcgccactgcactccagccggggtgacggagccagaccctgtctcaaagcatatttcaaccctaaaactagactcttctgcccacagtgcagtcttctaagggttaccctctggtatatgttcttttgctaaatgaaggcttggagttggagggaagaaggggagatggagtggtgagggcgagtcaaataaaaggatttgagtgtctcgtttttgactaatgaagatgattcaataaacatcctgtaagaagggttcctatgtgcaagttgaggtgctactaagtacattaagacacaattgctgctctcaaggagttagcagctggtctcatgcagggatctcaccacgtggttatgtattttgtttctgatgaggtgcctttcttagcagatgctgccttatttggccactgaaacaatcaaagctaataaatgcttaaagaaaaatatctgacaataaaaaggtttaaatc

SEQ ID NO: 284442 - DNA, 1000 bp, Homo Sapiens
gagtggaaagcctcatttgaagagctccacgatgtggaccactttgaaattgttgagaatctgacccagaaggacaacgtgctcacccagattatcttgaaaacaatcttccagtagttctgacgatacttggagcctggtccacgtgcatcccaccttgggaagcctctccaaagagctttcggagctgacactgacagcttcagtttcccccagcacccaggagagccttgctgtgtctgtctgcccggcaagagtccattctcactgctgggacactcatgaaaatctccacgtcctccctcttcccagcctggatggagctccagggctggggaacgtccgcaagtcaatgctcagagatgcccggagctgcctcttagactcgtctggcccatctacctgctgacagagcatgacaaagatgacgctcaaaagtaatgccattacttcttttttttttttttttttttttttgagatggagtcttactctgtcacccaggctggagtgcagtggcgtgatcttggctcactgcaacctccacctcccgggttcaagcaattctcctgcctcagcctcctgagcagctgggactacaggcgcctgccatcatgcctggctaatttttgtatttttagtagagacggggtttcaacatattggccaggctggtctcaaactcctaaccttgcgattcgcccgccttggcctcccaaagtgctgggattccaggcgtgagccactgcgcccggccagaatggcattatatttaaatagttcataaagaagcacaaaagaatattatttcataacatgtaaaaattatataaaacgtaaatttccatgttgataaataaagttgtattggaacacgaaaaaaaaaaaaaaaaaaaaaaaaaataaaaaaaaaaaaaaaaaaaaaaaaaaaaaaaaaaaaaaaaaaaaaaaaaaaaaaaaaaaaaaaaaaaaaaaaaaaaaaaaaaaaaaaaaaaaaaaa

SEQ ID NO: 284443 - DNA, 1000 bp, Homo Sapiens; identical to SEQ ID NO: 220776

SEQ ID NO: 284444 - DNA, 1000 bp, Homo Sapiens
ccatcctcttcatccgagaagcccaacgtgctgactcaggtcgctaccaactccgcgtgcagctgggtgggctggaggccaccgccaccattgacatcctggtgattgagaggccaggccctcctcagagtattaagctggtggacgtttggggcttcagcgctacactggaatggacaccgccccaagatacggggaatacagcacttctgggatacacggtgcagaaggctgacacaaaatccgggctgtggttcacggtgctggagcactatcaccgcaccagctgcatcgtctctgacctcatcatcggcaactcctatgccttccgtgtctttgctgaaaaccagtgcggactcagtgaaacagcccccatcaccacggacctcgcccacatccagaaagcagctactgtttacaagaccaaggggtttgcccaacgagacttctctgaagccccaaagtttacccagcctctggccaactgcactacagtcaccggctataatacccagctcttctgctgtgtccgcgcctctccccggcccaagatcatctggctgaagaacaagatggatatccaaggcaaccctaagtacagagccctgactcacctgggaatctgctccctagagatccgcaagccgggtccctttgatggaggcatctatacctgcaaggcggtgaaccccctaggggaggcatctgtggactgtcgggtggatgtgaaagttcctaattgaggacacctaagaaggcatcgtactctgacaaagccagtgcccagcaatgaagtgaattcatggcacaggagccagggaccatgacaacggtgccctcagcagcctggtgtcctctggccatttgctgtcatggctacaaagtgctccctcttttcagtgcctccaggaagcccgccagtggtgagactgtgtcctcaaggagcttcggcaccatgtctggtttggattcatctaaataaatatgtggttccccagtg

SEQ ID NO: 284445 - DNA, 1000 bp, Homo Sapiens; identical to SEQ ID NO: 220777

SEQ ID NO: 284446 - DNA, 1000 bp, Homo Sapiens
agcctagagggcaagatagggaaactgtggacagattggttcaattggctatatgcaaatttgaaaagactataatgttaaagcgaacatttgagatggcctatgttgacctggctgaaacgtatgcagaaataggccaccacagaaaggctgaggaacattttcagaaagggttacgcatgaagatctttgaagatcagctaaagcaagagattcattaccactacggccgtttccaagaacatcatgggaaatctcaagataaagcaattacccattatttaaaaggtttgaaaatagaaaaaatgtcccattccagggaaaaacttctcaatgctttagagaaattggctaaaagatgtattcaccagaatgtacgggttgtggaaagtgtcagcctccttgggcttatccacaaattgaaaggagaagtaagtgatgctttgctgtgctatgagagggctctgaggctggctgctgacctgaaccctatattttaacatagaggtcaccattatccatttaatggtcttataactaaatagaatgactatgaaattaaataatgcaaacttaaagctgttggaaatttaccttattttgagccttgagaggaatgtggctgtgtggcctgagttatgtagcatgcaactgcaacttctgctttttcctgtaaatgatcaggaaaggccttgtggcaccagacataagaccccctgaaagtatcatccctcctgatggaatggtaaagcaatctttcttggagcatagcaagtagtaaccgatcaaattgctataacgtgtgtactgaccttatgtggaaaatgctgcaaccctgtttactgcctatgtaagtgaaatcttaacttccccattttggaatgctgactccagtcattaggtgtctgtatttcctgagtggttaccctcaagctttgtgctcaaataaactctatacttaatcataaaaaaaaaaaaagaaaaaaaaaaaaaaaaaaaa

SEQ ID NO: 284447 - DNA, 1000 bp, Homo Sapiens; identical to SEQ ID NO: 115368

SEQ ID NO: 284448 - DNA, 745 bp, Homo Sapiens; identical to SEQ ID NO: 115369

SEQ ID NO: 284449 - DNA, 1000 bp, Homo Sapiens
tctctagacttccatggtctgaatgttgcctgctgaagtagcaacctaaaaagtatcccctgcttatgcttgtccagttggccctccatgtccataggcttcgcatctgtgattcagcccactgtgggtcaaaaatatttggggaaaaaaatggatggttgcgcctttgctgaacatgtacaaacttttttttgtcattaaacaatatagtataacaactatttacaaagcatttacattgtattagctattataggtaatctagagatgatttaaagtgtatggtaggatgtgcataggttatatgcaaatactacaccattttctataagggacttgaacatcatggactttagtatcctagggggttcttggaacccatcacccataggggcaccataggacaactatagtaccgtgtttatttcctattaattcaggttccgtttagagtctaaaactaaaacctaatcatttagtcacagtgtaaaaacaaatggaaataacagctcaaatcttcaaaatattactatagcattatgtttaaaataatctacaacaaaaatgtaccattttcaagcagtactacattaggagcccttttatagaaaataatttcttctttacccccgttccagtgtgaatctagtattctgttaacatttgtgtggcatttggagtttgtcatccccattgaagggagagccttctcagacatgaagcaagggaaacatactgaatagttttacacaaatttgatctggcttccatttgtccccctcatttcccaaatgtttaaatgtattggatttggattctcaatgtataagttgccttatctgttaatgtctatcttctgtctctttaattttgtatatctgctgttttgcttttggatacattttctaattagaagtcacatgataaatataatcagtatagtaataataccataatgtgcacatactcaataaataaatgactgcattgttgtaaatga

SEQ ID NO: 284450 - DNA, 1000 bp, Homo Sapiens
gagaaaaggaagatgaacatgttttgtgctagttggtagctcacaaatgtaaaaccaaaaaaaaaaaaaaatagaaaattaagggactagatctatttgtggatttgtatctgtttttgttgtgattagggtagtaatcttggaaaacgaattattttcataagttgaatttggttagttggttggttgaagcagaggataatgagcaaataaagtccttgtctaatttggaaaatactttctttatattattaacatctcccaagattactttttaagttcattattatgttacattcaaagttgattgtaaattattctaaataagtaaatataaggaggcaagaataaacaaagactttattaaagaagagtgcgtgcattgtagatttaggtatcttttaaagtaggtactattcaggatggctctatgaagaggaggaggtccagatttggctcctgaaaaaggaaagaagagaattttacccctatttgcaatggagaaatacagtattctttggtttggttggatttgcaaatcctatttcctatcaaaggaaatatctctagtggatatttttagaatatagacaatttctaggtattaactaataagatatggaaaagatagctttgctttttttaatcagaagaacataaaataaattacaatatgaatgattgtgagacatcagagaaatattttacttagtgacgtaaactactgtgcactgctgctattcctaggaagctgtgttttgggcaatacatggaagctaaatatatgaccagaaatgctttctgccttgtaatatagtgtattatatattagagctaaatttagtaataaatgcattttgaagtttggaaaagtattgtaataaagttgcctttaacttagctttgtacttgttctgtttccttgaggctagacacagtgccatccaggacttattacagtataactgggtaaaataaacaattctctgacaaaaaaaaa

SEQ ID NO: 284451 - DNA, 1000 bp, Homo Sapiens
acttttcctgtaaagcagacatcgttcttggcctgccctgcattgtatactagatttcattgttgtctctcatgcttcttgagttgcttcatggtttatgctcgccatggaaagctatcagtaacagtttcatgcttataccaaagaattaaatctgatctttaatatctgatattttcctggtactcgtactgataagggattattggaagtcagtcacagaatttggaaataaattctagtctctccttagctatttgatgcttttcatataggccaagaactcattgcaaaacatttttgcaaggatgaatgcctgtatttggtctaggaacagtacattttagtctgatttagaattactggtagcttattttaaagcaaggaaaagcagctgagctcaagtttgctgtctttagaatggtttgtgaaaatatggtataaaggtgttttcattttcctgttcttacctattattgtatagagctattcatgccattttttgggaaaactttaaaaattgccccaaatactgacattgagtgcattaaataacaaattatctttgatacattaaacttttattcttcatgcatctgtaatttaattttaagtataatgttttgcctttggtacaactaaattaaaactcttggtggtcacatattgtatataaacaaaacaatatgctttgttgaaggaaaattttctttattggaatgtggttgtaatccttgttcagttcttaagtttcggttttttttaaaaacaggatgcaacttaaacttttctttgcatcaaggtatatgcaaaacattggtgccgtgcatcaccaaatgaaagtttgtatttaacgaggaggtgctttacactgtactttttggtgttttttggaaaagttacatttagatctattctgaagctgttcatttttaacaaataaaatgttacaggtttcacatgatttattctcagctctaaaaaaaaaaaaaaaaaaaaa

SEQ ID NO: 284452 - DNA, 1000 bp, Homo Sapiens
agtggaccccgccagcaacacctacacccttgtcacctgcctgggcctttcctatgatggcctgctgggtaataatcagatctttcccaagacaggccttctgataatcgtcctgggcacaattgcaatggagggcgacagcgcctctgaggaggaaatctgggaggagctgggtgtgatgggggtgtatgatgggagggagcacactgtctatggggagcccaggaaactgctcacccaagattgggtgcaggaaaactacctggagtaccggcaggtacccggcagtaatcctgcgcgctatgagttcctgtggggtccaagggctctggctgaaaccagctatgtgaaagtcctggagcatgtggtcagggtcaatgcaagagttcgcattgcctacccatccctgcgtgaagcagctttgttagaggaggaagagggagtctgagcatgagttgcagccagggctgtggggaaggggcagggctgggccagtgcatctaacagccctgtgcagcagcttcccttgcctcgtgtaacatgaggcccattcttcactctgtttgaagaaaatagtcagtgttcttagtagtgggtttctattttgttggatgacttggagatttatctctgtttccttttacaattgttgaaatgttccttttaatggatggttgaattaacttcagcatccaagtttatgaatcgtagttaacgtatattgctgttaatatagtttaggagtaagagtcttgttttttattcagattgggaaatccgttctattttgtgaatttgggacataataacagcagtggagtaagtatttagaagtgtgaattcaccgtgaaataggtgagataaattaaaagatacttaattcccgccttatgcctcagtctattctgtaaaatttaaaaaatatatatgcatacctggatttccttggcttcgtgaatgtaagagaaattaaatctgaataaataattctttctgttaa

SEQ ID NO: 284453 - DNA, 1000 bp, Homo Sapiens; identical to SEQ ID NO: 115371

SEQ ID NO: 284454 - DNA, 1000 bp, Homo Sapiens
ccagtattggaaaagacaccagcccaggggccctgactcgtcacacttccctttcctaagcctctgagggtggagattcccctaggagcgcttggccagctgggaaggcagcgcccagctgcacttgttgttgatacagcataagtgaatcatgggcatttccctgagagcagtgggagaggccctctgagttggaagttgagctccacctcctttccaagtgagcactcagtgttgaatcacagttacaacccactggggctggtgggagatgcgttgtatgggactggaagcaagaggttcattcaaagagaaactcatgggatttgtaaccagatgaatcatgatttctaagacttctgatcaaaaatactgtgaaataaagaatgttaatcaactttggacctggagatgatttgcctttctgaacataagagagcttcaaagccccaaattcctgggctggggattccacagagttgacctctctgattttctactgctcttccctcccctctccagctacatactctgcctcagggccttcgcatgtgctgttccctctgcctagaacactctctcccaagtatatgtctggttccccgactcactttattcaagtccctgctcaggtgtcaccttccctgagaggcttccctgacctcctgtctaaaatgtcaccctcattactctccacccccttactctgctataatttctccttaataggacactgtataacttattttcttattatcttcttctccctctagaatataaatttatgaaaatacaaatgttattttttttactgctgtaactccagttcctagaacaatttccagcacatagcaagtgttcagtaaatatttgctgcttgaatctgctccagaattaacaagaaagccatctcttcctctgatctggggtctgttttgttcattactttgttcactccttcttccatttattcattcaataaacatttattgggaacctg

SEQ ID NO: 284455 - DNA, 1000 bp, Homo Sapiens; identical to SEQ ID NO: 115373

SEQ ID NO: 284456 - DNA, 1000 bp, Homo Sapiens
ccatcaactccgacctggagtgggaccctgaagatgtgaacctcgaaggcagcaaagaaaatgtggagctactgggatcccaggtgcaccaggactctgtgaggacagcacacctgagtgatgatgattaacaccttctggagccagctcatcagctcagagcccagggtcaggagttcgttcagtaacgcagcgggaatcaatctgcactgacaccgcggcaggaactgaagctgccctggcaagtgaggaaccaggagccgtcactgagtgtggctgggctacatcatagctcatcacggagctacgactttgggtactgcggacagacctggataggcccagcattcgttctgaagatcacagttcacagaagcttttgcttcgtaaagataatccaaaggatctcagacccgctcttccttttcccttcattcccttgagagtcagccatgaacggaatacctgctaggttccaggaatgagctcacctaacagatagcaaatgtgtctggttagatctcagcagagcccattctgcaagacctggctgagccagatgagagggtgggccctgtgctggggggccttgggtcacacacaggaaccgagacctggcttccaccccccagtcacccacttgggttatctgctggaagttatcgataggactgtgtggccaaccaagtgcttgtgagatcactgacactgcaaaaacaaagcaaactgctccgggtaccaggacttcctccaacctggcaagggtgtgcgctgaggcggggcttgcaggtgagggggctgtatgcttcaggaactaactaaatgcatgcagaaggtaagaggcatgatgggaggtgttcaagcacagcaatcccatttgggagttattttgatactgcgatgagtaagggtaagggcgcatggaatggggctaaggtgggagtgaacactggggtgaataaattttaaatcaattcaagtatctcaaaaaaaaaaaaaa

SEQ ID NO: 284457 - DNA, 1000 bp, Homo Sapiens; identical to SEQ ID NO: 223635

SEQ ID NO: 284458 - DNA, 1000 bp, Homo Sapiens; identical to SEQ ID NO: 223635

SEQ ID NO: 284459 - DNA, 1000 bp, Homo Sapiens; identical to SEQ ID NO: 115374

SEQ ID NO: 284460 - DNA, 1000 bp, Homo Sapiens; identical to SEQ ID NO: 220782

SEQ ID NO: 284461 - DNA, 1000 bp, Homo Sapiens; identical to SEQ ID NO: 115375

SEQ ID NO: 284462 - DNA, 1000 bp, Homo Sapiens; identical to SEQ ID NO: 115376

SEQ ID NO: 284463 - DNA, 709 bp, Homo Sapiens
agttcctggtggccgttggacagctcacacagctcccggccaggtcacccgccatggtcctccctctgccctggctctctcggtaccatttccttcgcctccttctgccctcctggtccttggcaccccagggctcccatgggtgctgctcccaaaaccccaaagcaagcatggaagagcagaccaactccagaggaaatgggaagatgacgtcccctcccaggggccctgggacccaccgcacagctgagctggcccgagctgaagagttgttggagcagcagctggagctgtaccaggccctccttgaagggcaggagggagcctgggaggcccaagccctggtgctcaagatccagaagctgaaggaacagatgaggaggcaccaagagagccttggaggaggtgcctaagtttcccccagtgcccacagcaccctccggcactgaaaatacacgcaccacccaccaggagccttgggatcataaacaccccagcgtcttcccaggccagagaaagtggaagagaccacaaaccgcaggcaattggcaggcagtgggggagccagggctctgcagtcttagtcccattcccctttgatctcacagcaggcagggcacccaggccttataggaattcaccctggaccatgccctaaaataacctcaccccaaatacaataaagggacgaagcacttatagataccac

SEQ ID NO: 284464 - DNA, 1000 bp, Homo Sapiens
aatgaggctccaaagccctgaggactctgtcctctgggacatccccctataaagacaatctggtccttctcatgacagtttcacaaaccaagagtggtatttaaacttaactacccctggaattgcctgaaactttagaagtagttttcagtttcatttggcataaaaagataggaatctctaataagcctcccagagttgcagggtgaacagttgagtctctgttgggttcaagagtgtgaggttcgcactgcccatcagcacttgttcctcacttctgagccagagcgctgtcagctccgccctggagggcactgctgagggtcactgtctcctgtgctcaaggctatatcaggtgtgtcacctgtgctggggagtcagctaagtccatcacctgtgtgtcggggtcctccatcacctgtgctgaggcccatcacttgtacttggagcagctcaagtgtgggctccttgcagaggctggaaagcccccacaggagcagttgccctgaagttgttacagctgctccctgctgacatcatgtggtctagaagggcccagaaatgggcaccacctcaggcaggttttgactttctgtggttaaagaaagaacaccagttctctcagataaagcagagagagctctcagaagcctgctggtgactgtgagagcaaagtcacttgcacctgaagcaagacagccgagaacaccgagccaccggcagcctggtgggtttggagggtagtgcgtcagaaccagatgtttataaggcttatgtattttatcacctctgctgtacagtttatggtttacaatggctgcaaggaaatcggatcagttttgttttacttgccaaataaaacaaatgtcaaaatagtcaatataaaatgtattctaatttggctgagttaagtcagccaatatgcaacaggataattgaatgttcattagtgcttccaagtaaaagccatttgtctgtcaaaaaaaaaaaaaaaaaaaaa

SEQ ID NO: 284465 - DNA, 1000 bp, Homo Sapiens; identical to SEQ ID NO: 220784

SEQ ID NO: 284466 - DNA, 1000 bp, Homo Sapiens
aacgttggaaacattacaagtgttcagttcatctggaaaaaacatttgtttgaagattctcagaataagttgggagcagaaatggtgataaatacatctgggaaatatggatataaatctacctactgtagccaagacattatgggacctaatattctccagaacctgaaaccatgctaatctcagatacagtcttgatggatttctttagtaggagcaatgaagaaaagtgtctccttccacctggcatccagaccaaatttgacccttgtaaatgacttagtcatttacaggggtcttactcagagtcaagtacgggtttgctttttttctgtgtagaatgttcatctaactgcaccttaaaaacacactgaaccctgggacaaaagataattactatgatctgtaggaatctggatatcattgacaaaatagagctgttttggaattttcctgaataagaggaggtgatgcaaatgtatgttgagtgtataaactcactggacaaaagtaagcctctggcttgctgagtttttgaagtatattttcaggtataataatcattgttctaaaattatataaaactatttgttatgttgttaaatcttgctgagacaaattatgactatagtgcatgatatatagtagattataaccttgtgggttgatgtgtctatctagtaataataaaaactaatgagatggcactagtatttccaaggtgttccttggtgttcagggtgtgcacaagagagattttggagcttatctgttatgtgttcatcagttagcaatgggacctgaagttcaacaacccagggtatagcccccttcctccaaagtccctgccacaggagaattactcctctctctgggtcttgaatgctctatggtgaatttgtatttagcctcaaggcagcatttcatttgtaaagcacttgggtaaccctttgttcttgcaataacaatattataatatttaaaaaaaaaaaaaaaaaaa

SEQ ID NO: 284467 - DNA, 1000 bp, Homo Sapiens
ctttgcaagcaaacttttgtttttatttaaattctaaatttgataaattatttcagatttttataatttggatacttttttcaggtgaatgaaagaatggtttactttagaagtccctttttccttacagtaacaagttgaatctacttggaaaattgagaaatggctcaaaagagataagaaaagttgatggagccgggaattgctggggtttagatgcactttttcttttgagagtaagggaagttttggaaaagaatagaaaattagtgtaagttgatatgattttatttaatcaaaattactgctatgctgcgaagaacagcttttacaaagtagctgaatttgtttttcccacttgatttggattcacattgctttcatttcttaaaatgcttcacttcaggttcttggtcttggaaataaatttcaaggtgcattgtatccattttaagctgctttattttattttcacttgtatgagcaaattcttgggggagctttgcttttcttctgccagaaaaacaaaagggggaaatgaaaatcttttttggaatgagttctgtgggttttcttaacagccaccatgtttattagttacattgtgttttggccaatcagtgcaatgtaacaaattttacagttaattgctttcaattgagtcagtaaacctgtgatagataatttatttaactggaaaacctaggtacccataagaaaaaagattcattctctgtgaaaactgtaggaatctgttgttgttttcatttgaatatgctctacttctgctctagtatttggtttggaatatattttgtggctctaattactgtatttttaaaaaccctacctccattaacagttggtaaaggccccttttcaggaaagtttgttgcttttttttttttttaaaggaaagctgctctttgctcagtatagtgttttgaaagtgaacatagtaacaaatactttaaaaataaagatacacaatttatatttg

SEQ ID NO: 284468 - DNA, 1000 bp, Homo Sapiens; identical to SEQ ID NO: 220785

SEQ ID NO: 284469 - DNA, 1000 bp, Homo Sapiens
aagagcatcttgaccaagttgagaaggggaccttaagtttggtttgcggcaaacagcacttgcaagaaatataaccctcccttcccccaatacacagaaccaccgccaccaccaccaacaccgccacaccaacaccaccactacaaaaaaaaaagaattaataagtcacaaccccttcaaataagctttctttccagtcgctgtatgtatacaaagatattctctatgttttgtaagtaaaaacaaaaagaaaacctttcttttgttttttacacataagaaacagtattgaaaaatcccacgctatggttcatagggtggagaaggaggagttatctccactccaaaagaaaaaaaaaaagttttttaccttacaccaagtgtagatcatttatgggattggtgctgattgaaagaacaaaacaaaacaaaacaaacacaaacaaacaaaaaaccttcaactgccttatgcccttaggtgctgagtttcattaagtactgtcacgttttctcatgcaaaactctctggtgatttttgcaccagaagagggaaaattaaacaattaaatgaaacaaatctaaaagtgaaacaaaaaccaaccaacaaatacaacacaaagcaattattcttcctatctgattatttgtattgaagaaaacaaatttaccaaaagcaaaagcataaacccctccctcttttcagtttctccccctcctctcctgaccttctccccactttgcagagccttctaggagctcaagggctgtttgaaactcaaatggctggagaagctacttgaaggctgattatgtgccattttagcatttgcctagcaagaatcacattcgtttcccagtgaaaagcaaaccagaacaaaacaaaaagccaccgcaataattcggtaaggacaggatattctaaagcaaattaaaggagatttctgtacacatagtcagtaataataaaactcagcatagtagcaaaaaaaaaaaaaaaaaa

SEQ ID NO: 284470 - DNA, 1000 bp, Homo Sapiens; identical to SEQ ID NO: 220786

SEQ ID NO: 284471 - DNA, 1000 bp, Homo Sapiens
aaaaggtttttgcttctttgaaatttctgagtcatccttttggcaaaataaataacttaatggcaatttggaactctgtttcataatatcaagtgttttaaacctcaaacatgtttgacagccttcccaaaatcaaactttggtttcaaaactgtcttccctggcacttggcttttggaatacttcagagggcccctgaagtgtccagaaaagagaggtaaacagggttatttgacatgtttaggtacatggattgccaaaatgatgttcaatcttctttaggttatatcttggtaaataatgctaatatatgttccaaaattgtatgggacttctaaaattctaatgtctaagtatttgctaccaatcgtaattaaggttgttatgttaagttattgtaaaccacggagacaaccaaacttctttttccatcgtgtttctaactgtaagtaccttggacatttttctattcacagaaaattgtcttgttttaatccttttcaaaagatggtttataataagctatatgactttaacaggcactctcaaatataggcttctggtaactttggagatggtaacattggaatagaagaaaatgtacaggacacataaagagctgaaatgctcaagaatatcaagcaaaacaagagttaactaaatggactgaactcagaaagctgaagcaaactttttgacttttgcttggaatattgctgatacttgttttgtttttcagagtcaaggaaattattttgaactgtttacaggaacgataaaccaaaagtgttttatacatttttgctctttgaattacttcattattaacttatctgcaaaattccctgagaatattttaacattatagagaagcactgtaaaaccttgataaattacccttaaatatttacctaaattagataggagcagataagaaatatctctaccatcaactttcagatataaccaaataaatgaacatattcagaagaaaaaataa

SEQ ID NO: 284472 - DNA, 1000 bp, Homo Sapiens
agtgaaagagagacgtcatcaaggccgggcgcggtggctcatgcctgtaatcccagcactttggaaggccaaggagggcggatcatgaggtcaggagttcaagaccagcctggccaatatggtgaaaccctgtctctactaaaaatacaaaaattagccaggcgtggtggcaggcgcctgtaatcccagctacttgggaggctgaggcagaagaatcacttgaacctgagaggcagaggttgcaataagccaagattgtgccattgcactccagcctgggagacaaagcgagactccatctcaaaaaaaaaaaaaaaaaaaaaagaatgactaaaattaagaagattgatgattccaaatattagtaaagatgtagaacaactagaactcccacatattgctgatgaaaatgaagaataatacattactttggaaaatactttggtactgatttaccatatgaccccaaaatctcacttgtagaaatttatacaggaaaaatgaaaacatatgctcacagaaagcttgtatacacatgcttatggcaataaatttatttatagttgcctaccaacaagtgatgaacaaatatattttagtatcttgatactactttctagctagaaaaggaatactactaagcaaaaatagaggatgaagtagtaatatacataacatagatgaatttaaaaacaccatgctgattgaaagaaaacaattatcaaatacacagtgtaatattctattcacagaaagtttgaaaacaaaaaactatagtctctgaaagaaaaccattggttgcaggaaggtggggattcattggccacaaaagggactgaggaaactttttatgggtaatggaaatattttatatcttgattgtggcaccaattatacaactatatgtacacatttgtcaaaattctaattgtattatacacaacatgagtgactttaactgtctataaattatatctcaataaaattggtcttaaaagat

SEQ ID NO: 284473 - DNA, 1000 bp, Homo Sapiens
ttctgctgtggggagctgccgtctttctgctgggaggctggatggctttggggcaaggaggagcagattcaacggtgatgaggcctatgaccagtgcaccaactaccttctccaggaaggtcacacttcggggtgcctcctagacgcagagcagcgagacgacattctctatttctccatcaggaatgggacgcaccccgttttcaccgcaagtcgctggatggtttattacctgaaacccagttccccgaagcacgtgagattttcgtggcatcaggatgcagtgacggtgacgtgttctgacctgtcctacggggatctcctctatgaggttcagtaccggagccccttcgacaccgagtggcagtccaaacaggaaaatacctgcaacgtcaccatagaaggcttggatgccgagaagtgttactctttctgggtcagggtgaaggctatggaggatgtatatgggccagacacatacccaagcgactggtcagaggtgacatgctggcagagaggcgagattcgggatgcctgtgcagagacaccaacgcctcccaaaccaaagctgtccaaatttattttaatttccagcctggccatccttctgatggtgtctctcctccttctgtctttatggaaattatggagagtgaggaagtttctcattcccagcgtgccagacccgaaatccatcttccccgggctctttgagatacaccaagggaacttccaggagtggatcacagacacccagaacgtggcccacctccacaagatggcaggtgcagagcaaggaagtggccctgaggagcccctggtggtccagttggccaagactgaagccgagtcccccaggatgctggacccacagaccgaggagaaagaggcctctgggggatccctccagcttccccaccagcccctccaaggtggtgatgtggtcacaatcggggacttcacctttgtgatgaatgaccgctcctacgtggcgttgtga

SEQ ID NO: 284474 - DNA, 1000 bp, Homo Sapiens
ggccctgcaggcccactggcagctcatgaagcagtattacctgctggaggaccagacagtgcagccgctgcccaaaggggaccaagtgctgaacttctctgatgcagaggacctgattgatgacagtaagctcaaggacatgcgagatgaggtcctggaacatgagctgatggtggctgaccggcgccagaagcgagagattcggcagctggaacaggaactgcataagtggcaggtgctagtggacagcatcacaggcatgagctctccggacttcgacaaccagacactggcagtgctgcggggccgcatggtgcggtacctgatgcgctcgcgtgagatcaccctgggcagagcaaccaaggataaccagattgatgtggacctgtctctggagggtccggcctggaagatatcccggaaacaaggtgtcatcaagctgaagaacaacggtgatttcttcattgccaatgagggtcgacggcccatctacatcgatggacggccggtgctctgtggctccaaatggcgcctcagcaacaactctgtggtggagatcgccagcctgcgattcgtcttccttatcaaccaggacctcattgccctcatcagggctgaggctgccaagatcacaccacagtgaggagtggtggcaggactcgtgggccctctccggcctgtttcccctgccactccagcccccttgagctgggaactcaggctcctggaaaaacctgggcagtgggaggctcagctgcgggccattgatttgagcctttgagggaggatagggctggcctttgtgaagccagcagaggctgagaacctcaggcttccctagatccagagcccctccccatcttcctctctctaaaaacaaccctaccccccattgccaccttcactcctgtgtctccagctgattagcctcagactcttcttttattgtttttcttttgtaaataaaaagcaccaggttccaaaaaaaaaaaaaaaaaaa

SEQ ID NO: 284475 - DNA, 1000 bp, Homo Sapiens
ggtgctggagaccatcggtgtgctggcggtcattgccaatgggatggtcattgccttcacatctgagttcatcccccgagtggtctacaagtaccgctatagcccatgcctgaaagaaggcaactctactgtcgactgcctcaagggctacgtcaaccacagcctgtccgtcttccacaccaaggacttccaggaccctgatgggattgagggctcagaaaacgtgactctgtgcagatacagggactaccgcaatccccccgattacaacttctccgagcagttctggttcctcctggccatccgcctggccttcgtcatcctctttgagcacgtggccttgtgcatcaagctcatcgccgcctggttcgtgcccgacatccctcagtcggtgaagaacaaggttctggaggtgaagtaccagaggctgcgtgagaagatgtggcatggaaggcagaggctgggtggggtgggggcaggctctcggcccccaatgcctgcccatcccaccccagcatccatcttcagtgccaggagcacagacgtgtagggccagagcccgtccagaggccaccaggagctgagacagtgccaccaccagcacctcccacaagcccaccgctgtgcgtgttgaggggtgctgtgagaaggctgtgcccatgtggggccgcaggaatcccctgtatgttcagggctgtgagctgccaccctattccgcctgctccgtctttgtgggggctctcaggcttggcacagccctgacttgaactctgggtgaccctgggcacccacagaactgggagtgagggctcctcaggcagccacaaggcaggaaaactggcgcaaatttcctgggcctccctctgacttctgggcgccagatcctgccgtgcccccatcctggctgttgggggtgtcctgagcccacctcgctggcctgttcccttcagccaacccgtttctgcagtaaaattaagcctgtcaaaaaaaaaaaaaaaaa

SEQ ID NO: 284476 - DNA, 1000 bp, Homo Sapiens
ttactgtacatcagagaattcatactggagaaaagccatataaatgtagtgagtgtgggaaagcttttagcaaaggctcgaatcttactgcccatcaaagagtacataatggagagaaacccaatagtgtggtaagtgtggaaaagcctttagatcatatgaatccctatacatgtgagaaatcttacagaagagaagcagtgtttatcacggtaaacttcattcatagatcctcccttatttaacatcagaaaaatgtatactggggaaaagttgtatgaaggtggtgaacatgggagacttttagcaatgatgcagatttttttattagagtttatactgtagagaaatcatatgaagtcaataaatgtgggaaagcctttgtcagtattaatcccttaattgacctaagtatactcacactaggaaaaatctgtgtacatgtagcaaatgtgggaaagactataggcaataggaatctcctgcaaactcctacaggagaaaagttgtatgaatgtggaaactttagaaattgaaggaatttttcagttccaagtgcatcccttattctataggaaataaactggagacaaatctcatttaagagatgcagcaaagtgttcactaagagtgtttatcttgccagacataagaagatgaatggtagagcaacctgaaggatttagaaattacatataaatctttgcagttatgctatttgtaaacaggattatataggagagcaaataaacataagtatgcatttcttagagcagtagcttgcagtttcagttgagttctacttagaaattctttttagctagtgggcatgtgaagatatttagtcacccagaggagccagtaaatgttataatgttaaaaattaaagctgcaaaagaaataaaatggtgttaataaaaatttggcatctaataaaatcattttgtatatcatgaacaaaaaaaaaaaaaaaaaaaaaaaaaaaaaaaaaaaaaaaaaa

SEQ ID NO: 284477 - DNA, 1000 bp, Homo Sapiens; identical to SEQ ID NO: 115377

SEQ ID NO: 284478 - DNA, 1000 bp, Homo Sapiens
ggtattctttgcttaggttcatttacaagatgtatcagtgttgtaagtccaataatttaagtccagtgattcaaaatcaggtatagagtccagaaacatggactacacataaggttctctatttaagttaaatacaaatgcaactttttagtgagcttttaggactactcttcaaaaaaagtgtattgctcagaatgatgacctgtaaatgtaagagtggcaggcctctgtctgtgaaagtcagaacacagggctcgagcctctggaactgaccctttgcaagtctttacaaaagaaaaaaggcagtggggagagagagtgttttggttacatcagaaataattgagatgggaaagaatagtgcagctccatagaggagacggactgtagacaatgagattaagcttcaatcactgctcctcagcaatgtgaagaatcaaagtcagggcaagaaagcgaaagcttggacttctattcaaagtggcagcagagtgggagggcggtacccttctagcccagtgctgctgagcttgtgtgaaaatcagacctgagatggcttgaagcagccaagaaccacatgggcattgcccagaattacaggagttagcacaccagctctacagataagaaaacattgaaattcaaagattaaggccaaaaatatctcacttgcaattttaatattttcatttggatttatataaatgaaacatatatatgttttggaatggccagagtgaggcaaaggggatccctgaaataacattagaacatacaggaaaaacgaggcaggcagatcactttaggtcaggagttcaagaccagcctgtacgtgcgtgcctgtagtcccagctactcgggaggctgagatgggagaatcacttgaacctgggaggcagagtttgcagtgagctgagattgtgccactgcactccagtctgtgtgacagaatgagaccttgtcttgaaaaaaaaaaaaacaaaaaaccacatacaggaaa

SEQ ID NO: 284479 - DNA, 1000 bp, Homo Sapiens
aactccatactctttgcgattaacattgacaacaaggatttgaacgggcagagtaagtttgctcccaccgtttcagacctcttaaaggagtcaacgcagaatgtgaccttgctgaaggagtccacgcaaggagtgagcagcgtgttcagggagatcacagcctcctctgccatctccatcctcatcaaacctgaacaggagaccgaccccttgcccgtcgtgtccaggaatgtcagtgctgatgccaaatgcaaaaaggagcggaagaagaaaaagcaagtgaccaacattatctcatttgatgatgaggaagatgagcagaactctggggacatgtttaaaaagacacctggggcaggggagagctcagaggacaactccgaccactcctctgtcaatatcatgtccgcctttgaaagccccttcgggccaaactccaatggaagtcagagcagcaactcgtggaaaattgattccctgtctttgaacagggagtttgggtaccagaagcttgatgtgaaaagcatcgatgatgaagatgtggatgaaaacgaagatgacgtgtatggaaactcatcaggacggaagcacaggggccactcagagtcgcccgagaaaaacggagcacactctgtcacccaggctggagtgcaatggcacgatctcggctcactgcaacctctgcctcccgggttcaggtgattctactgcctcagcctcctaagtagctgggattacaggcgcctgccaccacacccagctaatttttgcatttttagtagagaaagggtttcgccatgttggccaggctggtcttgaactcctgacttcaggtgatcctcctcgcctgccttgcctcccaaagtgctgggattacaggcataagccaccacgcccggccctgcctcttgagctggggagttcaagaccagcctgggcaacataatgagatttcagctctattaaaaataataataattaaaaaaaaaaaaaaaaaaaa

SEQ ID NO: 284480 - DNA, 1000 bp, Homo Sapiens
tgagcacttgagtaaaacttcacaggtgtgtaagtaggaaggcaacattttcaaaaagagaccatatgatgagaacgcctaatgatcaccacatgcaaacaaacaaaactgccagtctcatttcccacatttcttacttaagagaagagaagtaaatgaaaggaagaagaaatagatttgtaattaaagatgtggcaaaaaagatagggctgagccagttcaatttagccttcaggtgcagaatacttagagtccaaagaaatgtggagtggacttaattagatgcagttgtctttatcctgaaagtagtgagctaagcctaatttccagcattttgaaagagattcctttttgtttctttccatggtgccctctttaaggcacagagttgctccacaccactgggtggagaaagaaagattgcgaaccctcgaccatccttttgaggctacattctatgttatttggcagatttataaagctatcagtaataacaatgctatgtactgcaagctgcccttgtgttagttaaagggagcatttttaatcgttcggaaattttcgtgacatgtcaagtgcagttgtgaggactgtgtgggtgaacgaaaatgtgtctgtcaagttcagagtcctttagatttaaaaaaaaattatgacttatcaatggtgccgttatagctgtgtcagacaatgggtgtgcccattctcacaattatccttcaaaaaaaatctatgttcaaatgctttaaaaatttatcacacgatacaagagtatgactttgtcagccttctagagttctttttttcttttattttctttcgtattttttccttcaaaaaatcaatgaagacttgatttctgtcaataattgtatcaagggtgaatatactacctgaattttgtgcatgttacattgtagttgtaaccttttctaattcaggatgaatacgagatggttgtgattgtgcagtgtaccaataaagttcgagaaatttgtaa

SEQ ID NO: 284481 - DNA, 1000 bp, Homo Sapiens
gcataggttctaacagcagggtttggaaacctgtctctaagtaatgcattacttctgtcagaagtgtcttagggtggttatctagttcagtactccaaattattggggaccttgaggcttaagtaagtatttttctgaatataatgctaaaggtaagttgcattcatttaaactaatagagcagacagaattcagcactacttaatagtttataaatcagtggtttcagttgtatatatgttaggaaatggagaggtatagagagagcaggttccatagctcagcacttttaagtggaagatcatttgaatctcagtcttcagcctgcactgatttgtagcctgcactgtcttactgatttacaaactgaaatcactgagaaatgtctttagttcagtgagaagaaaccagaacacttgttcctagtgttgtgttgttttttttaagcaaattacttactgtatttttatggcaggagggagaaaaagtgttacaacggtttctaatgaagtccggtatttaaatgataaatgactaatgtgtttagtagagacaaaataaaccaataaatgattgttctttgccatttatgcaggaaactacccttttctcaatataaccaaacaaaggctaatttataaatgctttattgaaaaatacacttatcttcatataaaattacagtagcagtatcttgagaagttttataaatatttttgcagaacactattctaattgaacaatgtaagttccatatttctctcagcaatatgaagttacctagtaactttgtttatactgattcaatttacaattgaattttctccctaataagattattaatttgacttgaaaactgctggaacaatagtgattaataaagatatgtatagataattcagctgttaaataacattttctaatttgtataaatggtactatggtactaataaaaacctaaattctccaaccaatttttttaaactgccaggaacaccca

SEQ ID NO: 284482 - DNA, 1000 bp, Homo Sapiens
cgaatgaaagagaaaaggaataaaaacttggcagagattggcaaacgcaggtcttttatagctgcaccatgccaaataatcaccaacacttctacactgctgaaaaattaccaagacaacaacaaaatgttagttttagctttggaaaatgaaaaatccaaagtgaaagaagcccaagatatcatcctacagctgagaaaagaatgttactatctcacatgtcagctatatgcattgaaaggaaaacttacatcacaacaaacagtagaacctgctcagaaccaggaaatatgttcctctggaatggaccccaatagtgatgacagctccagaaatttatttgtgaaggatttaccgcaaattcctcttgaagaaactgaacttccaggacaaggagaatcatttcaaatagaagatcagatacctactattcctcaagacacactgggagttgattttgattcagctacaccacctgaaactcagcagtcacctcatcttagcctgaaggatatcaccaatgtctccttgtatcctgttgtgaaaatcagaagactttctctttctccaaaaaagaataaagcaagcccagcagtggctctgcctaaacgtaggtgcacagccagcgtgaactataaggagcccaccctcgcttcgaaactgagaagaggggacccttttacagatttgtgttttttgaattctcctattttcaagcagaaaaaggatttgagacgttctaaaaaaagtatgaaacaaatacaatgaaggtttcgttggatattgtttaaattcaatctacacctctttctgttgcttcaggagaggatctgtaagagtacacaaacagagtgagccattgccatagaatattctcttgacaggaccctagctcataaacatttcttcagaactatacttcaaatgggatgctttgtattaaaactttaataaatttaatttattttttcttttgaatataaataaaaaaaaaaaaaaa

SEQ ID NO: 284483 - DNA, 1000 bp, Homo Sapiens
tggtcccagctcgtggccgggtgagtggggccctgggttcagggctggtccccctgcgtaagcacctgatatgagctggggaattgggactcaggcctagcgtgtgtcagggggccccagggtctgtgtctgagcccccgttttctccaccgttggtgcttagctgttgggccgtgtctggtattgagcgttataggtgatatgtgagtgtgtgagtgaacgtgatgtggacgagcctgcatgagagctggcggtgcttggagccctgtattcttccccttgaccctgtgtcagcgaggcccctggtccagcccgtgctggccggcaaaggtgtatggccctgtgacatggcgtgtgtccattccatttaggatttagtgtttgggagcccgttcctggttctggtccaacaggtgtcctgggtctggggccaccaggtatgagctcacacacctcatcacagcctctgtgcagcggggacagggcagggcagacggactgaggtgggagctctgttcctccgaccccacctgtctgcctcaagctcccagagcacatgcctgccctgccgatgtgtcctgtttgcttccagggtctctggagggtcgaggaggcagtggccctgcatgggccccagctgagagcagtccactggatgttggagagccaggcttcctaggggaccctgagcttggctcccaggagctccaggacagccctctggagccgtggggcctggatgtggactgtgcaggcctggccctgaaggacgaggtggagagcatcttccctgacttctttgcctgctagcagccaggctgtggagaggaggcgggcggggccggtggatctggagccgtgtgtgtccctgtcgcgtgcttgggcattttattttgggtttgggttgcagctgcaccctaatttgagcgaggcttacaggctgtgagaagaggatagtgaatattaaagagggaaagcagttttcctggaggaagcaaaa

SEQ ID NO: 284484 - DNA, 1000 bp, Homo Sapiens
aaattagcttagcaatttttttttctcttttaagaatcaaaatatggatttgatactaggaacagaatctgctctttatttcattccttttttgtctcttctgcttcctctgcccctcccccagccacgcagcacgggtgccagtgtgcatgcgtgtgctgggggccaaatgacagaaccccggttgaaagtccgcttgtaaaagcacaagtgagaggcagcatcaggcccctggagggctgtggtcctcggactcggttctttcctgtcccctggccgtcctgtcatccctgtgtgctgcagcatcaccacggcctacttcccaatatccacaaagcttcgcctttgcttttgcactctcttttacatttttttacttctttcctttttcttaagttcggatccaagtttgtcttcttatccatcaccatgctccctgaaagcctttttgagattaagaaattttcttaccaggagtcaactttccgtctgtcctaaagggaagtgggtgctggatttattagatattgggttcctggattaagatgacttcctcacatagcttggagtctgcagtttctcagttagaagtgttctatatttctttttgttccattttagtgcgctgtgctttgtataagtggtctttctatgggcagtttcaccttccatgaaggcttataactcaaccactactacccattcagaagagcagaaagcatctgctgtgtgagcgttcatatgttacctaatgtgtattttgctgtcgtctcagctgatagatgtcagtgagtctttctgactaggtttattggtgttgataagaaattaaaaaaaggattcataacgtggtgattgtgtctatcatgtatattttaaatttctgaacgtactttcatttagctgtttttctttgctttctaaagatgtataacaatcatgtatatgtattatattgaagaataaacatggaccttatttacaaaaaaaaaaaaaaaaa

SEQ ID NO: 284485 - DNA, 1000 bp, Homo Sapiens
gtacgatttctcgcccgtggctttaaaatgcacttaaagtcctgtccttgccttttattttctgaacttgatgtttttgcattctttgagttcagtttaaagacaactacgagcatctgtaaccaatctgacaataatgtgttcatcaggtgcctgtggattaaatcacatactggcatatttaagctgaatgtcaatctggaaaataaattgactgtattaacggaaataccactctttgtgtagatatttgtcgtatattgaagaaaaagctaaaaagaatggaaatcgcatgactataacttaagtctttcttcaaagtgcatgcagtcttttgcgatacctcattcagccaagtattggtattcttcctcattcggtataaggcagctttcaatttgcttagagggcaacattggaaggttagagttcatcagaaacagaattctaaaatgtgagttcaattcaataaatttgaatttctgtaggaagaatcaaatcaccgatttaaagattgcaatatataataatcatttttaaagtattggattaaatctgataggttttccagaaatgaacaaaaatcagctctaaaaccaaagctgatttttagaaaatttgaaaatgtaaatcagccctatccatactatagtttctctaaaactttatctgaaagagtcattttaaaataactattaaacaatgtaactgctatcttaatgttctgaaataagttaaaacattttaaaatatgaatactgtaaaggaaataaacggtgggaaggaaaagtagagaaagaaatgccaattccagtccaaagctttatttgccaagttttcttagaatgaactttaccaatttatgaattcttgtaagcggaatgtaaaacggaaatactgaaagacttttgcctaaagtggcattattgactgctggtgtgatgctactgtaatgtaataaattattaagttgttgcaaagtgcaaaaaaaaaaaaaaaa

SEQ ID NO: 284486 - DNA, 1000 bp, Homo Sapiens; identical to SEQ ID NO: 220787

SEQ ID NO: 284487 - DNA, 1000 bp, Homo Sapiens; identical to SEQ ID NO: 115378

SEQ ID NO: 284488 - DNA, 1000 bp, Homo Sapiens; identical to SEQ ID NO: 220789

SEQ ID NO: 284489 - DNA, 1000 bp, Homo Sapiens
tctgcccttttcctgtatcaaccctgatggataatagggcgtgggttctgtctgttatcagggtgtggtcccctgtgaatgaagcactcccagccactgagctgtgagaaacagtcactcggaagtgtgagctttatcttagtttttgttggatcatgttgagtctgtcagctccacaggacttcagtacgtttctgaacagtccctgccatctctacgggggagagggtcaggcaagctgcaagtgacactcacctcctgctgacagttgcagtgtctcagatggcctggaagggtggtctccagcagcctgctgggcgctcccctttcatgagagccacctgcagtgacctgaactgatacatgttgattagtctgccctttctttagaaaactgctactctccttttcatatctcagaaaaacagtagaggccttttaggaccaaactccatgtcacactgatgaagagccagtgggggttagagcgtcctgttaaggcacatgctaacttcccactcaagtctggcagcgctggggcatcagcacacctcttgccacccacactgataccagaggggaaggctgtgaggtggctgggggttgagacttgaggtttctaactttcctctgcacacctgtggctacctggtgtttgtctcttgattccctccacctgcctcacaccctgcctccgtcgggattttccacctacaccattcaaaaggaacataggagagggcatgaaggggctaggctgaagcactctgatgactggggccaatttgtggctgaaaatgaatacattttttgaaatttatggtcattttcaagtgatttagaaggttgatccttagcctcatacagtgatgaaataatctgtgtgttcagagccaagcaggactttagcaagagtctgattgtattgtcactatctcggggaaaaaaaaatacaaatacatttctctgatctctgatggcaatgaagtttgacttgtaa

SEQ ID NO: 284490 - DNA, 1000 bp, Homo Sapiens
atggggctgcctataggtaccctccgggcgtggtgggcgtggcccccactggcatcccagctgctgtggaaggtatcgtccccagcgccatgtccctgtcccacggcctgccccctgtggcccacccgccccacgccccttctcctggccaaaccgtcaagcccgaggcggatagagaccacgccagtgaccagttgtagcccgggaggagctctccagcctcggcgcctgggcagagggcccggaaaccctcggaccagagtgtgtggaggaggcatctgtgtggtggccctggcactgcagagactggtccgggctgtcaggaggcgggagggggcagcgctgggcctcgtgtcgcttgtcgtcgtccgtcctgtgggcgctctgccctgtgtccttcgcgttcctcgttaagcagaagaagtcagtagttattctcccatgaacgttcttgtctgtgtacagtttttagaacattacaaaggatctgtttgcttagctgtcaacaaaaagaaaacctgaaggagcatttggaagtcaatttgaggtttttttttttgttttttttttttttgtatgttggaacgtgccccagaatgaggcagttggcaaacttctcaggacaatgaatccttcccgtttttctttttatgccacacagtgcattgttttttctacctgcttgtcttatttttagaataatttagaaaaacaaaacaaaggctgtttttcctaattttggcatgaacccccccttgttccaaatgaagacggcatcacgaagcagctccaaaaggaaaagcttgggcggtgcccagcgtgcccgctgcccatcgacgtctgtcctggggacgtggagggtggcagcgtccccgcctgcaccagtgccgtcctgctgatgtggtaggctagcaatattttggttaaaatcatgtttgtgactgtaaccatttgtatgaattattttaaagaaataaaaatcctggaaagagccagcgtg

SEQ ID NO: 284491 - DNA, 1000 bp, Homo Sapiens
tgggccagctttcataatggtgtggctgctggcctgaagatagctcctgcctcccagatcgactcagcttggattgtttacaataagcccaagcatgctgagttggccaatgagtatgctggctttctcatggctctgggtttgaatgggcaccttaccaagctggcgactctcaatatccatgactacttgaccaagggccatgaaatgacaagcattggactgctacttggtgtttctgctgcaaaactaggcaccatggatatgtctattactcggcttcttagcattcgcattcctgctctcttacccccaacgtccacagagctggatgttcctcacaatgtccaagtggctgcagtggttggcattggccttgtatatcaagggacagctcacagacatactgcagaagtcctgttggctgagataggacggcctcctggtcctgaaatggaatactgcactgacagaaagtcatactccttagctgctggcttggccctgggcatggtctgcttggggcatggcagcaatttgataggtatgtctgatctcaatgtgcctgagcagctctatcagtacatggttggaggacataggcgctttcaaacaggaatgcatagggagaaacataaatcaccaagttatcaaatcaaagaaggagataccataaatgtggatgtgacttgtccaggtgctactctagctttggctatgatctacttaaaaaccaataacagtgtcttctaggaagcccagacacatggagaagttctgagtgttttggccgatagtcccagatgaggttccagcaacagctgggatcacccatgagatgtgagtgaggaaggctttgagatggtttcagccctagccaccactgacctcataagagaccacaagaatgagaatcacctggccaagcccagcagaccttcagaattcagaaataaaataattcatcttattttaaaaaaaaaaaaaaaaaaaaaaaaaa

SEQ ID NO: 284492 - DNA, 1000 bp, Homo Sapiens; identical to SEQ ID NO: 115379

SEQ ID NO: 284493 - DNA, 1000 bp, Homo Sapiens; identical to SEQ ID NO: 220794

SEQ ID NO: 284494 - DNA, 1000 bp, Homo Sapiens; identical to SEQ ID NO: 115380

SEQ ID NO: 284495 - DNA, 1000 bp, Homo Sapiens
cacatgtggataagaaactaagggccacagaccaaatgacaggtcggatggcaaccctggaaaagtcacacagctcagcctgttggaggaagaggagcagtagaacctgtgtggagcctgacagaacccaagatgccattcacgaaccgagaggtctttcaagatcacacacagttctacgacacagacatttcgtcttcttgccactcagtagcggggcccatccctctgtgcctccaaggagaaagaattgtgccatgaaaaatggaaaactcctgagaagctgttccagcgtcaggagagcagcagacaagctggactggggaagattcttcctgcaagacctgcagagtgtatgacacataaccagcacccaagaaatgtctaccgaggaattaatgaatgaggaaatacctctgtacactcaccagacactggctgctggttgtcacggtgctaagagctgtgggaaacatgaagagcaatgagaccaggtccctgctctgaggagacgtgtgccagcgaagtttctctcccacgtgagtgtgctacaagaaaatctgaacccgagaatctgattcagtaggtctgcactttctccactttgccagataattctgattgagaccgtcaaggctgtgactagtggggaggcagtagagtattttctgtgctagactgaggcagccctgaagcactgcgcaagcacatggaaaagagaaacgagattgggccgggcacggtggctcatgcctggaatctttgggaggccacggatcacttgaggacaggggtttgagaccagcttggccaacatggtgaaaccttgtccctactaaaaatacaaaaattagcagggagtggtggtgcacacctgtaatcccagctactctggaggctgaggcaaaagaatcgcttgaacccgggaggtggaggttgcagtgagctgagattggaccactgccctccagcctgggtgatagagtgagactccatctct

SEQ ID NO: 284496 - DNA, 1000 bp, Homo Sapiens
aaaacaattatcagccaagaatttgtatccagtgaaactaatcttcataaatgaaggaaaaatggtattttttagacaaacaaatgctgaaaggtctcgccactaccaggtaagcactacccctgatcttaaaaggagctctggatcttgaaacaaatccggatgacacatgaaaagataacccctttagagcataaatctcttaggacctataaaacaaggatcgaatataaaaaaaaaaccggatccaaacaaaaccgtgaaggtatacagggaacaaatagtatgatgaatgaaatggtaactcccatctcaatactaatgttgaatgtaaatggcctaaatgctccccttaaaagatacagaattgcagaatggataagaactcaccaaccatctgctgccttcaagagactcacctaacacataaggactcacataaacttaaagggatggaaaaagacattccatgcaaatggacaccaaaagtgagcaagagtagctattcctatatcagacagaacaaactttaaagcaacagcagttaaaaaagacaaagagggacattatataaatgataaaatgtcttgttcaacaggaaaatattacaatcctaaatatatatgcacctaacactggaagtccctaatttataaaacaattactaatagacttaagaaatgagatagcaacacaataatagttggggacttcagtactccactgacagcactagacaggtcatcaagacagaaattcaacaaagaaacaatcagtgtaaactataccctggaacaaatggatttgacagatttatacagaacattctacccaacaaccacagaatatacattttattcaacagcacatggaactttctccaagatagaccatataataggccataaaatgagtctcaataaatttaaaataatcactctctcagaccatagtggaccgatactagaaatcacctacaaaaggaaccaccttcaaaacc

SEQ ID NO: 284497 - DNA, 899 bp, Homo Sapiens
gggctcagagaactccaaacctgcacacctccctctcacctgctcctctacctgctccaccctcaacccaccagaaccatgggctgctctggctgctctggaggctgtggctccagctgtgggggctgtggctccagctgtgggggctgtggctccggctatgggggctgtggctccggctgctgtgtacctgtctgctgctgcaagcccgtgtgctgctgtgtgccagcctgttcctgctccagctgtggctcctgtgggggctccaagggggtctgtggctcttgtgggggctgcaaggggggctgtggctcctgtggaggctccaaggggggctgtggctccagctgctgtgtgcccgtctgctgctcctccagctgtggctcctgtgggggttccaagggggtctgtggatttcgtgggggctccaaggggggctgcggttcttgtggctgctcccagtgcagctgctataagccctgctgctgctcctcaggctgtgggtcatcctgctgccagtccagctgctgcaagcccagctgctcccagtccagctgctgtaagccctgctgttcccagtccagctgctgtaagccctgctgctgctcctcaggctgtgggtcatcctgctgccagtccagctgctgcaaaccctgctgttcccagtccagctgctgtaagccctgctgctgctcctcaggctgtgggtcatcctgctgccagtccagctgctgcaagccctgctcctcccagtccagctgctgtgtcccaatttgctgccagtgcaagatctgaggctctgcccacaaacctcagtgggtcctacagatccgggctctccaggaatgactgcagctgtgtcctgaattcctgaagcacgtctctgaatctgtcctcct

SEQ ID NO: 284498 - DNA, 930 bp, Homo Sapiens
ggttgaaagatccttcagtaccagccaactctctctcctggttccatgttcactctgctactttctaattattactccaggttggagggatggatgatggacaacaacttttctcatcactggaagggcatgttccccactgaaactgaatccactgttttttgtttgtttgtttatttgtttatttttgtttttgagacagcgtctggctttgttgcccagactggagtgcactggtgcaatctcggctcactgcaacctctgcctccggggttcaagagattctcctgcctcagcctcccaagtagcttggactacaggcacgcaccaccatgcctggctaatttttatatttttagtggagacagggtttcaccatgttggccagactggtcttgagctcctggctgatctgggagccacagcaggggtcagggccctgtgatccccagcctgaaactggcagtcagatttcacaggcttcagaccacagaggagcactaggaccccaccagaggtggtccggaggctgacctgaaggccctggggatgggctatgcaagctgattgctcactgcgagtagcaagagtatgtgtttttctggaaggaatgattggaatatccaaggacatgaggggagaagaaagcggtaaaatggcatttgctgtaaaagagtgggaaaaaaattgaattactccaaggttcgttgtgttcttccagctccatctatgataaagagaatgaacaactaggtgttttccttctggacaatgattatgacacagattactgctgggaccagaagtattgccactttggacaacatggaatagaaggattattgagaatcacttataatgagatgttacttcaaattaggaaaaatttgataaacaaatttataatacaaatgattataaaaacctaaa

SEQ ID NO: 284499 - DNA, 1000 bp, Homo Sapiens
ggcagctctgccccttctgggttggggtcactacgactatgagccactggggacatgctgcaccctggactactccaagggggacagaaacttcaccagcttcctcttcaccatgtccttcttcaacttcgccatgcccctcttcatcacgatcacttcctacagtctcatggagcagaaactggggaagagtggccatctccaggtaaacaccactctgccagcaaggacgctgctgctcggctggggcccctatgccatcctgtatctatacgcagtcatcgcagacgtgacttccatctcccccaaactgcagatggtgcccgccctcattgccaaaatggtgcccacgatcaatgccatcaactatgccctgggcaatgagatggtctgcaggggaatctggcagtgcctctcaccgcagaagagggagaaggaccgaaccaagtgagcctgccaccctggagtgagccccaggccaggaggctgttccaggagtcctgcccagcagcctcagtggccaagcccagacactcacccaccttccccagtggccccgtggatcctggtcctaggctggacacaggattcagaaagacaccaggctgcacagaaagagccagatggacctgagtgtcggtcacagccccctacactcaaggctgagaggcctcaggaaagtcattcctttttaaaaataataataaatgtaagggggtacagtgcagttttgttacatggatagattgcctagtggtgaagtctgggcttttagtgtaaccatcaccctaataatatacgttgtacccattaagttatttctcatccctcaccccctcccaccttgtcacccttctgagtctccaatgtctattattccacactccatgtccacgtgtacacattatttagctcccacttacaagtgagaacatgtggtatttgactttctgtttttgagttatttcacttaaaataatgacctccagtttcatccatg

SEQ ID NO: 284500 - DNA, 1000 bp, Homo Sapiens; identical to SEQ ID NO: 115381

SEQ ID NO: 284501 - DNA, 648 bp, Homo Sapiens
tgctagttcttatccctggacctgaacccaggcgcacatctggattagaagatgccaggctcagaggatcttcgtaaaggcaaggaccagatgcattcacacaggaaacgaaccatgttcactaagaagcaactggaagatctgaacatcttgttcaatgagaacccatacccaaaccccagccttcagaaagaaatggcctcgaaaatagacatacacccaacagtactgcaggtctggttcaagaatcacagagcaaaactcaagaaagcgaaatgcaagcatattcatcaaaaacaagaaactccacaaccgccaataccagagggtggggtctccaccagtgtcggcctgagaaatgcagacacactacccagattgcccaacgctgctcacccgatcggcctggtgtacacgggtcatcgagtcccctcattccagctcatcctgtaccccaacctcaaggtccctgcaaatgacttcattggccacagaatagtccattttggctgctgccgagatcctaatatatactgcctctaccccattttggaatcccaagtttgcgctccaagcttccattctggctctcctgcctgttcatctaaccaaagtcgagagagatgataaatacaaaaagtcacatgt

SEQ ID NO: 284502 - DNA, 1000 bp, Homo Sapiens
ggcggagcttgcagtgagccaagatcgcgccactgcactccagcctgggtggccgagcgagactccctctcaaaaaaaaaagttacatttacactacactacactgtagtctaataaagtgtaaaatggtgttatgtctaggaaacaaggcacatactttaattttaaaacacttgatgctggctgggtggggtgactcacgcctgtaatcccagcactttgggaggccgaggcaggtggattgcttgagctcagcctggacaacatggcaaaaccccatctattaaaagaaaaaatacctgatgcccttatttgaagctccattattttttaaaaagaaattatataaaaatactttattgctaaaaatactaataatgatcttagccttcagggagtcgtaatcttttttgctggtgaggagtcttgcctcaatgtcattggctgctggctgataagggtggtggttgctaaatattgaagtggttgtaacaatttgttaaaacaacaatgaaatttaccacattaactgacgcttccttccacgaaagatttctctggaacatgagatgttgtttgatagcattttacccataatagaacttctttcaaaattggagccaatcctctcaaaccctgccactgctttcttaactacgtgcgtcaatattgtaaatcctctgttgtagtttaaacagcgttcacagcatcttcaccaggagtaaattccacctcatgaaaccactttcgaggctccttctggactgtggcgttctttccaggctaccttgtggcaatttgagagtctggcatcgttttccgccaggacccaaagatccaggaggcacttgtgactagcctgccaatggacccatgacaaaagtttaacctaaccttcatccgagtcttcgcaaatgctcactgaagaaaattcctaagacaattcaggggcctctcataccctctactgtgagatgttactaaagaaccttagtaactt

SEQ ID NO: 284503 - DNA, 1000 bp, Homo Sapiens
agaatgtcataactgtaagctgttcacttgcattgatgcaacttttaatcccactacaagtattctcttggtaagggctagggagggggtatggataccagtttctctacatcgtccatgggagtcttccccctctattcacatagtcaatgaagttcttaaagacatcctcaaaagaacaaagagatttatttttactcttattgcagtccttgcaggactacttgcggttactgcaacagcagcaactgctggagttgccatccgcagttctgttcaaactgctcactatgttgaagcatgccagaaaaattcctccagactttggaattctcaggcgcaaattgatcaaaaattagctaatcagattaatgatctccgccaaagtgtaacctggctgggagatagagttatgaacttgcaacaccgtatgcaattacagtgtgattggaatacttctgattattgcataacgccttatgcttataatcaagatcaacatagctgggaaaatgtctcaagacatttaaaagcctgggatgataacttaaccttggatatttcacaacttaaagagcaaatctttgaggcttcacaagcccatttatccacagttcctggctcacacatttttgaaggcataactaaacaattacctgattttaatcccttcaaatggctcaaacccgtcagaggatcattgttgttactggcattattaatattggtatgcttatgttgtctccttttagtctgcagatgcctctaaggagtccgaaaccaagtccgaagtcaacaacaagcaatgatggcgatggcgattctagttaataaaaaggggggagatgtgggcggcaagccacccaggcaccgaggcaagagacagaggacacgagctgttccagtataataaaatataaaacaagaatagttataccagatatagatcttagatatgattatatacgaatatcattaatcatgaaaaaaaaaaaaaaaa

SEQ ID NO: 284504 - DNA, 1000 bp, Homo Sapiens
atcagctgtctgtcatctgctgcgatccggcagcctctcttcactgctacatgtgctggaaggacaaataaataattgtggttgtgttcttaatggggacgagcagacacactgatctgaacatctggcccaagtgaagcatggcatatagtgcccttggaagaaaattaggcctcaaatgacagtagcattgaagtgtttgctgcagagttgagggaaacccccagccaccctcccggaatccgagatagggtggcacatctgtcctgacagacgaggagtgtaactgaaccaggaatatttcctccattcctgctctcccactgcacacagggtggtggcacattatccctctggggggtggggacgcctgttgttttggctcaatttgggtttgttggtcacatggagctcttccatttcgtttagctgaataatgagttgttcctagaggagacagcctgtctctccttgttgcccccaaagcccatgccctgccgtggtggcagctggggctgtggatgggaggggtccccaacatggatgtgttgcccctcctccgcatgccaacgcagttcatgtacaaggcccctctgcaactggagagaaaattaattcctatcccgtgagtggattgtgagaaattccacccacgtggagacagcttactgcagcactgttggtgttcggagctcttctgtgccctggctccatgctttcacctacacaagcatcaccttcctaatcaccgcggggcggggagcgtgtggctgtgccccttctctttaatctcatttaatttttattaaacatgctcagtacctgtgttgagaaaaggctttctttatcctaaagattattacctttttaaagtgctcttatattttcatgagtttttattttgtctctgagattttgtattccacattctagggtattctgtaatttggctccttaccaatattattaaaatcttattaaaatctaccctaccaaagca

SEQ ID NO: 284505 - DNA, 1000 bp, Homo Sapiens
tgccatgtcagtccttcagttgtacagtgaactgttgtacactggttcaatgaaaggaagttaaaagtaccttttacatattgtaaaagtggatacagttgatttgtgagtaggcactctttaatccattacctggcactagcaacattagaattttaaaataaaataattgggaaagaaggtgggtcatgtattaatcagtgaacagagatttacctaaccaacagacttggattgtcttttgacataatcaaaatgcaacacatgcactttgtgtgtctcctcttaattgaagggagggctgagggatgttttctcttcttgtcttgtgtataattctctattgcttaggatattaaagtagagcactcaagtgtgggtttctgtgttattgaggatttgtttggaattcaaattacagttatgtactggatgctacagacttataacagcatagtgaatggtaagactagtgcaaaacagttatttctgaaaattaaagaccattattgctaccaaatcaatgtgactatttcatatgcattttgcctttgttaattttaaacaaacaaagtatcattagtgatcagctagctaccttctactttccatttttcaagtggattgttctcttaatttgtatataacctgttgtctaaattttatgtacagtcttttataataaaccattctcctatatgaaattttggatactgttaaaatataactcatgtggacttcaatgcagacttcacatttttctgacctttactcctacggtaaatcaagacaaaccatttgaattttaacattggttatttatttgtgtaatggccttacatgtggatattaacagtgtaaacaataccacatataaccatcaagataccttgattataatttataggactagaatgacagattcaggtggtttattaattacatttaaaaagttttctgaaaaaacttttgcaataaaaaaaaataaattgcccatcaa

SEQ ID NO: 284506 - DNA, 1000 bp, Homo Sapiens
cttcaaattcatgaaaggacacaaacacacataagaatacactctggagaaagaccttataaatgtaagacatgtgggaaaggcttttattctcccacgtcatttcaaagacatgaaaaaactcacactgcagagaaaccctatgaatgcaagcaatgtggtaaagccttcagtagttccagttccttttggtaccatgaaaggactcacactggagagaaaccctatgagtgtaagcaatgtgggaaagccttcagatctgcctcaatccttcaaatgcatgctgggactcaccctgaagagaagccctacgagtgtaagcaatgtgggaaagccttcagatctgccccacaccttcgaatccatggtagaactcacactggagagaaaccctatgagtgtaaggaatgtgggaaagccttcagatctgccaagaaccttcgaattcatgaaaggacacaaacacacgtaagaatgcactctgtagaaagaccttataaatgtaagatatgtgggaaaggcttttattctgccaagtcatttcaaatacctgaaaaatcttacactggagagaaaccctatgagtgtaagcaatgtgggaaagcctttatttctttcacttcttttcgataacatgaaaggactcacactggagagaaaccctatgagtgtaagcaatgtggaaaaaccttcagatctacctcacaccttcgaaaacatggtaggactcacactggatagaaaccaaagcaggtgaatcacctgaggtcaggagttcaagactggcctgatcaatatgatgaaacccctgtctctactaaaactacaaaaattggccaggcgtggtggcctgcttctgtaatcctagctagttgggaggctggcacaggagaatcgcttgaatctggggggcagaggttgcagtgagccaagattgtgccattgcactctagcctgggcaacaggagcaaaactccgtctcaaaaaaaaaaaaaaaaaa

SEQ ID NO: 284507 - DNA, 1000 bp, Homo Sapiens
acccttcctcacatcagcttcctgcttttcccagtgttttactgtaaattgtgtagcatatgacaaatcttgagctgactttcctcttcacctgttatggctggagtattttccagacctgaagggactcacacttgttttgatacttggatcacatctccgtgaggttaggaaggtaaatctaccaacaggaagccctgtactctgtattccaaggccattggtaaatgtgttggtgccactgatcggactgtatgaccttaaacaagtcaccttagttttcagtgaaatgggaatatcattgtctcctctttcatgaatgctgtgagaatcagatgtgcaacaggtacagacttgccctttgaaatctatacctctggatacattagaggcattttattaacaaaggcccttctaaatgtgctatttatttgacaataactatcagatttgccttaattttgtgtttatagcatttatcaaaacgtatcctcatagactttatgcagattaatatggtcaattgatttggataaaagaaagtaatttcagggtttgtttttaagccaggacaagaagtgcaaatgcctctttgaagcaatttaggctaaactgattttgaaatttcaaaatgttttattttactttgttttattaagccaggacaagaagtgcaaatgcctctttgaagcaattcaggctaggtaaaccgattttgccatttcaaaacgttttattttactttgttttatatcagagtcttataaaacctgctgcaaatatttctgaatgtctttgtaaaagtgtttgttagtgtacctgtgattatagtacttcacttttttcctttggattaattggttaaatgaatgagaaatgtgttatgttttttactaaaaagtataaattaaaattttggaaagaaaaggcaatattatctggctccccaattaaagtttgattttattgtcacaaaaaaaaagaaaaaaaaaaaaaaaaa

SEQ ID NO: 284508 - DNA, 1000 bp, Homo Sapiens
aatcattatatggtatattctgacttaattttgcatttacaatttatttttaaacactaaatagcattataattttactgggataactatatatagtgtagtatattaaagttaataaaatgacgttgcatatgagagaaaaagcataataaatcagaaacaatataaaaagctttcagaaaagataaaaatattgtatttctctagtctgttcactctccagtgtctctggttctttcatatcatcttcctttcctcaaatcttttaatactccctccctcatcatttccaactagtgaccctactttctatttcattaagaaaacagatacattcagaagagaactgccagtttaaagaacatttacaaagccatcacccatgtaataaccagccagagcaagaaatagagccctttaataacctactcttctccccccaccactgatgacaccgctccctccatcttaggtgtagcccccatgctgacttttgtaataataatttctttgcttttgtttataagttttcttccttataagcatctctaaacaacagttttgttttacagatgttcaaacattaaatgctttttagacttggaattgtgactatcttgtttcactccacattgcttgtgagactcattgatattgcagatagctgtagttgatccatttttattgttgtacagtttaccattgtataaatataccatgatttattcatgataactttgaggaacattctggttgtttgcaggttttatttttacagttcattagttttattgatgtataataattgtatatgtttatggggtatatgtgatattttgatacatgtgtacaatgtgtaatgattaaatcaaggtaattgggatatccatcagctcaaacatttatcatttctttgcattgggaacattccaaatcttctcttctagctattttgaaatacacaataaattgaatactgtggtcaaaaaaaaaaaaaaaa

SEQ ID NO: 284509 - DNA, 1000 bp, Homo Sapiens
tactaatgatttttttttttttttgagacggagttttgttcttgttgcccaggctgcagtgcaatggcacaatcttggctcactgcaacctctgcctcacaggttcaagtggttctcctgcctcagcctcttgagtagctgggattacaggcatgcgccaccatgcccggctaattttgtatttttagtagagacggagttgcaccatgttggccaggctggtcttgaattcctgacctcaggtgatccacctgcttcggcctcccaaagtgctaggattacaggtgtgagccaccacgcctggctaattttgtatttttagtagagatggggtttctccaaaggctggtcttgaactcccgacctcaggtgatccgcccaccttggcctcccgaagtgctgggattacaggcgtgagccaccgtgcccggcctgatgtttttgaatgattatgaaaatgggtatacagcattaaaaccttagactgattttaaatatattaatttcttttaaactcaatataatgttaatattactgtagcacttactagcatttctgaaggttggtcttgagataagattgaaaatgacagttgttgattttctgaggtaatatacccaaataaaatatatgtatgtgtacatgaatctaaactgtcttcttctgttcctcattttgctttacttaaataatctttcatattttttaagtgttttgcccatgtgcttgggtagccttgaagtcaccagaataactaggactcaaattcagaccaaaccaggactagctttttgtgccatgagttagccatggtcctggacccagcaaaaagaatgattatgatggtcagagtaagatgagcaattgcaacataatattctctaatattgtatactgtaaatttattcagctgccctcgtttactcacagtttgcttatttgccaccataagaaatggtacaataaaaattcatgtaatcaccaaaaaaaaaaaaaaaa

SEQ ID NO: 284510 - DNA, 1000 bp, Homo Sapiens
agtgaggacactgactgccaaggaggagcttctgcagaccctgcggacccacctgatcctccacatggcccgagcccacggctactccaaggtcatgactggggacagctgcacacgcttggctatcaagctcatgaccaacctggcgctgggtcgaggggccttcctggcctgggatacgggcttctcggatgagcggcacggggacgtggtggtggtgcggcccatgcgggaccacaccctgaaggaggtcgctttctacaaccgcctgttctccgttccttctgtcttcacaccagccgtcgacaccaaggcccctgaaaaggccagcatccaccggctgatggaggccttcatcctcaggctgcagacccagttcccctccactgtcagcactgtgtacaggacaagtgagaagctggtgaagggcccccgggatggccctgctgctggcgactccggcccccgctgcctcctctgcatgtgtgccctggacgtcgacgccgctgacagtgccacggcttttggggctcagacctcctcgcgtctctcccagatgcagtcacccatccccctgactgagacccggacacccccggggccctgctgttctccaggggtgggctgggcccagcgctgtggccagggggcctgcaggagggaggacccccaagcctgcattgaggagcagctgtgctacagctgccgcgtgaacatgaaggacttgccctcactggaccccctgccgccgtacatcctggctgaggcccagctccgcacacagagggcctggggcttgcaggagatccgggactgtctgattgaggacagtgacgacgaggcgggccagagctgagcgtgaggacgtgcttgccgggacagcaggcagtggccacctggtacaccacactggagccggaaggcaaggacgggggactggcctctgattgtccatttgtataaataaaacattttttaattaaaaaaaaaaaaaaaaaaa

SEQ ID NO: 284511 - DNA, 1000 bp, Homo Sapiens
tatttcaatgtattttttattttagtcctatttgtattattttatgcatttaaaaacacagtcctgagagggatggaccagactgccacagcagctcatagcacaaaaaaaggttaagaagtcctagttgactttgtatatatataaagaaatctattacaataaaaatataacataatctattcatctatttatatgcaaacataaaaatgtaaatattgaaacaagattgcttcaatatgcttattgttttcaaaccaacaaactctcttaaggttcaatatgtaataaaaaacataacacaaataattattctatatgaatattatggttcataaattataatgtataatctatacattataatgtaatatataaactaaaatttatggcacaaaagataaatatggctttgaaattaaagatattccactcaacagacaatatttcatatttgatattacaatcatttattttatgtcctattataataaaaggtgaggactccttgtaaaaaaggaaatgttccacagagtcaatctaatatatcagatattggagattctatcttggtttctcttcctttacttagcctataaaactagttaaaaatggaatttcttttagcaattcagtttagtacaggagtgacattaactaatgacaataaattaaacaaagcctacattagttcaatttaagcctattcaacagaaatatagaaatatagtagctaaaaaaatactctggggaaggtaccacaaacattatctaccagggaacatagcataaattagtctgaaatttcctgagagtgactttgtcttagaacttaggtggtagtcatgaagagataatgtttttaggcagttaaaatacttctagaactccatctattttacctgtggtccactttcctacattgaaccaatgccttgggcttctctaattactatacattgtgctcatatgaataaaagaaattttaaaagaaaaaaaa

SEQ ID NO: 284512 - DNA, 1000 bp, Homo Sapiens; identical to SEQ ID NO: 220798

SEQ ID NO: 284513 - DNA, 1000 bp, Homo Sapiens
attaattccaggacgcctgtggatacagaaatccacgtgtactcaagtcttgttttcagtggatatgaaaagtcggccctccatatctgcaggttttacacttggcgaatgctgtatttttgattcatgttggattaaggatctggaacccctgatacagactgtatttattgaaaaaaaagtctgcctatgagtagactcacatgttaaaacccgtgttgttcaagggtcaaccataactgcaggcagaacatctgggcaggaagctcctgcaggaagacctgtaaactcaggtctgtggaacggcgatgatcttcttcccttgcttccagaattattgctgtgagatcaggtgcactggctacgaccttactctttgtgcagaacttatttctggtctggtttaagtgaacgttattctttctgtgcagtcctgtggttacatcaaaggttaaatttcatatagcatgtctgttatatcagacttctctgatggcctgtccagagcaaacattttaaaatattggtcctattctgtcttataacagtctgctctggtgatttttgtctcatcaattggattatgacactgtcagccactgttagtgttattctcaaattcagtcttccattcatctctccttcccttccctggcagacagacttctgcagccactgggactgttggggtgaggaaaggcaagaaccgatgtttcattctctccctcccttcttcctccctcttttttgttggttgtggggtgggctacatcttcttacccaaacaaccaggagcatttgttggcaagtttattgtgcccagtgccgatgtctggacaattaattccctaggtcagtggctttcacagtttgtgatggtgactccaggaaggaaactcaccatgaccctgtatatacatagaacaaaaatgcagcccactctgatattgtatttgttctattctagttcattaaaagtgaatgttggtcttcatccttt

SEQ ID NO: 284514 - DNA, 1000 bp, Homo Sapiens
aggattatacttgaatgatggataagggggtacacagaccaagtccctataaacaaggaccttccagtccaggggaatgactgtgcaaggtagtatctaagcacctgagaagcagtagtgctttgtcgccggctcacggactcccatgcagccttcctcaccaatttggcacaggcagcagtctccctcccaggctctccccatctcccctgctttggtgttgagtgatgagctgagtcagggatagggagtcccctggtgctaaccgtgaacgtagagacttgttctgaggacatccacacaatagtaggaatctccccaaccaatctgtgaatttcatgggggccaaaactgtattttgctcactgctaagtccccagctcaccttaggggctcagcaggtccctgttgaagggaggaaggggaggagagaaggagaaaggcaagcaggcagacagctatgggtctagcatctgcagtgtgttagcgttggggaaacagaagaactagaaggatggatatgctgatgactcctagattggaactccggtccggttctttctctggagctctagatactcactttttgtgccccccaaatgaatgcattttcttcccactaacccttgatttttcttcattcatggtgaaaaatatcaccctcaatctagtgatccaagtcagaaaactgggagttatcgctactctgtttcatagaaatccccatccatcaagaaatatgaaagttaaggctgtaatatgaaatattacagtcactcactcctgtaatcccaacactttgggaggctgaggcgggaggatcacttgagcccaggagttcaagaccagcctgagcaaccaggggagaccttgtttctacaaaagaatttaaaaattagctgggcgtggtggcatatgcctgtggtcccagctactcagaaggcaagtggtgatggcgccactgcactcctacctcagcaacagagtaagactctgtccc

SEQ ID NO: 284515 - DNA, 691 bp, Homo Sapiens
ggggactcggggggcggccccttcctcgggaggcgcccaggtggcacgtcggtgcctcagctcccggggtctctgggctccgcgctgcccacggggtgccgaggggcctctggagggggcgggttctctcgagccagaaagtccggagccgcccaggaattttggctcgaactgagtgcatttcctctcgggccggccgggtgcgatccgggaagggcggctgcgggcagacgcggcgctgcgctcggccaggccggcaccatgcggcccctgctctgcgcgctgaccggactggccctgctccgcgccgcgggctctttggccgctgccgaacccttcagccctccgcgaggagactcagctcagagcacagcgtgtgacagacacatggctgtgcaacgccgtctagatgtcatggaggagatggtagagaagaccgtggatcacctggggacagaggtgaaaggcctgctgggcctgctggaggagctggcctggaacctgcccccgggacccttcagccccgctcccgaccttctcggagatggcttctgagccctggagctggagcccagcagttggaggtggtgcacctgccaggcagcgcccacagaaccagccctgtcctctcgacttccttccttagcttcatgtgaaataaaagctattctggccaaaaaaaaaaaaaaaa

SEQ ID NO: 284516 - DNA, 1000 bp, Homo Sapiens; identical to SEQ ID NO: 220801

SEQ ID NO: 284517 - DNA, 857 bp, Homo Sapiens; identical to SEQ ID NO: 220802

SEQ ID NO: 284518 - DNA, 1000 bp, Homo Sapiens; identical to SEQ ID NO: 220803

SEQ ID NO: 284519 - DNA, 1000 bp, Homo Sapiens; identical to SEQ ID NO: 115384

SEQ ID NO: 284520 - DNA, 1000 bp, Homo Sapiens
gtctcattgaccaggaacgggacaggcgtcgagccctggggctgtgggcaggctgggctattccctgggccagggaatgggagccagggctggagcctggctcaagtctcttgtccctggctcaggtctctcagcctcccgggccttcgtgcccatcttaaggctgaagctgagctgccacccaagctgccgctgcaggaggaggagccagaggacagccagagtgagccctcaccatctgccaaacagcacaaaaaagccaagaagcgcaagagcctgggggctcccgtgctccacgctgtggccagcatggtgtctgcacccttagagacattgaggctggagcgtgagtggcagtccctggactgttccttctccccctgcctgtggggcccgacatggcacaacctggcgctctagcctctgccctgccctgggtctttgcaggaaaggcccagcgcctgcggccgctgtaccagtacgtcaactattgcaaccctgagctgaaccaggcagggaagggggacggggaggctgaggtggaggcagaggcagagctggccccggttcccgaggagggaggtgtggagcaactgcaggccttgctgcccttggcaggtgagctgggcccaggcctcgctttgccctgtcccagtccactagtgacccccacccatgccctggctcccctcggagaggaggctggagaggagcctgggggcttgcccagcttgggggtgagtgaccacaaggccgaggtggataagtcaacccaggtggacatcgacaagatgctgagtgtctgcactgctccacttgtccccccgctctctcctcagtacaagtgactgtcccgccccactggtggctcccctccttccacgcctgaatttggcttcaggcttcctgtgggcctaggccctctggtggcgggggcaaatttggcacctgcccccacttgggactttggtcttgctgaaaataaatatttttctttttc

SEQ ID NO: 284521 - DNA, 641 bp, Homo Sapiens
gcttgctgatgggtccgggtggggcgcgcgtggactatgggcccgggaggtcccttactgtccccgagccgcgggttcctcttgtgcaaaacggggtggcactccaatcgcctgcttggtgattgtggcccccacacacctgtttctacagcgcttagcttcatcgcagtaggaatggcagccccatctatgaaggaaagacaggtctgctggggggcccgggatgagtactggaagtgtttagatgagaacttagaggatgcttctcaatgcaagaagttaagaagctctttcgaatcaagttgtccccaacagtggataaaatattttgataaaagaagagactacttaaaattcaaagaaaaatttgaagcaggacaatttgagccttcagaaacaactgcaaaatcctaggctgttcataaagattgaaagtattctttctggacattgaaaaagctccactgactatggaacagtaatagtttgaatcatagtgaacatcaatacttgttccctatatacgacacttgataattaagatgatcaagaaccagaagatctgtgaagaaatgaaataaaatggtatttagtaagaaatctctattttaagaaaaaaagtaaaacctgttataaacaca

SEQ ID NO: 284522 - DNA, 1000 bp, Homo Sapiens
tgtgcaagccaggctggctctcgtgcatgactgtctatgggtgtggaatgtacgtcagagcctgtgtagagatacaggcagatgggctaactcctcatgtctagtcatgctggcagggctttccccacatccatgcttttgaaattagtgtgagtgtacaggtttgtgtgtgcatgtatacgtgtgtgtgcacaggaagcatttccacttgagggaaatcctgccccatcatgcctacctccacaatgaaatcactcgttttttggtgtttgctcgcctaactgacttgaaccccattttatttatttagtttttttctcatggcaaagtagaatacgttggaaggtgtagggaaatcctgctggaactggtgtttcagagtaaatcttttttctctccggaatttcttgttttgctattaacaaattatatttacctgattatgaaaaattaattttccttatacattttccccttacaacactagaaaagagcaccttgttacagttccggcctctcagtatgtgggctaaatgccagcattagggaattcattaatcatgagactaggctacaaactaggcttgcttgttttggggtggttttgttgttgttgttgttgttgttgttgttgtttccaaatctctactgccttttgaggaaatgtaaatctgagacatggaaataagtgtttgggagaatggaaaagagctgaatcaggtaggcatgaaaacttttacattctctatcctctttagatgttgaaataggccagacaggttaactgatgttttttaaaattgtcttttatttctggaaagatctgacttattcctagcttttttcataccctttattattagtgccttaaaataaagctggccaggtgcagtgccacacacctgtaataccagcattttggaaggctgaggcaggaggatcagttgagcccaggaagttcaagaccaactctggcaacacagcgagaccctgtcccttc

SEQ ID NO: 284523 - DNA, 1000 bp, Homo Sapiens
aattcccatcgatgttgccatcagtcatgagtctgccttttcttcgtgggacagtagcaaaaccaatttggccaagtgtgcttggatgatctctaagatggaatcagggtctctcactttcagcactattgacatttggggctggatcattattctgtcttagtgggagttgtccggggcattgtaggatgcttagcagcatcgctggcctctacccattagctgccagtagcaccacctcctccagccgcaaccaccaaaattgtctccagacatggccacatgttctctggggggcaaaatcacccccggttgagaagccctgaagtaaagacataatacgcagatcacatgtaagtaagagagcctaagggccacacaggggatgctgtacccatgacaaagacagagtcttaaagaggttaaagaggtggagaaagagaaaagaaatgaagtcccagctgccgagagcaacagatgctgactagatgttgttgacagtcatctttaaactgagttaaaagatgctgagaagccatcagctcccatcctgctctccagggacaacgctgctgaaaaaggcctggagatcaacaaagccccaaacacaggtgcactgagcaaagaaaccagagattgagacaaaaaagacattccctcaaagactactcatttccaagaggggagaaaaagtggagtcatgaaaaacagttgaggctgggtagagtgactcgcacctgtaatcccagcactttgggattactcccaggctgaggtgggaagattgcttgaactcaggagttcaagaccagcctgggcaaaatagcaagaccttgcctctagaaaaagggaaaaaattagccaggtgtggtgatacatgcctgtggtctcagctactcgggaggctgaggtgggaggatcgcttgaacccaggaggtagaggctgcagtgagccgggatcgcaccactgcactccagcctgggttacagatcctgtctc

SEQ ID NO: 284524 - DNA, 1000 bp, Homo Sapiens
ctctggggtgaaaacctccccagaccctagacagggtgaggaggaaaccagagttggcaagaagctcaaaaaacacaagaaggaaaaaaagggggcccaggaccccacagccttctcggtccaggacccttggttctgtgaggccagggaggccagggatgttggggacacttgctcagtggggaagaaggatgaggaacaggcagccttggggcagaaacggaagcggaagagccccagagaacacaatgggaaggtgaagaagaaaaaaaaaatccaccaggagggagatgccctcccaggccactccaagccctccaggtccatggagagcagccctaggaaaggaagtaaaaagaagccagtcaaagttgaggctccggaatacatccccataagtgatgaccctaaggcctccgcaaagaaaaagatgaagtccaaaaagaaggtagagcagccagtcatcgaggagccagctctgaaaaggaagaaaaagaagaagaggaaagagagtggggtagcaggagacccttggaaggaggaaacagacacggacttagaggtggtgttggaaaaaaaaggcaacatggatgaggcgcacatagaccaggtgaggcgaaaggccttgcaagaagagatcgatcgcgagtcaggcaaaacggaagcttctgaaaccaggaagtggacgggaacccagtttggccagtgggatactgctggttttgagaacgaggaccaaaaactgaaatttctcagacttatgggtggcttcaaaaacctgtccccttcgttcagccgccccgccagcacgattgcaaggcccaacatggccctcggcaagaaggcggctgacagcctgcagcagaatctgcagcgggactacgaccgggccatgagctggaagtacagccggggagccggcctcggcttctccaccgcccccaacaagatcttttacattgacaggaacgcttccaagtcagtcaagctggaagattaa

SEQ ID NO: 284525 - DNA, 1000 bp, Homo Sapiens
atgggcgtggcattcttgttttcaatgtcttctgatgatttctcatatattctggagaagacaagctctgagaattcagatgctttttctggtggctatgtctggggggccatctcacttagaagtcacaacactcattggcagtgatcacatcatttcaatttgggcttcccaaagtatggtcacccagggtatgaaggtgagatcaatgctacctaccattttgtgtctttaaggggtctttagaaagggctaatcatctgtcactgctcactgagacatgtacattccagcatcatcacagagttatctccttccttccttccttccttccttccttccttccttctgtctctccctccctccctcccttcctcccttctttccttctttctttcctctcttccttcttgccttctttcctgccttcctgcctatcttttctctctctctctctctgcaaattaagttcttattaaaaactgccaatcattgacgatatataatgatgagatcctgaacaaaagaggcaaagaaatgctcctacttgaaaaatacacattccctatagactgcctcctgtttagtccaacttagatcactcagatccttcctgggatcaaatatatttttaaacctaagacaaagcgaagcaggtgtcacttgggtgatagggaaaaaagcttgtatttcctggttaatgtttagcttttgtaatgctatttaaacacacctaaggtgcctttccctcatctcaggtgctttctctgtaaagtttcactcccacctttcttttctctgcatggccgtccagtcttgcccatctacatccagagctgttaactagtagtgtcattacctgtgaaaaacatgtagaagcttccttgaaccacccagaaatccactcaaatttggggattgtcattccttttgtgaataattaatacaattcagttgttttttaaatattctaataaaaaaggaaattttctcaaaaaaa

SEQ ID NO: 284526 - DNA, 1000 bp, Homo Sapiens
ctggaaacagtttgaacagaattcaaagtatgagcaaggataccaaaaatcacatcctactatacagttgttttggaaggctttccacaaactaaccttggatgaaaagaaaaaattcctctttttccttacaggacgtgataggctgcatgcaagaggcatacagaaaatggaaatagtatttcgctgtcctgaaactttcagtgaaagagatcacccaacatcaataacttgtcataatattctctccctccctaagtattctacaatggaaagaatggaggaagcacttcaagtagccatcaacaacaacagaggatttgtctcacccatgctcacacagtcataatcacctctgagagactcagggtgggctttctcacacttggatccttctgttcttccttacacctaaataatacaagagattaatgaatagtggttagaagtagttgagggagagattgggggaatggggagatgatgatgatggtcaaagggtgcaaaatctcacacaagactgaggcaggagaatagggtacagagatagggatctaaggatgacttggacacactccctggcactgaagagtctgaacactggcctgtgattggtccattccaggaccttcatttgcataaggtatcaaaccacatcagcctctgattggccatgggccagacctgcactctggccaatgattggttcattccaggacattcatttgcataaggagtcaaaccacaccagtcttggattggctgtgagccaattcacctcagtctctaattggctgtgagtcagtctttcatttacatagggtgtaaccatcaagaaacctctacagggtacttaagccccagaagattttgctaccagggctcttgagccacttgctctagcccactcccaccctgtggaatgtactttcacttttgctgcttcactgccttgtgctccaataaatccactccttcaccacccaaaaaaaaaaaaaaa

SEQ ID NO: 284527 - DNA, 1000 bp, Homo Sapiens
tgcaggagtctgacgcctccgctccccatgctgcagaggcagggagccctgaaagcccagagagcacggagataactgaggaggagctcctggataatttccatctgatggccccttctgaagaggatcattccatcctttgggacgccatcagtacctatgatggctcgaaggctctccatgtcaccaacatcaacaaggcacaggagacatcaggagaagaaatttccaaattttacctgccaaactgcaacaagaatggattttatcacagcagacagtgtgagacatccatggatggagaggcgggactctgctggtgcgtctacccttggaatgggaagaggatccctgggtctccagagatcaggggagaccccaactgccagatatattttaatgtacaaaactgaaaccagatgaaataatgttctgtcacgtgaaatatttaagtatatagtatatttatactctagaacatgcacatttatatatatatgtatatgtatatatatatagtaactactttttatactccatacataacttgatatagaaagctgtttatttattcactgtaagtttattttttctacacagtaaaaacttgtactatgttaataacttgtcctatgtcaatttgtatatcatgaaacacttctcatcatattgtatgtaagtaattgcatttctgctcttccaaagctcctgcgtctgtttttaaagagcatggaaaaatactgcctagaaaatgcaaaatgaaataagagagagtagtttttcagctagtttgaaggaggacggttaacttgtatattccaccattcacatttgatgtacatgtgtagggaaagttaaaagtgttgattacataatcaaagctacctgtggtgatgttgccacctgttaaaatgtacactggatatgttgttaaacacgtgtctataatggaaacatttacaataaatattctgcatggaaatactgttaaaaaaaaaaa

SEQ ID NO: 284528 - DNA, 1000 bp, Homo Sapiens
tctggatccataccccatacctactgaattagaaactctaggggatgaatagtggtgttctctgttgctaagtgacagtgggcccagccacctattttaacaagccctcccagtgattgtgatacatactaaagtttgagaaccattgtactaggccattccagctgaatctcaaacagaaggcagtaatgagagcctacaaatgggagggacctaagtgcctacctactcgctaatcgcaggtgcaaacacacaaggagtttggtgggcttaaggtcagaggagtgtgtagggagggatgtatgtggaaggtaagattcagggcaagctaaaaatccgatactgcaacgttttccaaaatcccagaaggcaaactgtgcatgttctaccctgaaccacccaagcaacactttctaccttgccttatttttaattggattcactgtccaaaatgcagaggtttgctttgcttttttttcagaagttccaaacagcaactttgagagcagtggggtgcttggcagctgttctgtgttttccaggaatccaactgagcattgaaatctctcatttgccgacttatttttataggaagccaattaaaaaaaaaaaaagttttcttatagtattggaactacttctaattttaaaatgacttttttgatgtattttttgttaaatactatgtagtgtaatgtataattgctcttgtttattgcttttacaatcatatttattaaacagataatgtctctaaagtctttgcctcaggtatttttttttttaatcctaaacccttggtgttcattctaaatatagaagtgttgcatgtataggatttcataaaggctaattgcataagaaagagtaaacaccacaggcttgaggtttttggctgttttttactaacaaggcagaatgtatgtactacctgaattctacctgcatttcaattaactatacaatgtctgtttattaaattactttgatttaaaaatta

SEQ ID NO: 284529 - DNA, 1000 bp, Homo Sapiens; identical to SEQ ID NO: 115777

SEQ ID NO: 284530 - DNA, 1000 bp, Homo Sapiens
aaaaaatatgtatctaagaatgttctagggcactctgggaacctataaaggcaggtatttcgggccctcctcttcaggaatcttcctgaagacatggcccagtcgaaggcccaggatggcttttgctgcggccccgtggggtaggagggacagagagacagggagagtcagcctccacattcagaggcatcacaagtaatggcacaattcttcggatgactgcagaaaatagtgttttgtagttcaacaactcaagacgaagcttatttctgaggataagctctttaaaggcaaagctttattttcatctctcatcttttgtcctccttagcacaatgtaaaaaagaatagtaatatcagaacaggaaggaggaatggcttgctggggagcccatccaggacactgggagcacatagagattcacccatgtttgttgaacttagagtcattctcatgcttttctttataattcacacatatatgcagagaagatatgttcttgttaacattgtatacaacatagccccaaatatagtaagatctatactagataatcctagatgaaatgttagagatgctatatgatacaactgtggccatgactgaggaaaggagctcacgcccagagactgggctgctctcccggaggccaaacccaagaaggtctggcaaagtcaggctcagggagactctgccctgctgcagacctcggtgtggacacacgctgcatagagctctccttgaaaacagaggggtctcaagacattctgcctacctattagcttttctttatttttttaactttttggggggaaaagtatttttgagaagtttgtcttgcaatgtatttataaatagtaaataaagtttttaccattaaaaaaatatctttccctttgttattgaccatctctgggctttgtatcactaattattttattttattatataataattattttattataataaaatcctgaaaggggaaaataaaaaaaa

SEQ ID NO: 284531 - DNA, 1000 bp, Homo Sapiens
aatctcttgattataaatgtttggaaaggttctaaggggacctacagacagacatacatagacatttcaaaattaatagcttttgattagtataatatttcttaatttggataataaaaattgtagctttttattaagccaggaaacatgaagcataatttgtttaaaattctctttggtcattgagggaccaaaaaaggacgtaaaatttacagtcaatctatgagggtttttttccctccataagtttaactttaaaactgtatttaaggaatcaaatcttacaaaatcctggaagattttggtaatgatgttgataatttcagggaaattaatcaagtacctatattgatttaaaagtgtattttattcagtagtttgaggatcttgccatggaagatactagcccagcctagcagaaaagtgcaatatgtatagcatactttgacattttaaacatgatagtccataaccattttgaaatgctgggcaaactacatgaagttatttataattaattcacagctaatcaggcattttgaaagcttaattggattcaaaaaccataatgttggaatttggtaaaattttaatgttgatttttactgtgaaaaggtttttataagatatacacaccctagtttaatgttgtgtcttggtgtggatttacagatttactacaggtattctgaaccaggaacacaatcaggtttcaggccagtttgatactggctgtccttaattctaatatgagagtaggacatcatactaaatgttatgtcagtgggactgtactgtctgtggaacttagcaaattaatcattttcttcagacttgaaggagagtgataaataaaatttggagtcataggatattgatgcacaatttaaggattaaacatttttaatcaattgtggatgatggcttattaaatgttgacttcctagtataaaactgcaagaataaaagtaacttctccagctgtaaaaaaaaaaaaaaa

SEQ ID NO: 284532 - DNA, 1000 bp, Homo Sapiens; identical to SEQ ID NO: 220805

SEQ ID NO: 284533 - DNA, 847 bp, Homo Sapiens; identical to SEQ ID NO: 25072

SEQ ID NO: 284534 - DNA, 1000 bp, Homo Sapiens
tggagctgtccgcactgctgcagccccgggctggccggggcccctgcgccaccctcagcggccgctgcatcacccccgccaccgccctccttcttctctcccatcgcctccgcgcgcagtgccgccctatgcaggccacagcggccgaggcagggagcccggggctcgggcgcctaggcaaggaacccccgagccgggagagctggaccgggagcgcccctcggcgctgcccttgccaggacgccagtagagctggcagcggagtctgccgctcccgccctcagagccgcggcggcgggagcagaaagccgcggcggcaaaaagccgcggcgacgggggcaaaaagccgcggcggcgcaggcaaaaagcttaggcggcgggggcaaaaagccgcggcggcgcaggcaaaaagcttaggcggcgggggcaaaaagccgcggcggcaaaaatgcgcggcggcggggcaaaaagccgcggcggaagaaagccgccggggcgggggcaaaaagccgcggcgggggggacaaaaagcagtgggagctggggcaaaaaaaccacaaaaagccgcggcggcggggaccaaaacgccgcggcggcggaggcaaaaagctgcaaaagccgcggtgtgggggcagaaagccgcagcgggagaaagtctcactccaaattcccttgcttcagtaagcttctctaggccaatgttccttcggcattacccattttcttcctgtgaatgcaaatcacataaacatggaagtacatttgaccattttaattgtttaacattccatgtcacacgaccttccacaatagaatcaatgtattaaaatgtgttaacgaccacacattttacacaaatgccatgaatccttaaggtgttccaatttataaaatatgtctgcaaatcatactttatgatgctttgtattctgtcggtaattggatgtcatatatttaaattctattaaactgcttattaaaatgaaaaaaaaaaaaaaaa

SEQ ID NO: 284535 - DNA, 1000 bp, Homo Sapiens
tcactgcagccttgacctcctgggctcaagcgatcctcctatttcagcctcccccatagttgggaccacaggcatgcaccaccatgcccagctaattgtttatttatttattttttttttgtagagatagggtttccctgtgttgcccaggctggtctcaaactcctgggctcaagggatcctcccgcctcagcctcccaaagtgctgggattatgcccagcccctagagatacttctatagagatattgactctaaaggattgacctatggcttttggtatttagtatctctcactactccccccagctaagtaaggatttaaggaatttaggactccctggagttaacagatgaagagatgggggcataattacttcacccaaagtctagaagccttggcctctctcttggccaagatggaggattgaggagggacatggaccttcaggactaaccctctatggattggccctcccagaagcgtttgggctggtagacccaccccttcctacctgctgagtgatgtcatttcctgccaggatgggtagccctttgtacgggtccttggatggtagtaggtcatataggggcatctgagcccctgctgctaagtgagatcacattatttatcgtccataccattacttcttgtgaacagtaacatgtcactcctcctggcaggaaagtttctcattgtcagatgtttgtgcttcttttcaggtcttactttttaaatagagtgttctcattttatcctaggggatctcacttcctctgtggctccatccctgcatccctgtctgggccagcactcctgactgcttttagggagagaagctttcaggggcctccatttatttctctcaagtctgtttggctcaccctgccatggtcccctgtcttaccctgtccctgtgttgcccctattcctgtattccatttttttgttttgttttgttgttttttttgagatagggtgacagagcaagactccgttt

SEQ ID NO: 284536 - DNA, 1000 bp, Homo Sapiens
tgtatgatttataaattatttatagtagggtttgtgtttttcaaactttatatcaatggtatcacactgtgtattattattctgcaacctgccttttctattcagcatgttttgcagattgatccatatgaatatttgtagttttaatttagtttattagttttaactgctaaatagtattccatagtatgaatataccataatttatttgcatgtactataattttttggtccattctcttgttaatggaattttaggttgcttcccatttctttgctacataaattatgctgcaatgaaccctctagtacaggagtccccaaaccccaggaactgggccacacagcaggaggtgagcagagggaaagcaagcattgctgcctgagctctgcctcctgtcgaatcagcagcagcatttgattctcataggagcacaaaccctactgtgaactgcgcatgcaagggatctaagtgagaatctaatgcctgatgatctgagatgaaacagttttatcccaaaaccatccttccgctgtctcctgtccatggaaaaattgtcttccatgaaaccagtccctgatgccaaaaaggttgggaactactgctctagtatatatctatctccctgtgtacacagacaggtgtttctctaggctatatttctagatataaccagccttttcatccagcattaagtactggtcaaaggcaaggaactggctgggtgtggtggctcccgcctgtgatcccagcactttgggaggccgaggtgggtggatcgcttggggtcaggagtttgagactggcctggccaacgtggtggagccctgtttctagtagaaatgcagagactggctgggcatggtgacgcatgcctgtaatctcagctactcagaggctgaggcggaggaattgcttgggccctggaggtggaggttgcagtgggcctgggttgtgccactgcactccagcctgggcaacagagcgaaatccgtctcc

SEQ ID NO: 284537 - DNA, 1000 bp, Homo Sapiens
cctgcagagtacaagtgagttagggagtgagaagggacactaagcctcagacttaagagaaattccaaaggttccttggaagtcatggagctgttgcacaagtaattgtctgacattgtccattcctatctggtaacaattgattaatggtgggaagaacaaacagggctcttcaccatttcttccttccttcattcatttcacaagaaatttattgaacatctattacatatacagtgctctgtaggtaccacaggtgatctaaatgcataaatatccatatctactctatggaaatttacaatctagtgagagaaattggatttacaaaaactgcaaagctagacaacaatacagaagatattatgtgatactgtgccccctaaaagaataagtaaccttcttgtgagttcatgataatgaaaaatttcaatcagtaagatgtaaggaggaaaaaatgcactgtgacttgaaggatgaggaaggagttggtaagcaaaggggtgagtggagcaggaaggatatatcagatcagaagactgaaatatgtggagacatagaaggaggagccaagaacaaaatccaggtactagctctcacacatcaggtatcactggctaaaagcaaggaggttcaggatttgttttcttttttcttctcaggttgcaaagctccagcccaacccattgctcccattgccgaggcaaacatcacatgcggtgtcagccacagtcgtagctctgggggccgctctggcaggagctctgggggcagccccagaggtagtggattctgtgctgacagggccagtggcctgtaccctgaccccactgacaagaatgcctcctacagttgtgtgaatggaaagactttcactcagcactgccagcctggtggtgtctttgataccttctgctcctgctgcagctggtgataacatttttcagatatcacctcacccagcctcagaagttgttgtgcaataaaaggttgagcatta

SEQ ID NO: 284538 - DNA, 1000 bp, Homo Sapiens
gccaggggacgactctctgacctctattcctaggctttggggcttcactggagatagggatggggtctctagctgcagcaggctcaaggctgtcaggacaaggtgaccatgggagtgtgacagaggaccatggaggagaaagggggacccaaaagtccttcgatcagcagtgctaaggtggggcagagccaaggaggtagtggggctggttctgaaagcttttgggggcttcatctgctctgaaggggtgggactaagagaggaggtgatgttctggttgggcccagggttttgttttaatcttaagtcttctgggcattcatgggcccagtctttttttctgtttgagagtatcattctgttgcccaggttagagtgcagtggtgcaatcttggctcactgcatgcagcctctgcctccctggttcaagtgatacttgctgataagcccagtcttaatattgagggagtaactcatccctcagaagctcttcttcttagcctttctctgacttcctgaaccccaactcttggagggcgggtgtgggtctccctcagactatggactcagctaacaccgaaccccccgcagagctcccaaaggaagagctttcccctacagcttcccactccaaactggtcctagcactaaattcagctttcccttctcccaaccagcccctgccactgtgaagctgagtgttgggaggcagtctcacatgcactggcaagacccattttcatgctgtcaatgtcaatgtcacaaactcctttccactgcagcactgccccctccccaccccacaatatgggaccctgccagtatccccctgtatcttttttttgttttttaaagacatttccaatgggagaaccagaaaaagggggaggggagggaaactttttgataacaattgtggttttattgtgtccaaccaatgcatcaataaatgaacttgaagcccaaaaaaaaaaaaaaaaaaaaaaaaaaaaaaaaaaaa

SEQ ID NO: 284539 - DNA, 774 bp, Homo Sapiens; identical to SEQ ID NO: 115387

SEQ ID NO: 284540 - DNA, 1000 bp, Homo Sapiens
aagcgtcggaggtgcagcggtggccgccatcacccaggccttggtgggcagatcagatcttccccggatccgggctcaggttctgatttatccagttgtccaggcattctgtttgcagttgccatcctttcagcagaaccaaaatgtcccattactttcccggaagttcatggtgacttctctgtgtaactatctggccattgacctctcctggcgtgacgccatcttgaacggcacttgtgtacccccagacgtctggaggaagtacgagaagtggctcagccctgacaacatccccaagaaatttaagaacagaggctaccaaccctggtctcccggcccttttaatgaagctgcctatctagaagccaaacatatgctggatgtagaaaattcacccctgatagcagatgatgaggtcatcgctcagcttcctgaggccttcctggtgagctgtgagaatgacatactccgtgatgacagcttgctctataagaagcgcttggaggaccagggggtccgcgtgacatggtaccacctgtatgatggttttcacggatccattatcttttttgataagaaggctctctctttcccatgttccctgaagattgtgaatgctgtagtcagttatataaagggcatatgatagtaaccctggggccccgaggaggaaggggcaagtatggactctaccagaaaccgggtgctttagtgagttctattttattgactaaagaggtgctacatcaatgcttggggcagctgggaagggtgagaagtaagctaacagtcttgcttagtattcaagaaaatccaaactgtgtctgtttccttccagcactaacaatgtccattgctggatctagcgacattctctaacattcccatttaggtgaaataaatatcaaaaggagaaaaaaatgcctttaaaaatttctcaaagccccaacatataagatctgtgcagaataaatgccaacaactggtcataccgtca

SEQ ID NO: 284541 - DNA, 1000 bp, Homo Sapiens
agtgagaagagaggaacaggatctcctggaatctgtatctctgtgcccagggaagcatgcttttctgggaggaccccaaaagaaggcttacagtttcagcctgctttgcagtcagggcctgaggtatggtacagaaggtagtagcatgctggtattactgaacagtgctgggcctaggggctgatctggcccagatgactcagtaggcacccttaggaatcaggggttggccaccaatactgatcttctcacaggcctacacctcacagaagagctgggtttgtttcattctagtcctatgctttggacctccactcatttgggtatcacccctgttggaagaggaggatctggtgctagaaaatataagcccggggacccaggcaaggctgtgttgtgtggggaggaagaccaggtggctctctagtccctgaattaagggagcctgctgcctgtgtgcggattcccacacagcagcctgtttttagtaactaatgcctatagttttgagaacttgctgtttttaggacactgctgggcattgacaatgtggaggttatgaacaagatctccaagggctgatgggcttcatggatgagatggttcttgaactggatccatgaggatgggtgagacagggctgtgaaattagggaaagcttccggggcaggtggaacagcatgaggcttccaacctgcatcagtagaaaatgacactggccaggtgtggtgaatcacgcctgtaatcccagcactttgggaggctgaggtgggtggatcacagggtcaggagatcgagaccatcctggccggcgtggtgaaaccccgtctctactgaaaatacaagaattggctgggcgtggtggtgcacacctgtggtcccggctactcgggaggctgaggcaggagagtctgttgaacccggaaggcggaggttgcggtgggtggagattgcgccactgtactccagcctggcgacagagctagactctgtccccccc

SEQ ID NO: 284542 - DNA, 1000 bp, Homo Sapiens
gaaaggtgaggctccgggagaggaagcgcccatctctggactcccatccatccctatcctgtcctttcccccttcccagacaacaggagaacccgtgaattgtgtaaataaaattctgctttttctattctgaaaaaggacttacctaggaccatggcaaataatctctaacaatttacctggaaattaaggaattgggggtattttgttctggcaacaggaaatttacccttctgctgaaatccaagatattcagtgctctgcagaagcctctccccctcacagatctctgcggctgctgattggtaaaggaagcttgaggagggaactgcagccctaggaatctgggtgaatggggttccaagggcccctgggctgggaggagctggctatgaatgtgcatgaagacataatagctcaacctctaggattttgcatgcagagcggatcctgccttgtcactgacttcatctgggattgcttttccactccctggggcttagagaacaaagagcccggttcacaggcagagactcgggggtgctcagcagcagcccagatttaggggacatttgagggactcttggggccgcagccaaaaactgtctctcctggctacacctgcttaacttcagttcctttttctgtcaatatgtccttgcccactgcctctcggtgttgccttcataatgtcttgtgtgtgttatgtgtgtctacttgtgtagtagtgtgtgagccctcaggggcagggcttgtggctctggtgttaggttcaggggcttcagacccttctacgagctccaagctatcaatggcgcttttctctccctcttcccccaaccagggcatggagcatgtggctgtcctgaggttcttttactgatgtgccgcccttccacctcctcaagtggtgactttgtgtgccctccccctcctttgtgtattccttctcaatgctttccttggtgttaaccttaataaaaaggcgtcatctcccctc

SEQ ID NO: 284543 - DNA, 913 bp, Homo Sapiens
aatgctactctgctgaagtgagcacctggacaacaaaatgagggattttagaagtttctcttgacccaaaaggaagattgcagcccagctgtaaaggaacccatgtctgctaagtaccctattatattttcctcatagttcttgccttgatgtttttgttccactcaggtctttgttcagacttcacctcctcacagggacctctcctgggcccctctctagattggcccctctgccactccaggtcccttcctgtgctttatcctgctctccacctgatgtcacataactcttttttttttttttttgagacagagtctcactctgtctccaggctggagtgcaatggtgcgatctcggctcactgcaacctttgcctcccaggttcaagtgattctcctgcctcagcctcccaagtagctgggactacaggtgtgtgccaccacgcccagctaattttgtttgtatttttagtaaagacagggttttgccatgttggccaggctcgtcttgaactcctgacctcaagtgatccacccacctctgcctcccaaagtgctgggattacaggcgtgagccaccgcacccggccatgtggtcatataactctttatgtgccattgtctctccctagactgttggcttcctgagggcaggcactttgtctttatatctccagccccccaaacatatttgccagtcaaggaatatttgttgagtgaatgactagtgtttcccaacttggaaaagaaagactagaaatattaaagaccttgaggatcccaagaggaaaatctgatgatgtcccaaggaaagagctgtgtgcctatatttggcagcactgactgaggaactgggagggaaacatttttttttcttctgtgttaattcggtacaataaagaagaaatgcc

SEQ ID NO: 284544 - DNA, 1000 bp, Homo Sapiens
aggacgacctagagatcaaagccagtggcaacgggagaggcaccatctcgatcctgacaatgtatcacaagtccccagagtcccgggaggacaactgcaacctgtaccacctgaatgcgactctccacagtgccctagaagaaaataaaaagggaggtgagacttttcggctccggatggaaacaaggttccagaacaattgagaggccacaatgactatcatggaggtctccctgctcacgggcttctaccccaaccaggatgacctcaaacagctcacgaatgatgtggagaggtacgcctttcagtacaaaaccaagacaagtaccagcgacagcactgttgtcctctacctggaaaagctctcccatgagaagaacacggtgctgggctttcgggttcacaggatgctgcaggcggagttcctgcaggccgccctggtcaccatctacgactactacgagccttgacagtgcccatccctgcagaagcccagtggccaattgaggcaggaggagctccagacaacagcatgtgaggcaggcgtggattttgtgtacaagacaaagctggaatctgtggaggtctctgcctccaacccttacgtctattacaacacgcagctcgaagacatcattaagagtggtacggaccctgccacacccctggccatgaagaaattcgtctcccatgccacttgccatgactccctggggttgcaagaacaggaatcgtacctcatcatgggccagacgtcagacctgtggagaatcaaatctgattacagctatgttctgggcaaggagacgttcctcatcctttggccagcagatggagatgccagcaagaaagaattgcgggaccaactggaggaatttttggaatatatgcgcacccacggctgccagtcctgagcctcttctgctttcagggaggtgtcatcaggcagctctgggccactgggtttaaccccaaataaagagcacaggatatgacaccc

SEQ ID NO: 284545 - DNA, 1000 bp, Homo Sapiens; identical to SEQ ID NO: 220807

SEQ ID NO: 284546 - DNA, 1000 bp, Homo Sapiens; identical to SEQ ID NO: 115389

SEQ ID NO: 284547 - DNA, 1000 bp, Homo Sapiens
gtgaggaagtccaggaaccacagtccagctgcagccgaagccctggaagccaaagactggggcccagccagaggccacttgggcacgaagaagggcagcagcagccggagctaagaatggcctctagaaaggggccgtgccagcctctctctcaaacgtggtccgtggggatcaggtggggcccctcctggatgccccttgggggctggtgggcccagccttgtatttggacattaaaggcaaaggaaacgccagccagtcaaaccacctctgccattcttcctcttctgggagtggctggggttgaaggcagtgctcgtgttcatggccctttcactacgtctgatttgtcgcagatccaacagcatctgggatcttcctctgaaaatccctctcattatcgcaaggaattcctgcacattactcagtcctttaatttaacatggcatgacatttatatcattctaatctccaccctcactcctgatgaaaagggcgcccctggcgttcagctgaaacccacgcagatgaactccataatcaagcccctgtacaaaatccagtggccaatgatgcatttccccacagagacccatactagatttaccatcagggagacaatggcaccagtctggactggcggagcaggagcatcatcatcttagacaagcatcgcccctgtgagttctacttgattcaaaactgcctaaatccagccccaaaacatcagcctaatggctaatgtcagtgtgaccttaaatcacaaatgaaacctctgaccagagacatgccaaccccgagataacctcccctccgaccagagacactccagtcctgcaataagactctcctccacacagaaacattcctagcctgcaataagctccccttcccggaactcttaaatacccttagtctccaagagaaaaggctcctgaccgaaatcgggcagaagcccctctcaggtttattctccaaaataaacctgtcttagactgtt

SEQ ID NO: 284548 - DNA, 1000 bp, Homo Sapiens
cactgttatttattggatacaaggcagaaggggcagggtaaagaatgtcagtcacctccaatgataggtaaggtcacgtgggtcacgtgtccactggacagggggcccttccctgcctggcagcggaggcagagagggagaggagacaaagagaaagacagcttacgccattatttctgcatatcagggactattagtattttcactaattgactactgctatctggaaggcagagccaggtgtacaggatggaacatgaaggcggactaggagcgtgaccactgaagcacagcatcacagggagacaggcctccagataactgcgggcgagcctgactgatgtcaggccctccacaagaggtggaggagcagagccttctctaaactcccccggggaaagagagacccccaccctccctttcccggtctgctatgtagcaggtgttgttccttgacaccttttgctaccgctggaccatgatccgcctggtaacgggcgtcttcccagatgctggcgtcaccgctagaccaaggagccctctggtggccctgtgtgggcataacagaaggctcgcactcttgtcttctggtcacacctcactatgtcccctcagctcctatctctgtatggcctggtttttcctaggctatgattatagagcgaggattatcataatattggaataaaaagtaattgctacaaactaatgattaatgatagtcatatataatcatatctaagatctatatctggtataactattcttgttttatattttattatactggaagagctcgtgtcctctgtctcttgcctcggtgcctgggtggcttgccgcccacacacacaaaaaagataaatgtttgaggtgatgaagatcttaatttccttgatttgatcattacatgtttcatacaggtatcaaagtatcacatgtacccccaaagtatgtacaactatgatatatcataaataaatgaataaataaataataaaag

SEQ ID NO: 284549 - DNA, 1000 bp, Homo Sapiens; identical to SEQ ID NO: 220810

SEQ ID NO: 284550 - DNA, 1000 bp, Homo Sapiens
ttgatgctgcactctgctctgcctggaagcagcgggtggagctggggctgtttcgctaccgtctacgggagctacagacccaaatcctccctggtgctgtgggtttcgtggctcagctgaatgtggagcgtggtgtgcagaggaggcccccgcagaccatcaagagtgtgaggcaggcatttgaccctgtacagttcaacttcaacaagatccggcccggagaagtcctcttccgtttgcaccgggagcctgatctccctgggactctgctgcaagaagacatcctggtggtgatcaacgtcagccccctggagtggggccacgtgctgctggtgcctgagcctgcccgccagctcccccagcgcctgctgccgggtgcactgagggcagggattgaggctgtgctgctgagcttacacccgggcttccgtgtcggcttcaacagcctgggaggcttggcctcggtgaaccacctccacctgcatggctattacctggcccacagactgcccgtggagcaggcgccaagcgagcccctggaccctggaggccatttgcatctgctccaggacctcccagctcctggcttcctcttttacactcgtgggccagggactgacttggagtccttgataagcagggtatgtcgggccactgattatctgactgaccatgagattgctcataacttgtttgtcacccggggagctccgccgggaaagacatcaccttcctcagccctcataggggtccgagtaattctgtgggcccggaagtccagctttgggataaaggacggtgaagctttcaatgttgccctctgtgagctggctgggcacctccctgtcaaaacatcccaggacttcagcagcctgacagaggcagctgctgtggccctcattcaggactgtcggctgcccccatcccaggcagaagacgtacaggcagcactggtggccctgatgtcccaggaagagcaataatacttctggatgtattt

SEQ ID NO: 284551 - DNA, 1000 bp, Homo Sapiens
acctcaatgtacatcgaaaaatgcacacaggagaaagaccgtatcgttgcagagaatgtggaaaatccttcagccagaagtcatgcctcaataaacattggagaactcactttggagaatcttcccttagaagtaaaagctccaatacataaaagacagatgaacatgtgaacatggacatttattgtaaaaattgttcttaatggcaaaaaaacccccaaaaccaaagcaaacactagaatcaaagtaaatacccatcaactgggaaattgtagaaaggaaaaaactatagtgtatccattccatagaatgttaatatagccattaaggtggacaaattaaaactatgctagtggacttgagtggaattccacaatgttctcttgagtgaaaaatgcaaggtagatattaagtatgttaaatatgactccatttttgtaaatcattaacaaaatgtctctaggtgtttgtcagcaataaacggtatctatatatgtttatttgattttatgtgcatgaagaaaagtatagaagagtatgcattgacttggagggaggtgggtaatgcaggtaggttatgggggagtcaggggtgtagggaaaaggaaaaccaaaaaaagaaaaatacataaatgactgaatcacgggtgataccacaaatgtgtgagttagtaaatttggctggggatgagggagctagaattttgctaatttgtggggatgttcatggtatatattgtaaaaagggaaaatttcataataatgtatacgattctatttttaaaaaaagtaaaaactcctgtgtgtgtgtatatatgcatgtggatgtttatatgaacatagaaaagtgtagaagaatacacacgaaggtgttaacattcattggttaccttggtggagaagggtaataagttttctgaatacctttgcattgtcttgttcacatatattgcttttgtaatttgaaaaacaaaataaagggggaaaacatttcaaactg

SEQ ID NO: 284552 - DNA, 1000 bp, Homo Sapiens
gaacataggaggatcccattctgtactccttctgaaggttcatggtgccttaatgtttgtggcatggatgactactgttagcataggtgtactggttgcccggttcttcaagccagtttggtcaaaagctttcttgcttggtgaagcagcttggtttcaggtgcatcggatgctcatgttcaccacaactgtcctcacctgcattgcttttgttatgccgtttatatacaggggaggctggagtaggcatgcaggttaccacccatacctcggctgtatagtgatgactttggcagttcttcagcctcttctggcagtcttcaggccacctttacatgacccaagaaggcaaatgtttaactggactcattggagtatgggaacagctgctagaataatagcagtggcagcgatgttcctgggaatggatttaccaggactgaatcttcctgattcatggaaaacctatgcaatgaccggattcgtagcctggcatgttgggactgaggttgttctggagttgaaatattggatgatgacagaattcagatccttcagtcatttactgcagtggaaacagagggtcatgcttttaaaaaggcagtgttggcaatttatgtctgtgggaatgttacttttctcatcatatttttatctgcaatcaaccatctatgagcaagcaaagaccttggcttttgcaggccaagtgataattatcatcaaaccaaagaaacttgaagcctgtcctgactgcctggagcatatttgtgaattctcacttggaagactggggtcatgtctgtagaggaattctgaagtccagcctttagagaacaacattcaagagggtcatatagactataaattaatgtcatgccctatatgtaattctgggtcttaaaggaaagattgtacttcaggagaagtaactctcaaatatttcatgccaagattttaagaatgttggtatttaagaaaataaatagtgatttggaaaatc

SEQ ID NO: 284553 - DNA, 602 bp, Homo Sapiens
ccaagatgcaccggggagtaggtccggcctttcgggtggtcaggaagatggcggcctctggggcggagccgcaggtcctggtacaatacttggtgttacgaaaggatctatcacaagctccgttctcctggccggcgggcgcactggtagcgcaggcttgtcacgcggccaccgcggccttgcacactcaccgcgaccacccgcacacagccgcttacctccaagagctggggcgcatgcgcaaagtggtcctcgaggccccagatgagaccaccctaaaggagctggccgagaccctgcaacagaagaacattgaccacatgctgtggcttgagcaaccagagaatatcgccacttgtattgctctccggccctaccccaaggaagaagtgggccagtatttgaagaagttccgattgttcaagtaactgctgctttgatgtgtttgaatacgcaggccacccattccaaagcatcatgtgttccttgcagtgtcagcttgctcccgtctttcagttgtgacaatttcttgagggttaagcacatgttcatattaaagttgtcattaataaaaaaaaaaaaaaaaaaaaaaaaaaaaaaaa

SEQ ID NO: 284554 - DNA, 1000 bp, Homo Sapiens
gaccagctggcagccccagtccctccctgtcccccatcaccctgcctgtctctcaggtctctcagtgcccctcctgcagcccacgcccaggtctgtcaggctctgtcacctctccctccgtgcgcctctgccacctccttttgccacccccacttcctgtctctctcaggcctgtctctcctcctccaccctttctctccacctctccccataccccttgaggggtcctggagacgctgttcagaggcccccaacaacacagggcagagcacagtggggacttgggtttgggaggacaggggtcagaggggaacccatgaaggtgggtctgagagggtctctgcctggtacgcgaggcccagctgggagcccagggtgtggcgatgggaagaggcctgtgaggtgccacagagcccctcctgctgggagcatcttaatgcccccaagaggcccttctgagcccctgctcccaccactgccatcaacaaggcactttgtgcacctataacagtgggtgccgctctctctccatgtatcccttcctctagtccaaggcccctacgtaccccactgtgcctctgattcccagcctggtggggggtcccaggagtgggtgttcccctggggctcattcaaagggagccagccagtgggagtcatacactgaaaagggagggcgctcgtcatccgaaagaaccctgagaggcatccaagacaggcccaactatggcccaagggcccaatctgccctcctgttttcagagatcatgagccagtgaagaatggcttccactttttaaaataattggacaagcacaaaaaaccaactaaataatattttgtgatatttcaaatttatctgaaattcaaatttcagtgttggccagacgtagtggctcatgcctgtaataccagtactttgggaggcctaggtgggaggatggcttgggtccagaagttcgagaccagcctgggcagcatagcaagaccccatctctac

SEQ ID NO: 284555 - DNA, 1000 bp, Homo Sapiens
tggataaaatattatttggatgatggttacactgactgctcagactttaccactgcacaacctacccatgtaagaaaactgcacttctacctgttgtatttatacaaataaaaaaggagaaaaagattatttcttagtcaaattacttgtttaggggcctttaaggaaaacaactttgcatccaacagttgggctgcactgtgaaaaaaaaattattcttcaaggacacagtttatagaaggctacaacaaaagacatttaaaggctattctgctatctatattatgatggaggtctttgcaatctgtgtcataatgattaactttgagaattttactgtagtcagtgatacggtttggatctgtgtctcatcgaaactcatgtcaacttctaattcccagtgttggaaatggggcctggtgggaggtggtttgatgatggagggtggatttttcatgaacgtttagcaacatccccttggtgctgttcttgtgaaagtgagtgagttcccatgagacctggttgtttaaaacagtgcagcatctccagtcaatggaatattggagtatacatgtcaaaataaagaccagtattaccctttaggaatattcttggtgctcaaaataattttccaacaaatacaaagttccctaaacaccgtcctctgagcctcctgtttcaagtttattcccattatgtctgtcatagcaaggttcagcccaagtcccaaattcttactgccctggaaaactgagactatatttatattttatatgcaaaaaaggaggctctgataccttggcttggataaaggaacaatggaagacatttaattttcttttgttactttcctctgttactttaaaaataactcccttattatggttttccagaatttgaagaaagcatacatattcactcaacatgccacaaaaatttcataggttttgagcatgtacctgcccagatattatcttgccatattaaagtctgctaattt

SEQ ID NO: 284556 - DNA, 1000 bp, Homo Sapiens; identical to SEQ ID NO: 220812

SEQ ID NO: 284557 - DNA, 1000 bp, Homo Sapiens
cacctacctccgggtttccacagtgacagtcttggcacagagcctcttccacagctggagcgaactcgagtcagcctggaacacagcagtgcagggcgagatccatgctgagaacagccgggaccgtaagatcctgaactgctggttgaaaggcccccagcaggagctgaacctaacagcggcctacaggcacctggagtggccccggaagacccaggtgtcgctcacggctgtgtggattggtgcccagggccagcctcggggcctgcagttggaaggagagctggaggagctgaggcaagacaggacattgtaccggaaacggggggccttgctccttaggcacccgttgcacctgcccatcccgcagagcctcctcctgcaggagaccttcacggctgataggcgacaccagcgctattccctggagactagggttgtcctgaatggccgagaggaaaccctgcagaccatggtcctgggctgccaggccggacacccctacgtctgtgcaggtctgatgcatccatacgatggcaaagtcatccccaggaacacagaggggtgcctggttacttggaatcagcacacgagtctcgctctgttgtctgggctggagtctggagtgcagtgacttgatctcggctcgccgcagcctccacgtcccaggctgggcgagatggctcacgcctgtaatactagcactttgggaggctgaggcgggcggatcatttgaggtcgggagttcgggacgggcctgaccggcatggtgaaacccccatctctactaaatacaaaaaaaattaaccgggcatggtggcgggctcctgtgatcccagttgctcgggaggctgaggcaggagagtcgcttgagcctgggaggtggaggttgcggtgggccgaggtcacgccactgcactccggcccgggcgacagagcgaggctgtctctaaaataaaataaaatataaaatagaataaaataagctgtttaatgacat

SEQ ID NO: 284558 - DNA, 1000 bp, Homo Sapiens
ctatctgatggagacaccttctgagccgaaacagtgtggccatagtggctgtgtcctcagagatgaggagcccctccttccctttcacattgctctctggccttcccggacctggcttctcgcagctttgtgtgcgtgtttctcaggtgtccaggaatcccatgcgaagtgaaggctgctttggtctcctcaagtctgtccaggacaatccagcctctgccctggaactgctggatttctcagatatccaggtgaacgcagagtttgatggccttgctagctcagtgaggggaattcttccagaactctgcataaagactggcgcttgcagagtggagtataaaaaggagttgctgccagtcttcagatcagccctgccagcgtctgtccctaagtgaccttggagtgtggcttcctcatctccaatcagctgctttgacctccagggtatatacttgaaagaaatgaagacatatgtccccacaagaactcgtgcacgaatatccatagcaacattatttataatattctaagagtgaaaatgcccaccagtggataaatgcaatgtggtatatccatacagtggaatattatttggcaataaaaaggaatttgaggtgataccaatgttctaaaatgtattgtggtgatggctacgtaactgtgcatattctaaaggcaattgaattacagatgctttacatgaatgaaccgtatggtatgtgaacggcatctcaataaaactgtttcgaaaagaaggaaaaggacggacacatgctgaaaacgggtgaaactagaaaacatggcgctaagtgaaagaagccagccacaagatcacgtgtcgcatgaccgcatttatgtgaaacatccggagtacgcaaatctatacagacagaaagtagattatacattgcctaggtgcagagaaatggaagtattggaggttgacggctaaaggatgtggatttctttggggggtgataaaagtgttctaaaattg

SEQ ID NO: 284559 - DNA, 1000 bp, Homo Sapiens; identical to SEQ ID NO: 220813

SEQ ID NO: 284560 - DNA, 1000 bp, Homo Sapiens
ccaagagtgggtcgccctctggagtgtggagtcagggagaggagaaccactccttccttggatgccaactctgttgaccgccaccagcagtgcagcctgatagcaccgaactcgtcccccactccacggctagtcctgccctcaatagcaccccccacctctgtcccccaatgccgccagtagcgtatacccgatagtgccctaacctgttctcctccatgggcattgcagccccagaaagcacccataacccaccttccctgccgtgggcagtgcagccctgtacagtgctaccaactagtacccctaatgcaggcaatgacaccctggatagcgcccccaacccaccccacactgcgaaaggtgcagccctggatagcccctgtcctaccactctggtcatgctgcagtctctgtcaccgccaccaccaaccacagtgaggcaagccagtgggccgcagactctagcacccagcagccaggcatggagcagctctcgctgatggccggctcctaccactctgaccacgctgctgtctgtctctgtggccatcttctttcactacaaaggaataaaaataggtatcaataagaaaagtaattttggaaataatacaatcacatggaagttaaacactaccctcctgaataaatgactagcgggtcaatgaagatactaagacagaaattcaaaaatttcatgaaacaaagggtaatgaacacacagtataccaaaacttgttatgcagaaagcagtacaaaggcagagatttacagctataagtgcctaccatccaaacaaaagaaaaacttcaagtaaacaatacatcttaaagaactagtaaagaacaaactaaaccgaaaataagaaaataaataagatcgtagcagaaacaaaattgaaataaaaacctcacaagattaaacgaaaagttggttttctggaaagctaaacaaaattgacaaacttttaaccaggctaagtaaagagacaagattc

SEQ ID NO: 284561 - DNA, 1000 bp, Homo Sapiens
ccattgggaaggaatgattgtattttgtaatgtgagaaggatgtgagatctgaggggccagggagggaataatggcttggatgttagtcccctgaaaatctcacgttgaaatgtgtttcccaatgttggaattgtggctagtggaaggtgttggcgtcatgggggtagatccctcatcagtggcttagtaccatcttcccaataatgaatgagttttcaccctgagttcacgtgagatctggttgtttaaaagagcctagcacctccttcctctctctggctccctctctcgtcatgtgagaggtctgctcccacttcaccttcggtcatgattgtgagcttcatgagcccttaccagaaacagatgctggtgccatgcttcctgtatagtctacagaactgtgagtcaattaaacctcttttctttatgaattacccagctgcaggtattattttatagcaacgcaaaatggactaacatagtacccacatatggtatagggagacaaggatgcgtgtgaaaagttaatacgtatgcagaatagaataagaaaggctggtatactcccagtcgaagtcgcaggaaaacacactagaaataatggtgtagacaagaaaatgtcttagacttttctacaacttatgaaaaacacgagttcacaaatatgaaaagcaaagtatataaaattcagaggttaaaaaatttagacaactctagtgaacccgcagaataccaaagtcaaaagaaaagtcttaaaaggacttgaagagaaaagccagattaatctcaaattgaatggaaagcagacgttcagcagcaacaatggaagcaagaaggtaactaacatctggttctcagagaaaatgactgttaaactgaagttgtgaacaaagaaaaactatcttttaagaaaaagggtaaaataggagaaaggttattcgctgggggattttgtttaaaattgtatttcttctttaaataaaattagtggctttaaat

SEQ ID NO: 284562 - DNA, 1000 bp, Homo Sapiens
gacgggatcaatagatgctgggaatccaaaagcgggaaggaagggaggaaaggaagtgttgaaaaactatctattgggaactatggtcactgtttgggtgacgggatcaatagaagcccaaaccccagcgccacacaatattcccctgaaacagtactggccatgtgctccttaaagctaaaattaaaaacaaacaaaaaacagaaagaaaaaagtatccccaggtagctatgttgtaattttatttcatgacagcaccatcttctctttgcctgcgcctgggcctcctagtgtgctgcttacgtgatgcccacgtgccacagagttattgcccgaagtgccagtgggctgtgcaggggatgggctcttccttccagatggtctgcagcctctgggaccacgcagccaccatcccctttctttcttcttcggatgcaatttcaggagcaaagctgatctgaggggcaaggactttaaatccacagaagtgtaatgtgccatgctaaagccacaggggaagaaaagaactcattagaaactacacctgttacataccattcggttaaatgatttaagggggaaaatggtgtgaaacaaaccttcaaaaaatcatgaaacaaccttaatgttacaggcaactgaaagctaaacttccctatggctttaggacacagccttgcataagagccgtgaagaacttggggcagttgcaatttccaagctctatttttataactgcaattaacctacaatctttgcaactgattcagatgccaaacattatagttctgcttgattgggcaaattatggtacattcacactatagattattccagaatgaggttattctagctataatatataccatggaagtttgttcaagatatctgttaaatgaaaataacaaacaaattttaagctgtatttatgatataccattcatgtaaaagagcagtaaatgtaataaacctataataaaaattatgtatgtgagaaaat

SEQ ID NO: 284563 - DNA, 1000 bp, Homo Sapiens; identical to SEQ ID NO: 115390

SEQ ID NO: 284564 - DNA, 1000 bp, Homo Sapiens
atgtacttcatgaatatatacccacaaaaattttttaaaaattatgcctaagacaaaagtcatatacttcaattgttaaagaaggggagaatatcaatttagaattttatatctggtgctcttctttttcttgtgatacgtatttccattgtttattatactccatttaccaggggatcagtgttaacttcaccagtgataagccatactgataccatgtagccttgaaataatgtgatgagaagggcatttcgcctctccagtcattctacccaaaactcataactctagtccaatcatggtaaaaacatcagacaaatcctaattgagggacagtataaaaaatatctgactagtactcctcaaaactgtaaggtaatttttaaaaagaggaaaatttgcagaaactgtcgcaaccaaaggaggatactacagagacgtgacaactaaatgtaatgtgatgtcctgtatgggatcttgaaacagaaaaaaaaaattaggtaaaaactaagataaaatcggtttgctatttgtgataaatgtatcatcacaatataaaatattaataataaggaaaacgtgtgaaatatataggaactctattgactctcttcacaacttttctgtaaatataaaaagctgacaaataaaacgtttattgaaaaaattaaatggaagcaggaagattgaggaagggaatcagaactcaaagtaagatcaatgtggccaggtgcggtggctcatgtctgtaatcctagcacttttgggaggtggaggtggtcagatcgctagagcccaggagtttgagaccagtctgggcaaagtggcaaaatctcatctcgattatgtatttatatatgcatgatggtgcctgactttagtcccagctattcgggaggctgaggtagtagaatcctttgagcccaggaagtctaggctgcagtgagctgtggtcatatcactgcactccagcctgggtaacaaagcaagactctgtctc

SEQ ID NO: 284565 - DNA, 1000 bp, Homo Sapiens
ctcattctatgaggccagcatcatcctgaaaccaaaacctggcagagatacaacaacaaaagaaaacttcaggccagtatccttcatgaacatcaatgcaaaaatcctcaacaaaatgctggcaaactgaatccagcagcacatcaaaaagcttatccaccacgatcaagttggcttcctccctgggatgcaaggttggttcaacatatgcagatcaataaatgtgactcatcacataaacagaactaaagacaaaaaccacatgattatctcaatagatgcagaaaaggcttttaataaaattcaacatcgcttcatgttaaaaactctcaataaactaggtattgaaggaccatgcctcaaaataataagagccatctgtgacaaacgcacagccaacatcatactgaatggacaacagctggaagcattccccttgaaaaccggcacaagacaaggatgccctctctcaccactcctattcaacatagtattggaagttctggccagggcaatcaggcaagtgaaagaaataaagggcatccaaattggaagggaggaagtcaacctatccctgcttgcagatgacatgatcctatatctagaaaaccccgttgtctcagcccaaaggcctcttaagctgataaacaacttcagcaaagtctcagggtacagaatcaatgtgcaaaaatcactagcattcctatacaccagcaacagtaaagccgacagccaaatcagcaatgaactcccattcacaattgctacaaaaagaataaaatacctaggaatacagctaactagggaggtgaaagatctctacaaggagaactacaaaccaccgctcaaagaaatcggagatgacacacaaaaaaatggaaaaacattccaagctcatggataggaagaatcagtattaaaatgggcatactgcccaaagcaatttatagattcaatgctattcccattaaactaccattgacagtcttcacagaacgag

SEQ ID NO: 284566 - DNA, 1000 bp, Homo Sapiens
aattcacactggagagcaggtgtataaatgtaaggaatgtgggaaaacattcacttatcccagtgcctttcataaacataaaagtacccacacttcacagaaactttatgaatgtaaggaatgtgggaaagcatttgattgttttagttcctttcatagtcatgaaggggttcacactggagagaaaccctatgaatgcagaacgtggaaaagccttcagtagttctaagtacttaaaaatacatggaagaactcacactggagagaagtcctatgcagtaaagaatgagggaaagtattttattgtctcagtccccttcaaagacatgaaaggactcacatcagagaaaagttgtatgaatgtaaaaaatgtgataaagccttccattcgtccagtactgttagaaaccatgaaagaagtcacatttaagaaaaacacagtgatgttaggaatatggggaacctttcctttctcttccagtctttggaaggcacagggtatgacacactggtgaccttataactgtaaggagtgtggataagtatttattagtccttgtgtgttttagatacatgaaagaatttactcaaaaggaaactctatgaatgtaaagaatgtggtaaaacctgtgtagtttcagtttctcttgaataaagtcatttcctggtattctcaggggattggttccagcaccccttgagaatatataattttgctcaagtgctttacagaaaagtgtatttgcctataactaggcaatcctgtatactttaaatcatctctagattacttataatacctaatgcattgtaaatgctatgaagacaactgttttattgtatttagggaagtatgacaagaaaaaacatctgtacatattcagtacagacacaaccaccatacggctacctacctagtacacatcatctacaatataacattttctttttaaaaaacagttatggattggtttcattaaatgacctgcaagcgtgtgtt

SEQ ID NO: 284567 - DNA, 1000 bp, Homo Sapiens
agggttgcggggagcgtttagaaggccctgggcagccagaagaagaaaagaggacgcactctcccctagggaccagagggtccctgcgtactccccccaggcccgggacacaggttcccccagcgcccctccgcctcccagtctattcggcttgccccagcgcgctgccccacgtccccgaggccccggcccaggcccagccggcgagtcccggcctgctccactctgcacaaaacgaaacccaaatgcccaaaaagctcaggagggaaatttaacaaaaaccctgtcccccgccccacaccccctttcacttttaacaagccagctgccaagagaaaattgaaataaaaacgaaatgatagatagcggaggacactattttccaaatggtgaaatatcctctaaaaacatgttccccaaggccaacttcgcggctggtagccccttccgacgcctttgcctcccagaaaatcacaacaaagcgatcggaaattcggccacggtcccgggaagaaggagtagcagtgaggccccggaacccactgcggccgaaactgccatgctctctttaaccaaaataaaaaagataagaagaagaagtaaaaccctttaatacatcaaatatacggaattttaatctttaaagcgatacattgtctattattttagtacatgacgtaaaccttgtccccttctcagcgggtggacttaaaaattaaaaatagttaagtgttccttttaaagaacaaaataaggcaaatgaggttttggaatagaattttttctttttctttttttttttgttgttttcttccagaatacatacaaaaaaatacccattctcttcgatggtatacaccttaaaaataattgcaatttgaaatcagagctgacaaattgtgactttttttttcattttttttgtaacaaacatgcatgtaaatttgtgtttcaatcagacattaaataacgtacaatacaatcatagcaattttaaagt

SEQ ID NO: 284568 - DNA, 1000 bp, Homo Sapiens; identical to SEQ ID NO: 220817

SEQ ID NO: 284569 - DNA, 1000 bp, Homo Sapiens
agaactacgtgaagaatgcagaagcctcaggagccgatgcgatcaactggaagaaagggtatcagcaatggaagatgaaatgaatgaaatgaagcaagaagggaagtttagagaaaaaagaataaaaagaaatgagcaaagcctccaagaaatatgggactatgtgaaaagaccaaatctacgtctgattggtgtacctgaaagtgatgcggagaatggaaccaagttggaaaacactctgcaggatattatccaggagaacttccccaatctagcaaggcaggccaacgttcagattcaggaaatacagagaacgccacaaagatactcctcgagaagagcaactccaagacacataattgtcagattcaccaaagttgaaatgaaggaaaaaatgttaagggcagccagagagaaaggtcgggttaccctcaaagggaagcccatcagactaacagcggatctcttggcagaaaccctacaagccagaagagagtgggggccaatattcaacattcttaaagaaaagaattttcaacccagaatttcatatccagccaaactaagcttcataagtgaaggagaaataaaatactttacagacaagcaaatgctgaccgattttgtcaccaccaggcctgccctaaaagagctcctgaaggaagcgctaaacatggaaaggaacaaccggtaccagctgctgcaaaatcatgccaaaatgtaaagaccatcgagactaggaagaaactgcatcaactaacgagcaaaatcaccagctaacatcataatgacaggatcaaattcacacataacaatattaactttaaatgtaagtggactaaattctgcaattaaaagacacagactggcaaattggataaagagtcaagacccatcagtgtgctgtattcaggaaacccatctcacgtgcagagacacacataggctcaaaataaaaggatggaggaagatctaccaagcaaaaaaaaaaaaaaaaaaa

SEQ ID NO: 284570 - DNA, 1000 bp, Homo Sapiens; identical to SEQ ID NO: 220819

SEQ ID NO: 284571 - DNA, 1000 bp, Homo Sapiens
cagccagatgcagaaaaagctctctactccccatgctcccatctgcctcaagggagggcagaaatttatctttttttttttttgagacagagtctcactctgtcacccaggctggagtgcagtggagcgatcttggctcactgcaatttcagcctcctcggttcaagagatcctcatgcctcagatccccaagtagctgggatgacaggcatgcaccaccgcactcggctaatttttgtatttttagtagagacggggtttcgccgtgttggccaggctggtcttgaactcctgacttcctccttcaacacctgcctcggcctcccaaagtgctgggattacaggcatgagccacggtgcctggcccagaaattcatttttgtgaaggattcctcctcccctctcctgtaccagaaagaagccacaactcatcaccggagatggcaccaacctgaatagtcataacctttaacaacccttatcttccattatttcccccgtatgtatccctttccacatttgccatccctagaagctcaaaacatttttcctttgtcttgtcatgtctccacaatttttttattttttttgaaacagagtcttgctctgtcacccaggctggagtgcagtgacacgatctcgactcactgcaacctccgcctcccgggttcaagtgattctccagcctcagcctcctgagtagctgggattacaggcatgtgccaccatgcccagataatttttgtatttttagtagagatggggtttcaccatgttggtcaggcttctctcaatctcctgacctcgtgatcctcccgccttggcctcccaaagtgctgggattacagacatgagccaccatgctggccacatctccacaatttatggctctttgttaagatgttacacaggctccaaatgctaaccacctcagagagtcacatttctttgtgaatgcccacgcatatgtatataattaaatctgttcttttctcttgtt

SEQ ID NO: 284572 - DNA, 1000 bp, Homo Sapiens
ccctcaacaccctctgtgagggaagggttttatcacccattttataggggaaactgaggcacggagccaggtagaagtccagggatctttgagtcccagccccagggaactagggtggcagaaatggagctggagtcccacggtgcctggagtgggggggcccttccttccaggtggtgacctcagccaaggacgtggtggccagcagtgtcacgggtgtggtggacctggcccggaggggccggcgctggagcgtggagctgaagcgctccgtgagccatgctgtggatgttgtactggaaaaatcagaggagctggtggatcacttcctgcccatgacggaggaagagctcggtgaggacgacaccctcaaccctaacccctgagtcctgccccgtccccatcccctgtggtacagatcagagaggtctgagactcacccaaggtcacacagcagatcagcaggaaacatacaactcaaaaccaggcctgtcctccctcccggtcacttccacggcccctcaacctgcatcccgccaggagtcagaacacccagaccctaagggcatatagggcttttagacttgaggtcccaaactggtggcccccaaatgcctgtgcagcgtgttttaaatattttcattctttgcatgcatttaacaaccagattttgcattacatgtcccgattcttggcttgttttgaaaaaccagacacactgccaggcacagtggctcacgcctgtaatctcagcactttgggaggccaaggtgggcagatcatgaggtcaggagttcgagcccagcctggccaacatagtgaaatcccgtctctactaaaaatacagaaaattggccaggcgtggtggcgtgtgcctgtattcccagatgctcgggaggctgaggcaggagaatcgcttgaacctgggaggtggaggttgcaatgagctgagatcgcgctattgcactccagcccaggccacagtgcgagactccgtttc

SEQ ID NO: 284573 - DNA, 1000 bp, Homo Sapiens
taatgccaaaagtgttcaatcactatgtgtggggaagtttcctggtacaaaggaaaaaaaaacaacctaagtcagtgttagtctaccactgtacatctggtaacctcaatccctgcaaccggggcaaaatgggtttccaggtcttggcaacctttgaaattccaattccatttgagagagctttgacgaggccatatgctgatttcaccaccagcaacttcagaacccagtactggaatgccatcagccagcaggcccctgccatcatctatgacttctatctgtggctcactggaaggaaacccagctaccgaaggaagataccctcatcaacccaattttacaaatggagaaatagaagttaagggaagaatctgaagtagtctcaaaggcagtgacaggaaggatgtggagaaagctgagtgtcaaagtcagtattcaggaccggctttactgctactttgagatgaatgaagaaatcagagggaacgcagtgtgctgatgctaaagcagctgtcaccacccagctgtgtgacataggacatattctttctctgtctcacttgactaatatgatatgtcagaggagacatgattgtaattgcctaaagcaattcttgtgatcaagactcagaagcacgaacagtattgccctctgtgttagcccctttataagggaggatatcatcttcagcatgctgaattgtcatctttcttagcagtgcaaatgactaaaacttagccaatgtagagtttgtccaaatttggagctcataactcagttcttgagcaaagtgaaaagaaaacattgtgattatggggaaaatatttgatgggacttatcaaataaagataggaaaagaagaaaacccaaatattataggcagaaatgctaaaggttttaaaatatgtcaggattggaagaaggcatggataaagaacaaagttcagttaggaaagagaaacacagaaggaagagacacaataaaagtcattatgt

SEQ ID NO: 284574 - DNA, 1000 bp, Homo Sapiens
tcctgcactcgcacgcccccttctcccccaacgagttgtcccctctaaaacgcgagcggcgaccacacaacttggccgacccgatctggcttctgaagatgaggtcggctgctctgggagcggagaaggggagagagcttagtggtttcatccgaggcctggccaacctgctccttcccacgctcccgtccaggatttgagtcttggagaagcgtgagactcgagggagctcttccctggatgcaagtcggaggccagggagccccttggcacacactcgcgcctgcacatgcttgcaccctcgaagcgatctggttccttagcgctggtttcctttccagcttctttgagatcttcgaagtcccctttcccagggaggcgggcagggccgggctaagcaggatggaaggcagccctttttattgaatctgatagctactttcccaaaaaggccagaaaagccgtttcacatccccatagttatgggaattagctttttctccaagatgcccccattagccagttaaaccatcagcgggccaacagggtcaaagttagtggcttggtggttgaaagctcggagtccgaactctctgaagacatttttcccgccttgccactttctagttggtgaccttggcaagcaaggtactcagccgctgtgtacctcagttttgcggtttgtaaaatgggagttacaatagtgcaccccttgtagagtggctataggtttaagagttaatatacgcaaggtctttaggacggtgctgagcgtacagaaggccctctcttgagtggtcgcagttggctgctctcggcctcatctccgtttgtgaaaacccgtccagattccggtcctcccaggccccagctgaagtttggagagaggctttgctgaatagctgtttagtctcccccaacccccttggccctcggagctcctggaaaaagttcttaatgaagtaatgttgagagcgtccattaaaaatgcaatgctggg

SEQ ID NO: 284575 - DNA, 1000 bp, Homo Sapiens; identical to SEQ ID NO: 220820

SEQ ID NO: 284576 - DNA, 1000 bp, Homo Sapiens
cagaacctttgctgtcttgggacggatcaccgctgcaagaggggaagttgctactgtgatgaattctgccatgtggcaccagactgccacccagaccacagtgtcctctgcaaccccggtaactcacatacaggcccgattccacctacagcaaagctggatgcgatggctggcagaggcaaaccctttgcctgcactgcaggccaaagccgggatgtggcctagatggttcctaaggtccctgacaatcctgagatcttgcatcttgtctatttcaggtcaaaggtgcctacatgctccctctagctttgtttccctgatgttccttgccacctgctactcctctctgagctacttttccaggttccacagggagaggttcagctgtccgtggtagacatgagggtagagaatgaggtggttgggttccacttacctttctatcatcttgcagtatggatgtctcttgactggtaccgtgtagacttttgagggcacacaggagtctgcagagagatactggggacattgagcagcagcagtggggttgggaggcagaaatgaggacaggaacatttaccttgtgtttctctcagcttctcagatgaccaagatggtgctgcagatggtgctgaggatggagaacccaccaagccccgctaggagccacctagactggatgcagagcatggttcagcgagttctccaaaccagcctcccaggaatgccattcaccatggctgtgaggagaataaagaagagagcctgactcctctcctgaggccccttccccaccctgagccagcaggatccacggagcagaggtcatctgtccccagcttggcccactgaggccagcatggctgggcccaggatgcttgtctctcagctcccatcctgtgtacttccacattggtttaaccagaggaaaaccgaaatctacaattgtcataaacacatttaaatgtgcgtagaatcagccatacaaattgtgaaacat

SEQ ID NO: 284577 - DNA, 1000 bp, Homo Sapiens
cctgtaatcccagggcgctgggattatgggtgtgagccaccacacccagcctgcttcacaagttttaactctgttactgttgatgatgtacctcacagacccgccagtcatgccacatgtgaatcttgagtgagcaatttaagtttgagtttcttcctagaaaataataaaatgctataggaaaaacagatgtaatttccagagaaagggcagaggactttcttacatttttttgggtactcagtccaaaaagtacttgggtggttgctatccatcaagcaatgtgctagcccatttcacatatattttgctactataatagttgatacaaagttctgcatagttaaaccataggaccagaaggttatactaataataaaaatttggtttgaaaatacttggagaggccgggtgtggtggctcacgcctgtggtcccagcgctttgggaggccgaggcgggcggatcacagggtcgggagattgagaccatcctggctaacacggtgaaaccccgtctctgctgagaatgcaaaaattggccgggcgtggctgcgtgtgcctgtagtcacagctgctagggaggctgaggcaggagaatggcgtgggcccgggaggctggagtgcagtggcgggatctcggctcgctgcaacctccgcctcccgggttcaggcagttctgcctcggcctcccaggtggctgggattgcaggcgcccatcaccacgcctggctgatttttgtatttttagtagagatggatttgtccgtgttggccaggctggttgcaaactgctgacctcaggtgatctgcccgccttggcctcccggggtgctgggattacaggcgtgagtctccctctgtcgcccaggctggagcgcggtggctcgatcttggctcactgaggcaggagaattgcttgaacccaggaggcagaggttgcagtgagctgagatcgtgccgctgcgcttcagcctgggcgacagagtaagaatctgtctc

SEQ ID NO: 284578 - DNA, 1000 bp, Homo Sapiens; identical to SEQ ID NO: 220821

SEQ ID NO: 284579 - DNA, 1000 bp, Homo Sapiens
ctgctgattgctttgtggattggcaaaggctccaggaagcaatcaacctagtgccacaaaacaaagcacccagagaagccctattcctgacccttcaaaaccttcttccttctgaagggggtagaaaataaaggagaattatccctggatcaggaattgattataggagagacaagcaatgtcaaaagaattttagataattagggtaactgtggtggccagcgctgttagtgctaaaaagtttgagtcacataaaggaatagcaaaccaccaggttggctagggctgcagcatgttgtgaccacttaagagaataatgattttgtagggatacagtatccagagagcagtaaggtgactcaaataatgaaagtatgaggaagaaaggagaaaaggagaggcaactttccacattatggtggaggaatcccttggatggactctggataaaggtatagccctaacctcctagcatctctgaaatatgttttgggggctatccctgaaacttttgtcacatccgctagactttcttttcccatcttatatacatcctccaaagccaggaaaaagaatgcatctctccatgctctagagcagcagctgctgaagggagcctcataaatcctctgacagcatctttccttaaacatacaccatcacagttttcaaattcattgatgtgagatgagcacagcaatagcatcatctcccttatactatatatgatattctttattgtaaatgttttgccatagtttaacttgcagtattgatgaaagttttgtaagaaaagacaagcacatgctagtaatggtgttttataatgtgggacgagatttttcagaaaagtaactcgggcccatggaaacagtggcatggttcgtgccaaattccgaagcaatcttcctgctaaggccattggacacagaatccgagtgatgctgtacccctcaaggatttaaactaacgaaaaatcaataaataaatgtggatttgt

SEQ ID NO: 284580 - DNA, 1000 bp, Homo Sapiens; identical to SEQ ID NO: 115391

SEQ ID NO: 284581 - DNA, 1000 bp, Homo Sapiens
tggctgagagcaaggttctctcagctctcctaggacatgggggaggcccactcactctgcttcctatgacacacaggtacaactagggtccagctgtgaagcgagatattttggacagcaaatgggaagggtatttatactgaatcatgtatccactcatggtccagagatcacagctgagagtggtgcttattccttatgtctataacaacataagcaatactataatgaccactaaaacactaggcccaggtatgcagttgaacatggtctccctctgccctcccttttattctctctctcttttcttacttctttgcttgtttttatttttctctccctccctaactccctccctccatccatcctttcctcccttcctcccttgtttccttccatccattctccttccttgttttccttccttccttccttgcttttctctctctttctttcctttttgggtacataatcagaatactttttccacaaaatcatttgatataatttttctctatatgttcatgccaacattcatacagctagtttaattgttcagttctctttttcacattttggaattttgttgtattactttgttttgcttcatatctgttttgtatatataaaacatttacatgaaactgaagccaaaattataaaagatgatgcatttgaagattttagcttccattgtagatttctcgttcctcttttctccctgacactataggtaacaatatttttggcagttcacttgagctttttcactgtttgtcatagcggagtatgtattgtttctattttaatgccatatttatattttcgttctgatatttggtttttatacattttaatcaatcttatattttcccgtgtctggactgtgtgtcttacttctaaaggtgcacgtacttcataagtatgcataaagaagtccatatcatttaaaaaaaaaaaaaaaaaaaaaaaaaaaaaaaaaaaaaaaaaaaaaaaaaaa

SEQ ID NO: 284582 - DNA, 1000 bp, Homo Sapiens
ccgtgtggagcccacctgcatgtactggctccccaacatgcacggcaggagcggcggcccagcacttggcactggccacttgcagacaagaagacaagaaaatgatttgaggacagcttcaatcgcggtgtgaagaagaaagcagcaaaacgaccactgaaaacaacgccggtggcaaaatatccaaagaaagggtcccaagcggtacatcgtcatagccggaaacagtcagagccaccagccaatgatcttttcaatgctgcgaaagctgccaaaagtgacatgcagggatgtccttcctgagatccgtgctatctgcattgaggaaattgggtgttggatgcaaagctacagcacgtctttcctcaccgacagctatttaaaatatattggttggactctgcatgataagcaccgagaagtccgcgtgaagtgcgtgaaggctctgaaagggctgtacggtaaccgggacctgaccgcacgcctggagctcttcactggccgcttcaaggactggatggtttccatgatcatggacagagagtacagtgtggcagtggaggccgtcagattactgatacttatccttaagaacatggaaggggtgctgatggacgtggactgtgagagcgtctaccccattgtgtaggcctctaattgaggcctggcctctgctgtgggtgaatttctgtactggaaacttttctaccctgagtgcgagataagaacgatgggtggaagagagcaacgccagagcccaggtgcccagaggactttcttccagcttctgctgtccttctttgtggagagcaaggtgacatacacagagataactctggctgttgtgcataggacctacaagtgggctggggttggtggttcacgcctgtaagcccaacactttgggaggctgaggtgggaggatcctttgagcccaggagtttgagaccagcttgggcaacatagtgagaccctgtctctaccaaaaaaaaaaaaaaaa

SEQ ID NO: 284583 - DNA, 1000 bp, Homo Sapiens
cacggaatatgaggctcctgcaatcgatgatgggaaactggaggtggtggcaatctttggttctgtgcagatggcaatgtcccgtatcatcaacctgcatcatcatcgcattgcccagtgccatgaggtgatgataaccattgatggtgaagaaggtatcccagtgcaggtggatggggaggcctggattcagagaccaggccttatcaaaattagatacaagaacgctgcccagatgctgacaagagatcgggactttgagaactcaatgaaaatgtgggaatacaagcatactgaaattcaagctgcccctcaaccccagctggacttccaggactctcaagagagcctctctgacgaggagtatgcccagatgcagcacttagctcggcttgcagaaaacctcatcagcaaacttaatgacctgagcaagatccaccagcatgtgtctgtcctcatgggttctgtgaatgccagcgctaacatcctgaatgatatattttacggccaagacagtggcaatgagatgggtgcagcttcctgtattcccattgaaactctaagcagaaatgatgccgtagatgttacatttagtcttaaaggtctctacgatgacaccacagctttcctggatgaaaagctgctgagaagtgctgaggatgagactgcactacaaagcgccctggatgccatgaataaggagttcaaaaagctatctgagattgactggatgaatccaatctttgttccagaggaaaaatcttcggacactgacagtagaagcctcaggctgaaaattaagttccccaaattgggaaagaaaaaggtagaagaggaacgcaagcctaaatcaggccagagtgtccagagttttattggcaatttatggcaccgcagacatcgtgaagatgaagcagagggtgatgatcctctaacaccatcgagatctcaactgtagcccttgaaagctggaagaactcacaacattgagaattctact

SEQ ID NO: 284584 - DNA, 1000 bp, Homo Sapiens
ctgaagcaggagaattgctcaaacctgggaggcgaagattgcagtgagctgaaatcacaccactacactccagccaaagcaacaagagcaaaaacttcgtctcaaaaacaaaacaaaaaaagagtattcattgtgaggacaaacaatacaaatacgaagagggttgtagtacctttacttgtatcacagatacttttgtacccattttgcactagaggaaaaccatgaagcagttgctcaaatgttgttcaacaccagaaaatttatattggagaaaagcactgtaaatgtaatgcatttgtgaaaacattttttaaaaaactacagcttagaaaataccagaggcctcatactaaaatatatttttgcaagtgaagtaaatataaaaataatttaatccaaaattaagtctatataaatatcagagaattcacagtagaaatatctaaggtactgacacttcagacattgctgagtatagaatcagaatgctgagtatagaaaataatttaaaactaaagttggtaggtaaataatgtgtatataactttaaaagaagtagaatttttttgtagatgtataattacattcaaattatattttttcttgaaaaattagtttttgaaaagcaaatgatgtaattcaactcaaattcatgctcttcattcctattgtattcacatgtgaaagcatgtgattaatttttcatgcatcaaagatatgagaaatcatttctgttaggtcggtattatttatgacactttctatgaaagaataaggacattaaaatgtaagatgcatgatgaaaacctgagtgaagaggctgtttgtgtttaacttataatattgagtgatccatgaagtaggttttcagagcaatattcttctgcattatagtaagagaaaaccatttttaatcttagttaaaattaaagtgaattagtagtatatcattttactatttgtacttttatgtaataaaatgcaatgtgtttaaaaa

SEQ ID NO: 284585 - DNA, 1000 bp, Homo Sapiens; identical to SEQ ID NO: 220823

SEQ ID NO: 284586 - DNA, 1000 bp, Homo Sapiens; identical to SEQ ID NO: 220825

SEQ ID NO: 284587 - DNA, 1000 bp, Homo Sapiens; identical to SEQ ID NO: 115393

SEQ ID NO: 284588 - DNA, 1000 bp, Homo Sapiens; identical to SEQ ID NO: 220826

SEQ ID NO: 284589 - DNA, 636 bp, Homo Sapiens
ggaagagacgcagcaccgcgcatgctccttcctttccagccccggtaccggaccctgcagccgcagagatgttgatgcctaagaagaaccggattgccatttatgaactcctttttaaggagggagtcatggtggccaagaaggatgtccacatgcctaagcacccggagctggcagacaagaatgtgcccaaccttcatgtcatgaaggccatgcagtctctcaagtcccgaggctacgtgaaggaacagtttgcctggagacatttctactggtaccttaccaatgagggtatccagtatctccgtgattaccttcatctgcccccggagattgtgcctgccaccctacgccgtagccgtccagagactggcaggcctcggcctaaaggtctggagggtgagcgacctgcgagactcacaagaggggaagctgacagagatacctacagacggagtgctgtgccacctggtgccgacaagaaagccgaggctggggctgggtcagcaaccgaattccagtttagaggcggatttggtcgtggacgtggtcagccacctcagtaaaattggagaggattcttttgcattgaataaacttacagccaaaaaaccttaaaaaaaaaaaaaaaaaaaa

SEQ ID NO: 284590 - DNA, 1000 bp, Homo Sapiens; identical to SEQ ID NO: 220828

SEQ ID NO: 284591 - DNA, 1000 bp, Homo Sapiens; identical to SEQ ID NO: 115395

SEQ ID NO: 284592 - DNA, 1000 bp, Homo Sapiens
aactgaaaacacagcagataagctgtagaaaatgaaaaacgattcaattttaattttctgctctgagtatttagtaaccaacactgcctaaagcaggtagcatccaaaataagaaactattctctctctaaatcttcactcttacttcaatttacatttgtgatataaagactatgcagttctcagtttaaatcggaacatcatgttaaaaacagttctgagattccttacgaagtttccaataacttgtgactagactttatgaaatttacggataaagttcttcaacatgatgttatcttgtgcctttcatgtaagttgaatttgctcatacggcttgaaagttgtatttgcaaaattaagccttcgatttttataaatgcaacgattcctcagaacagtgtcgcaagatctttatttcctccgaagtatgtaaaagttgtatgatgtgctaattttgtaaatggcaagtcactttcatttgtttttatatttagaaactctaattaatcaggaatattataagctgttttctttataattttgcttcttacctaatgtatcattttatgcatatactttattaaatagagtatgttttatatatattaaaaatagtttcttttttctccttctcatttctagttcaaatagacaaaaacatactatttaccagttactaaaaagcagtatatcattgctcctagtcccaaaaaagtactatatattattataaactagaacttgttattaccataataaaaaaagaccgtgaaattctgtattttttcatttaaaaatggcagctctatgcattcatacacatgaattataagaaaaaatacaaaaggtatattggatgacatgaggtttgagaatgtgttttacagggctgcattaaagggaaaaattcatattttattgttacatcaatgagctttctccaggatttttacaataaacgagtaggaattagaacctgaatcaaatggcgagagat

SEQ ID NO: 284593 - DNA, 1000 bp, Homo Sapiens; identical to SEQ ID NO: 220831

SEQ ID NO: 284594 - DNA, 1000 bp, Homo Sapiens; identical to SEQ ID NO: 115396

SEQ ID NO: 284595 - DNA, 1000 bp, Homo Sapiens
gcaagggctctgtgcccgtgccctgtacgactaccaggcagccgacgacacagagatctcctttgaccccgagaacctcatcacgggcatcgaggtgatcgacgaaggctggtggcgtggctatgggccggatggccattttggcatgttccctgccaactacgtggagctcattgagtgaggctgagggcacatcttgcccttcccctctcagacatggcttccttattgctggaagaggaggcctgggagttgacattcagcactcttccaggaataggacccccagtgaggatgaggcctcagggctccctccggcttggcagactcagcctgtcaccccaaatgcagcaatggcctggtgattcccacacatccttcctgcatcccccgaccctcccagacagcttggctcttgcccctgacaggatactgagccaagccctgcctgtggccaagccctgagtggccactgccaagctgcggggaagggtcctgagcaggggcatctgggaggctctggctgccttctgcatttatttgccttttttctttttctcttgcttctaaggggtggtggccaccactgtttagaatgacccttgggaacagtgaacgtagagaattgtttttagcagagtttgtgaccaaagtcagagtggatcatggtggtttggcagcagggaatttgtcttgttggagcctgctctgtgctccccactccatttctctgtccctctgcctgggctatgggaagtggggatgcagatggccaagctcccaccctgggtattcaaaaacggcagacacaacatgttcctccacgcggctcactcgatgcctgcaggccccagtgtgtgcctcaactgattctgacttcaggaaaagtaacacagagtggccttggcctgttgtcttcccctattttctgtcccagctcatccgtgtctctgaagaacaaatatgcttttggaccacgaaaaaaaaaaaaaaaaaaaaa

SEQ ID NO: 284596 - DNA, 1000 bp, Homo Sapiens; identical to SEQ ID NO: 115397

SEQ ID NO: 284597 - DNA, 1000 bp, Homo Sapiens
attgaagcctaagatgtgcttaatttcactgtgtgtaagtttcacctcagttaacaagagagaacagaacaaaccaaaaatcttaattcttttgaaaaaaagactttctggctgctttattaaagaagccaggggaacaaggttaaaaggaaatcagttagcagtgaccaaggcaagagatgatggtggcttggctgaagatggtgacagtggaggtggtaaggtgatcagattctggatatattttgaaggttgagctaatttggtcagctgatgggcataatggatgtgagggaaagaaagttggaaaggatgatgtgaagatttttaatgggatggaataggtgtttaatgaacagccatttaacaacatcagggtaatttcatcttgtgtatcatcctagagtataaccctgttgtaaagaatgatacacaagacaaacttaccctgatgttgttaaatatatgttagatgaccagttgctttgatttctttgctcaataaacattggattacagctggtttgctgtgtggcatgcctacatggagggaacacactgagccaatgatttcatcatctgggtccctttggtttatatcagtttccaacatgacttgtttgtggggcttgtgggaggggcacatacatcggccccaggattctaacatctcctggtctctgaggttataattttcacttaacattgtcgagttggcattttggttttagtccaatggttcagttctttgaaactgactccagagatggctctgttcattaatagattgttttgttgaccctgtgaggattagtctgtggatcttggaaattcggcaggtgactacaattctagaaggcctcttgtgagatataaggtgttttccttaagtgacatggccctgcgttgcaaagctgagaagtaatatgaaggagcgttttgtaagtttgaatctctataatcaaaaaccagactaatgacacattcgcttttagaactt

SEQ ID NO: 284598 - DNA, 1000 bp, Homo Sapiens
cggctggcagtttcttcgaggacctcagcaaggtcgtgagtccaggggtctacaagtcccgggccccccagttcacgattctggcgcggacttcgctcccccaagacaacactcggaagccagggcccgcggcctacaacgtggatcagcaccggaagccccgcggctggagtttcgggatccggcactcggactacctggccccgctggtgaccgacgcggacaactgacccgccaggcgggagcggccccacacgtgtttgcttaaagtctgcgagtccgcatcgtgtccgcctctctctctctctctctgcgcgtcctggcgcaaggcctggggtggagccacggctggggccgtgtcccaactccgaacccagcggggcggggcccgagcgtcgggcgaggccgggaccccagcgctgcgccgcgtccgaacgtcgagaccccaccgagggcgggagggggactctcgggagccacagacgcccgagacccacgccgggcgggaccggccagggatcacccccgccgacggccccgggccccgacggcccggaagttccgcgtgtccgggggcaccgggggattggccggggcgcggcgtgcaaggcttcccgggggcggcgactgccgagctccgccctccaggcggccccacccgcctgccgtcctggggcgccgccgccccgccgccggcagtggaccgctgtgcgcgaaccctgaaccctacggtcccgacccgcgggcgaggccgggtacctgggctgggatccggagcaagcgggcgagggcagcgccctaagcaggtacgggcggggctcaagtcgcgaggcggggaagcgggaggcagacacggacgagggcgacacagacacgggaccgaggggcggacaccggagagacacgggaaaggggtcgggacaggagcacgtggctcagacaccgacgccgggaggccgcagaccccggacgtgtcaggcatccccgcaggcccggagcg

SEQ ID NO: 284599 - DNA, 1000 bp, Homo Sapiens; identical to SEQ ID NO: 115398

SEQ ID NO: 284600 - DNA, 1000 bp, Homo Sapiens; identical to SEQ ID NO: 118362

SEQ ID NO: 284601 - DNA, 1000 bp, Homo Sapiens
cagggcaatgacattgtcgtgaaggtgctgaaggttcgagactggagtacaaggaagagcagggacttcaatgaagagtgtccccggctcaggattttctcgcatccaaatgtgctcccagtgctaggtgcctgccagtctccacctgctcctcatcctactctcatcacacactggatgccgtatggatccctctacaatgtactacatgaaggcaccaatttcgtcgtggaccagagccaggctgtgaagtttgctttggacatggcaaggggcatggccttcctacacacactagagcccctcatcccacgacatgcactcaatagccgtagtgtaatgattgatgaggacatgactgcccgaattagcatggctgatgtcaagttctctttccaatgtcctggtcgcatgtatgcacctgcctgggtagcccccgaagctctgcagaagaagcctgaagacacaaacagacgctcagcagacatgtggagttttgcagtgcttctgtgggaactggtgacacgggaggtaccctttgctgacctctccaatatggagattggaatgaaggtggcattggaaggccttcggcctaccatcccaccaggtatttcccctcatgtgtgtaagctcatgaagatctgcatgaatgaagaccctgcaaagcgacccaaatttgacatgattgtgcctatccttgagaagatgcaggacaagtaggactggaaggtccttgcctgaactccagaggtgtcgggacatggttgggggaatgcacctccccaaagcagcaggcctctggttgcctcccccgcctccagtcatggtactaccccagccatggggtccatccccttcccccatccctaccactgtggccccaagaggggcgggctcagagctttgtcacttgccacatggtgtctcccaacatgggagggatcagccccgcctgtcacaataaagtttattatgaaaaaaaaaaaaaaaaaaaaaa

SEQ ID NO: 284602 - DNA, 1000 bp, Homo Sapiens; identical to SEQ ID NO: 220833

SEQ ID NO: 284603 - DNA, 1000 bp, Homo Sapiens; identical to SEQ ID NO: 115400

SEQ ID NO: 284604 - DNA, 1000 bp, Homo Sapiens
agaacctgcacaaggtgtcgccatccctgaagggcttcctggaccgcctgctggtgcgagaccctgcccagcgggccacggcagccgagctgctgaagcacccattcctggccaaggcagggccgcctgccagcatcgtgcccctcatgcgccagaaccgcaccagatgaggcccagcgcccttcccctcaaccaaagagccccccgggtcacccccgccccactgaggccagtagggggccaggcctcccactcctcccagcccgggagatgctccgcgtggcaccaccctccttgctgggggtagatgagaccctactactgaactccagttttgatctcgtgacttttagaaaaacacagggactcgtgggagcaagcgaggctcccaggacccccaccctctgggacaggccctcccccatgttcttctgtctccaggaagggcagcggccctcccatcactggaagtctgcagtgggggtcgctgggggtggagagaacactaagaggtgaacatgtatgagtgtgtgcacgcgtgtgagtgtgcatgtgtgtgtgtgcaaaggtccagccaccccgtcctccagcctgcaaggggtgtctggcgccttgcctgacacccagccccctctccccctgagccattgtgggggtcgatcatgaatgtccgaagagtggccttttcccgtagccctgcgccccctttctgtggctggatggggagacaggtcagggccccccaccctctccagcccctgcagcaaatgactactgcacctggacagcctcctcttttctagaagtctatttatattgtcattttataacactctagcccctgcccttattgggggacagatggtccctgtcctgcggggtggccctggcagaaccactgcctgaagaaccaggttcctgcccggtcagcgcagccccagcccgcccacccctgcctcgagttagttttacaattaaaacattgtcttgttttgtgaaa

SEQ ID NO: 284605 - DNA, 1000 bp, Homo Sapiens
tgtgcttcggaatgacctggctcggtacaacttagatgaggagaccacctctgcaggttctggtgatgactttgaccagggtgacaatggctggaaaattatccatacagatgtcttccgcttccccccataccgtggtctgctctgtgctgtgcttggcgtgggtgcccagttcctggcccttggcactggcattattgtcatggcactgctgggcatgttcaatgtgcaccgtcatggggccattaactcagcagccatcttgttgtatgccctgacctgctgcatctctggctacgtgtccagccacttctaccggcagattggaggcgagcgttgggtgtggaacatcattctcaccaccagtctcttctctgtgcctttcttcctgacgtggagtgtggtgaactcagtgcattgggccaatggttcgacacaggctctgccagccacaaccatcctgctgcttctgacggtttggctgctggtgggctttcccctcactgtcattggaggcatctttgggaagaacaacgccagcccctttgatgcaccctgtcgcaccaagaacatcgcccgggagattccaccccagccctggtacaagtctactgtcatccacatgactgttggaggcttcctgcctttcaggtatcctccctttattccatggctattactgtcaggttcctgacctcaatttttcctgtccctactcatccagtaccctaacccaacccgttgatccctggttcagtggtaccattcagagatcattaaatggttcctcctatccccaagcaggactgagcttgaatgatatgagagtgtctcacttataaagctctccggagacatttcccccttcaccttcctggtttctgactttaatgcctatggacatcatgtggggtttaaagcccatttgatgacccatttactttgttgaatacctctttgtgccaggcaaagaataaagtggaataaaatggaaaaaaaa

SEQ ID NO: 284606 - DNA, 1000 bp, Homo Sapiens; identical to SEQ ID NO: 115401

SEQ ID NO: 284607 - DNA, 1000 bp, Homo Sapiens
ggtgagggggcggcggtcccagcagcaggcatgggagtggcggcgcggcccccagccctgcggcactggttcagccactcaattcctctcgctatcttcgcgctgctgctgctttatctcagtgttcggagcctaggcgcccgctcgggctgcggacccagggcgcagccctgcgttccaggggaaacggcgcccttccaggtccggcaggagtcgggaaccctggaggccccggagaggaaacagcctccgtgtctgggccctcgggggatgctgggccgcatgatgaggcggttccacgccagtctgaaacccgaaggggatgtggggctgtcgccgtacctggcgggatggagggcactcgtcgaattcctgactcccctcggctccgtcttcgccttcgccactagggaggccttcaccaaggtgacagacctggaggctcgggtgcacggcccggacgcggagcactactggtcgctggcggccatggcggcgtgggagcggagggcgggactgctggagcagccgggggcggccccccgggacccgacccggagctcgggctctcgcacgctgctcctgctgcaccgcgcgctgcgctggtcccagctctgcctccaccgggtggcgaccggcgcgctgggaggcccggaagcgggcgtgcagtgcagcgacgcctaccgtgcggccctgggtccgcatcacccctggctggtccgacagaccgcccgcctcgccttcctcgccttcccgggtcgccgccgcctgctggagctggcgtgtcccggagccaccgaggcggaggcgcgggccgcgctgctccgggccgccggcaccttggaggatgtctacaaccgcacccagagcctgctggccgagcgcggcctgctccagctggcctaagacggcggctgcggggaccggcgggaacggagcggaccgcccggggtggggccgcgcagcccggggtcagtcctgcagcccgcgccgcggccgc

SEQ ID NO: 284608 - DNA, 1000 bp, Homo Sapiens; identical to SEQ ID NO: 220836

SEQ ID NO: 284609 - DNA, 1000 bp, Homo Sapiens
gcctgcacctttggagcctgaaggtcaagggcggggcatcggagctgcaggaggatgagagcttcacactgcgtggacccccaggggctgcccccagtgccacacagatcaccgtggtcctgccacattcctcctgcgagctgctctacctgggcaccgagagtggcaacgtgtttgtggtgcagctgccagcttttcgtgcgctggaggaccggaccatcagctcggacgcggtgctgcagcggttgccagaggaggcccgccaccggcgtgtgttcgagatggtggaggcactgcaggagcaccctcgagaccccaaccagatcctgatcggctacagccgaggcctcgttgtcatctgggacctacagggcagccgcgtgctctaccacttcctcagcagccagcaactggagaacatctggtggcagcgggacggccgcctgctcgtcagctgtcactctgacggcagctactgccagtggcccgtgtccagcgaagcccagcaaccagagcccctccgcagcctcgtgccttacggtccctttccttgcaaagcgattaccagaatcctctggctgaccactaggcaggggttgcccttcaccatcttccagggtggcatgccacgggccagctacggggaccgccactgcatctcagtgatccacgatggccagcagacggccttcgacttcacctcccgtgtcatcggcttcactgtcctcacagaggcagaccctgcagccagtaggagagcttcgggagtgggtgcccagggttaggtgtgggaggcatggggcaggaccatcagtaaagacagggccaggtgcagtggctcctgcctgtaaccccagtgctgtgggaggccaaggtggtaggatcgcttgaacccaggagttcaagtccagcctggacaacgtagggagacccttgtctctacaaaaaataaaaaaattagccaggaaaaaaaaaaaaaaaaaaaaaaaaaaaaaaaaaa

SEQ ID NO: 284610 - DNA, 1000 bp, Homo Sapiens; identical to SEQ ID NO: 220838

SEQ ID NO: 284611 - DNA, 1000 bp, Homo Sapiens; identical to SEQ ID NO: 220839

SEQ ID NO: 284612 - DNA, 1000 bp, Homo Sapiens; identical to SEQ ID NO: 220840

SEQ ID NO: 284613 - DNA, 1000 bp, Homo Sapiens
tcgagtccgggcaggggagctggaccaggctctaggacggcccttcaccctaagcatcagtaaccagtatggggatgatgaggtgacacacacccttcagacagaaagtcgggaagcactgcagagctggatggaggctctgtggcagcttttctttgacatgagccaatggaagcagtgctgtgatgaaatcatgaaaattgaaactcctgctccccggaaaccaccccaagcactggcaaagcaggggtccttgtaccatgagatggctattgagccgctggatgacatcgcagcggtgacagacatcctgacccagcgggagggcgcaaggctggagacacccccaccctggctggcaatgtttacagaccagcctgccctgcctaacccctgctcgcctgcctcagtggccccagccccagactggacccaccccctgccctgggggagaccccgaaccttttccctggatgctgtccccccagaccactcccctagggctcgctcggttgcccccctcccacctcagcgatccccacggaccagaggcctctgcagcaaaggccaacctcgcacttggctccagtcaccagtgtgagagagaaaggtgctggcataggatctgcccagaagagaaaatgacccatgcgcagttgggctctggatacggcgctgtctatagcaagttggccagtctggcctcctgttcctctgctggacctggggtaggctgcaggggtgggcagaagcccctcttaaattgtggttgccatggtaccgagggactcattcctggggctcgctgggacctccctaaacccttcctggaagaaaactggaaccaactctgccctacctccctgcactaaccagctttgaggatggcactgaagaacccttggagcaaacatacctcccttgtgactcccacatcaaccattaaagttatttaacagcagccttcacctggctcctgaggaaaaaaaaaaaaaaaaaa

SEQ ID NO: 284614 - DNA, 1000 bp, Homo Sapiens
tgttttgattctctaatcatgttttcgtcacatgctgagtaaaagtgccttacaatgtaaaaattgtacagtacttatgttcccaagtagcatcatcatcttctgggtagtaattacattgtggtattaatatttagaaaaatggacctcagcagtgtatttactgtacatctcttaagtccttaactgtagttttaataagcatgacattatttgataagtatataacatttacatcatttcaaaaaatactgccgttactgtcttttatgcatattttagcctgaaattttgaagcgtcttttttctttcttttttctttttttgttttgttttttgttattgatattaaacagtgtaatctttgcaagcgtatattgaagattattctggagcatttattgccttaccagaaatgttagtaggaaatgttctttagagtagaaagatagacttgagtttctatacttttaagaagagctctttgttcctgggggaggggggcagggggtgaattttactttcatctcaagttattaaaaacccacaactgaagtaaattttatttcaagaatcagcagttttagaatttcagatagtacttgctcagaagtacatgctactcaagatattaagagataacaagatctgtagatctgctattgaatcagaatctgtgtacttgaacaaatgtgtgaatctcaaatatctcaaagcaaaagaaaaagtgttctagagtgttgttgcttttttaaaaaaagcgctgaagttagaccaaggtatacagttttgttctaacagacatttaggttaattgtaaagataaggaatgcattatgggtcaaaaatcaaacattcctctcatgttatgtatattttgttcctgttatattggctttattttcaaaattgtagtttgtagtattagtttccttttattggtattcttgcatatactattcattcaataaatgacttatgactttcataaaaaaaaaaa

SEQ ID NO: 284615 - DNA, 1000 bp, Homo Sapiens; identical to SEQ ID NO: 115405

SEQ ID NO: 284616 - DNA, 1000 bp, Homo Sapiens
tcaaaatttaaaccttcccttaaaactttatacataagacatttatgattgttcaatttttataatctatttgtggattttgttaaaagatttcacatgaagatttattagttgccatttaaaatttttatatgtttagttaaaagatttgacatgaaaatttattagataccatttaaaaattttatgtgttatgtgtttattctttgagaatgttaccttactgtttgtaatagtgctacatttttctgctttcatggcctctgtattttcacaaaacaccaaaaacagcatttaattatattatcatgagtgtgtttctggacacaaacttctgcagtagaatgacctaacatgtcgttttcattgcagtcattataggattgaaatacgttcaaaataacctctctaggaaagtcttctgctagaatttctcccctctattcattataatattctttgtttttaaagccagtcaaatataatagtcttaataagatcagaaactctccaggagagtgagtctaccctcacgtccttgtaggatgatcttgattatagtcttattataggactataactgtattctcaacatttctccagaaaggaccttgtaaaaaggtcttttgtaccacagtattggttttttcccctctctcttcacttaaaaaaaaaaatagcaaggcagaaatagtgtattgaaaagttgttcatctattatgaagtccttgagtggtgaaaaatccgttgtacatgagaacatttctatgcatttaagccagaaacgaggtacatggctgtgtgctcttctgtcaaccaatgaaatgtgttttcacatgtgtggcagtgcaagtaaataacacattatttgactgaatcaggcatgatactgcaccaaagtgttggtacatattcacggtagtaaatcagtacccctgttaaaggatttatcccattgcttcatattaataaaatggttacaatatatcaaaaaaaaaaa

SEQ ID NO: 284617 - DNA, 1000 bp, Homo Sapiens; identical to SEQ ID NO: 115406

SEQ ID NO: 284618 - DNA, 1000 bp, Homo Sapiens
acggcttctcccaagagcatgccgaaagatgcacagatgatggcacaaatcctgaaggatatggggattacagaatatgagccaagagttataaatcagatgttggagtttgccttccgatatgtgaccacaattctagatgatgcaaaaatttattcaagccatgctaagaaagctactgttgatgcagatgatgtgcgattggcaatccagtgccgcgctgatcagtcttttacctctcctcccccaagagattttttattagatattgcaaggcaaagaaatcaaacccctttgccattgatcaagccatattcaggtcctaggttgccacctgatagatactgcttaacagctccaaactataggctgaaatctttacagaaaaaggcatcaacttctgcgggaagaataacagtcccgcggttaagtgttggttcagttactagcagaccaagtactcccacactaggcacaccaaccccacagaccatgtctgtttcaactaaagtagggactcccatgtccctcacaggtcaaaggtttacagtacagatgcctacttctcagtctccagctgtaaaagcttcaattcctgcaacctcagcagttcagaatgttctgattaatccatcattaatcgggtccaaaaacattcttattaccactaatatgatgtcatcacaaaatactgccaatgaatcatcaaatgcattgaaaagaaaacgtgaagatgatgatgatgacgatgatgatgatgatgactatgataatctgtaatctagccttgctgaatgtaacatgtatacttggtcttgaattcattgtactgatattaaacatgcatgctggatgttttcaagttgtgttttagaaaactaataataatgagtaaacacagttaccatacttttcaattgaaatgaaggtttttcatcagccttaaaagtgtaagaaaaataaagttgtcattcattcgaaaaaaaaaaaaaaaaaaaaa

SEQ ID NO: 284619 - DNA, 532 bp, Homo Sapiens
ctctttccctgccgccgccgagtcgcgcggaggcggaggcttgggtgcgttcaagattcaacttcacccgtaacccaccgccatggccgaggaaggcattgctgctggaggtgtaatggacgttaatactgctttacaagaggttctgaagactgccctcatccacgatggcctagcacgtggaattcgcgaagctgccaaagccttagacaagcgccaagcccatctttgtgtgcttgcatccaactgtgatgagcctatgtatgtcaagttggtggaggccctttgtgctgaacaccaaatcaacctaattaaggttgatgacaacaagaaactaggagaatgggtaggcctttgtaaaattgacagagaggggaaaccccgtaaagtggttggttgcagttgtgtagtagttaaggactatggcaaggagtctcaggccaaggatgtcattgaagagtatttcaaatgcaagaaatgaagaaataaatctttggctcacaaaaaaaaaaaaaaaaaaaaaaaaaaaaaa

SEQ ID NO: 284620 - DNA, 1000 bp, Homo Sapiens
ataactgcataaactagtcaactgaacactgggccacttacctcaatgttatacaaagtcctggatgatttgattctgaaccacagcctttgcaggagttgggggaatcagatttgctcatgaagacatccctttccacttttgtcatgggcagtaaatactatagtttacaatgcctaccaattagcaaaggatcattcattcagctactcagttcctctgtaaaacaggtctatgtatgtgcaattcagctaagatctagcagtaacttaagggcagaagctggctctctacttacaacctgctttctctgctgaagccttacctcctcttcagtttccctcctagacacaaatcgaaaataatatactgatagctggttagtaacctcagtaagaattaaaactgaggttgtttactcattttgcctttaaatcttttatccccttttggtgaaggtttccctttaggaaaaaaggtgtcaaacaaccctgattttttttttttttgcatcatttttattacaccaaattaaagttgggagttccaagatcccattccagttaatatttaaccaaggtctaaaatttgattttttttaaatctttgaatcctcccttctgcccctcatggatccttggttttaatgatatggaaacatctaattcttagaattattccgtagcttttgctgattactctgagatttcagttaagacttgtttcaaaagacagatagctgactggttcataatacattggaatagttggatccaaactaataagaataagctgtacaggaactagtgctcaatatacattgtataaatttgtggaaatctcttggatgtgaattgttacttcaagtggcttttattaagattttctcagacttacttggaggttaaagcaaacccaaatgtgtattattttgttacagagctctgctttataattttgtaataaagtttcaatacagacaccaaaaaaaaaaaaaaaa

SEQ ID NO: 284621 - DNA, 1000 bp, Homo Sapiens
atatatttaagtacagttttcatgaggaagttttaaaagaccatgttcctaagcttccaagaaggttttggatactagaagtattaatctatggcttttctcccagtaaaaccataggcctgaagttcacattgggtctttaaatcttttagatatatactggtcatttcagaaaattcttcatagtggtattggccttatatttaactttttttttattttttttttgagacaaagccacactctgtctccttggctggagtgtggtggcacagtctcagctcactgcaacctctgcctcccagttcaagcaattcttctgcctcagcctcccaagtagctgggattacaggcacccgccaccacgcccagctaatttttgtatttttgtagagatggggtttcacgatgttggccaggctggtctcaaacttctgacctcaagtgatctgcccaccttggcctcccaaagtgctgggattacaggtgtaagccactgcgcccggcctttttaactttaaacatgttttagaattcacctaaagatcaaaatatcatggattgaacctcatcaattgatagcagtgagtgactgaagcttccaaatcaagaaaagccggcaccaagaacttccattctaatctagagctgaccagtttgagctgattctctctttgaagagtccttcttgattgcagtgcagtactggcatttctgaatggatgtaagtggagtattttagtctaaaggcttttcaaattacttgaatttttttaaaaattgaggagctttatttctatttacccttccatttttgtatatcaaatttccattgtcattaaaaactgtatcttgaaactttgtgaactgacttgctgtatttgcactttgagctcttgaaataaatgtgatttttgtgtgattaaaacaaaaaaaaaaaaaaaaaaaaaaaaaaaaaaaaaaaaaaaaaaaaaaaaaaaaaaaaaaaaaaaaaaaaaaa

SEQ ID NO: 284622 - DNA, 1000 bp, Homo Sapiens; identical to SEQ ID NO: 115407

SEQ ID NO: 284623 - DNA, 1000 bp, Homo Sapiens
aatgagcagggttggtgtattcatgtgaaaaaaggagaacctggacttctcatttctcgagtgaatgcaaaaaatcccttctttggctatgctgggccttataagcacacaaaagacaaattgctttgtgatgtttttaagaagggagatgtttaccttaatactggagacttaatagtccaggatcaggacaatttcctttatttttgggaccgtactggagacactttcagatggaaaggagaaaatgtcgcaaccactgaggttgctgatgttattggaatgttggatttcatacaggaagcaaacgtctatggtgtggctatatcaggttatgaaggaagagcaggaatggcttctattattttaaaaccaaatacatctttagatttggaaaaagtttatgaacaagttgtaacatttctaccagcttatgcttgtccacgatttttaagaattcaggaaaaaatggaagcaacaggaacattcaaactattgaagcatcagttggtggaagatggatttaatccactgaaaatttctgaaccactttacttcatggataacttgaaaaagtcttatgttctactgaccagggaactttatgatcaaataatgttaggggaaataaaactttaagatttttatatctagaactttcatatgctttcttaggaagagtgagaggggggtatatgattctttatgaaatggggaaagggagctaacattaattatgcatgtactatatttccttaatatgagagataattttttaattgcataagaattttaatttcttttaattgatataaacagtagttgattattctttttatctatttggagattcagtgcataactaagtattttccttaatactaaagattttaaataataaatagtggctagcggtttggacaatcactaaaaatgtactttctaataagtaaaatttctaattttgaataaaagattaaattttactgaaatattttaa

SEQ ID NO: 284624 - DNA, 1000 bp, Homo Sapiens
cacggctcatcaagtcacacctgcccctggctctgctccctcagactctgttggatcagaaggtcaaggtggtctatgttgcccgaaacccaaaggacgtggcggtctcctactaccatttccaccgtatggaaaaggcgcaccctgagcctgggacctgggacagcttcctggaaaagttcatggctggagaagtgtcctacgggtcctggtaccagcacgtgcaggagtggtgggagctgagccgcacccaccctgttctctacctcttctatgaagacatgaaggagaaccccaaaagggagattcaaaagatcctggagtttgtggggcgctccctgccagaggagaccatggacttcatggttcagcacacgtcgttcaaggagatgaagaagaaccctatgaccaactacaccaccgtcccccaggagctcatggaccacagcatctcccccttcatgaggaaaggcatggctggggactggaagaccaccttcaccgtggcgcagaatgagcgcttcgatgcggactatgcggagaagatggcaggctgcagcctcagcttccgctctgagctgtgagaggggctcctggagtcactgcagagggagtgtgcgaatctaccctgaccaatgggctcaagaataaagtatgatttttgagtcaggcacagtggctcatgtctgcaatcccagcgatttgggaggttgagctggtaggatcacaataggccacgaatttgagaccagcctggtaaaatagtgagacctcatctctacaaagatgtaaaaaaattagccacatgtgctggcacttacctgtagtcccagctacttgggaagcagaggctggaggatcatttcagcccaggaggttgtggatacagtgagttatgacatgcccattcactacagcctggatgacaagcaagaccctccctccaaagaaaataaagctcaattaaaataaaatatgatttgtgttcatgtaaaaaaaa

SEQ ID NO: 284625 - DNA, 1000 bp, Homo Sapiens; identical to SEQ ID NO: 220842

SEQ ID NO: 284626 - DNA, 1000 bp, Homo Sapiens; identical to SEQ ID NO: 115408

SEQ ID NO: 284627 - DNA, 1000 bp, Homo Sapiens; identical to SEQ ID NO: 115409

SEQ ID NO: 284628 - DNA, 1000 bp, Homo Sapiens; identical to SEQ ID NO: 115410

SEQ ID NO: 284629 - DNA, 1000 bp, Homo Sapiens; identical to SEQ ID NO: 115412

SEQ ID NO: 284630 - DNA, 1000 bp, Homo Sapiens; identical to SEQ ID NO: 115413

SEQ ID NO: 284631 - DNA, 1000 bp, Homo Sapiens
ggcatgggtctcactgtgttgcccaggctggtctgaaacttttgggctcaagcgatcctcccaaaacgctgggattacagtcatgagccaccgtgcccagcctaattcctgacttctctatacagagtcttcacttgataggcactcgtctgtagtaactcagtttgaatatctttagaaaatgtttagaatttatttgtaacaagatggtaaggaataagattatcccatatgcatttctgtagagcagaatttgatagcttagtgttcaatctttttgaaaataaatgtttacctgtcatcagatttaattaaaattatacttagtaattgcactattacttagttaatttttgttgtatggaaatattggtagtactactttgggaacctgttactgacaattgatgtcattaacaaaatgcctagttggattagatgttttcattttctaattttttgcttgtttaaaatgcaccttacttgttctgagatacctggcaaaagtctttacaaaatgtatggtaatagaaccaaggttagtaaatatacataggctggtggatgagagaccatggaactgtgtaaatacacttaaatgttcacacatttttctagtgtaattcttggatactttaaaaagcaaaacattgttcaaattgttttgattctgaaaaatcattcaactgctaactggcaataagactctaggcaagtcgttttccagattgtaattatatgtagaaactattcatctgcattcattttatttgcctgtaagttaacatgtttccaaaatttaaaagcctgggtccccaaaagaatgtggaagtattaaaatgtatgtaattatgcaaacattttaatgctattttctgcacttatttcttttaaatattttatttaaaatttttaattaacattttgtttgcttaatgcttttgttatgaatcaattaaaattctttattttatacaactaaaaaaaaaaaaaaaaaaaa

SEQ ID NO: 284632 - DNA, 1000 bp, Homo Sapiens
gcgggagcaggggcaatgccagctcagggcccagcaggagctgctgcagagcctgcagagggagaagcaaggcctggagcaggcgactacggacctgcggctaaccatcctggagctagaacgggagctggaggagctgaaggagcgggagcggctgctggtggccttcccagacctgcacaggcccaccgagacccagatccatggaggcagatccagcagcgtggaatcccagataacatgtcccacagactctggcaacgtcacagatcacatggagaggcaagtgcaggccaacgacatccgcatccgggtcctacaggaggagaacgggcggctccaatcaatgctgtccaaaatccgggaagtggcccagcagggtggcctcaagctgatcccgcaggaccggctctggtccccttccagcaagggaacccagggagcaacaccaccagtccaggccaagagcacatccccagggcctctgggcagacagcaccttcctagcagcaggacgggtaggaccctgctgggccagccctgcacatccccacctcggcagccctgcacatccccacctcggcagccctgcacatccccacctcggcagccctgcacatccccatctcggcagccctgcagccagcccagcaagtccttgctggagggtgtgacccacttggacacctgcacccagaaccccatcaaggtcttggtcaggctgagaaagagactgtcacctggccggggacaggccagctctgcacaccagccccaggagcggcccatgtagcctgtggcccagggctgaggctggatgggaggtggctggcagcccacccactgtaataaagccccagccattggcccacagcaaaaaaaaaaaaaaaaaaaaaaaaaaaaaaaaaaaaaaaaaaaaaaaaaaaaaaaaaaaaaaaaaaaaaaaaaaaaaaaaaaaaaaaaaaaaaaaaaaaaaaaaaaaaaaaaaaaaaaaaaaaaa

SEQ ID NO: 284633 - DNA, 1000 bp, Homo Sapiens; identical to SEQ ID NO: 115416

SEQ ID NO: 284634 - DNA, 1000 bp, Homo Sapiens; identical to SEQ ID NO: 115417

SEQ ID NO: 284635 - DNA, 882 bp, Homo Sapiens; identical to SEQ ID NO: 115419

SEQ ID NO: 284636 - DNA, 1000 bp, Homo Sapiens; identical to SEQ ID NO: 220849

SEQ ID NO: 284637 - DNA, 1000 bp, Homo Sapiens; identical to SEQ ID NO: 220850

SEQ ID NO: 284638 - DNA, 1000 bp, Homo Sapiens; identical to SEQ ID NO: 115420

SEQ ID NO: 284639 - DNA, 1000 bp, Homo Sapiens; identical to SEQ ID NO: 220851

SEQ ID NO: 284640 - DNA, 1000 bp, Homo Sapiens; identical to SEQ ID NO: 115421

SEQ ID NO: 284641 - DNA, 718 bp, Homo Sapiens
aatatggcggcgcccagtggcggtgtgaactgtgaggagttcgccgagttccaggaattactcaaggtgatgaggacaattgatgacagaatagtacatgaattaaacactacggttccaacagcttcctttgcagggaaaattgatgccagccaaacctgtaaacaactttatgagtctttgatggcagctcatgccagtagagacagagtcataaaaaactgtatagcccagacttcagcagtagtaaaaaacctccgagaagagagagaaaagaatttggacgatttaacgttattaaaacaacttagaaaagagcagacaaagttgaaatggatgcagtcagaactgaatgttgaagaagtggtaaatgacaggagctggaaggtgtttaatgaacgctgccgaattcacttcaagcctccaaagaatgaataaagagagattcttttttttttttttttttttttttttttaaggactgggtcatctcataagagctaagcatgacagatatcaacagggcgggctttctaggatgatttctgagccaacagtccaagaccttttgttgatttcagccccacttagccaagacctcaagtataaataattctgataattatggagaaatcaactgctattttatactgattctgtaaaaaaaaaaaaaaaaaatttttgtaactattaaaataattttctgactcagtgtaca

SEQ ID NO: 284642 - DNA, 1000 bp, Homo Sapiens
ctcatcaaaagactggaggaaaaacagagtccagagctggtgaagaagcacaagaaaaagagggttgtccccaaaaagcctcccccatcaccccaacctacagggaaaattgagatcaaaattgtccgcccatgggctgaagggactgaagagggtgcacgttggctgactgatgaggacacgagaaacctcaaggagatcttcttcaatatcttggtgccgggagctgaagaggcccagaaggaacgccagcggcagaaagagctggagagcaattaccgccgggtgtggggctctccaggtggggagggcacaggggacctggacgaatttgacttctgagaccaacactacacttgacccttcacggaatccagactcttcctggactggcttgcctcctccccacctccccaccctggaacccctgagggccaaacagcagagtggagctgagctgtggacctctcgggcaactctgtgggtgtgggggccctgggtgaatgctgctgcccctgctggcagccaccttgagacctcaccgggcctgtgatatttgctctcctgaactctcactcaatcctcttcctctcctctgtggcttttcctgttattgtcccctaatgataggatattccctgctgcctacctggagattcagtaggatcttttgagtggaggtgggtagagagagcaaggagggcaggacacttagcaggcactgagcaagcaggcccccacctgcccttagtgatgtttggagtcgttttaccctcttctattgaattgccttgggatttccttctccctttccctgcccaccctgtcccctacaatttgtgcttctgagttgaggagccttcacctctgttgctgaggaaatggtagaatgctgcctatcacctccagcacaatcccagtgaaaaaggtgtgaagcacccaccatgttcttgaacaatcaggtttctaaataaacaactggaccatcaaaaaaaaaaaa

SEQ ID NO: 284643 - DNA, 1000 bp, Homo Sapiens
caggatctgactgtcctcgagatgaaacgggaaaacccacagctgaaacaaatcgaggggctggtgaaggagctgctggagagggagggactcacagctgcagggaaaattgagatcaaaattgtccgcccatgggctgaagggactgaagagggtgcacgttggctgactgatgaggacacgagaaacctcaaggagatcttcttcaatatcttggtgccgggagctgaagaggcccagaaggaacgccagcggcagaaagagctggagagcaattaccgccgggtgtggggctctccaggtggggagggcacaggggacctggacgaatttgacttctgagaccaacactacacttgacccttcacggaatccagactcttcctggactggcttgcctcctccccacctccccaccctggaacccctgagggccaaacagcagagtggagctgagctgtggacctctcgggcaactctgtgggtgtgggggccctgggtgaatgctgctgcccctgctggcagccaccttgagacctcaccgggcctgtgatatttgctctcctgaactctcactcaatcctcttcctctcctctgtggcttttcctgttattgtcccctaatgataggatattccctgctgcctacctggagattcagtaggatcttttgagtggaggtgggtagagagagcaaggagggcaggacacttagcaggcactgagcaagcaggcccccacctgcccttagtgatgtttggagtcgttttaccctcttctattgaattgccttgggatttccttctccctttccctgcccaccctgtcccctacaatttgtgcttctgagttgaggagccttcacctctgttgctgaggaaatggtagaatgctgcctatcacctccagcacaatcccagtgaaaaaggtgtgaagcacccaccatgttcttgaacaatcaggtttctaaataaacaactggaccatcaaaaaaaaaaaa

SEQ ID NO: 284644 - DNA, 1000 bp, Homo Sapiens; identical to SEQ ID NO: 283962

SEQ ID NO: 284645 - DNA, 1000 bp, Homo Sapiens; identical to SEQ ID NO: 220852

SEQ ID NO: 284646 - DNA, 1000 bp, Homo Sapiens; identical to SEQ ID NO: 115422

SEQ ID NO: 284647 - DNA, 1000 bp, Homo Sapiens
actttgtctcagccaagacaggagactctgtcttcctgtgctttcagaaagttgctgctgaaatccttgggatcaaattaaacaaagcagaaatagaacagtcacagagggtggtgaaggcagatattgtaaactacaaccaggaacctatgtcaaggactgttaaccctcctagaagctctatgtgtgcagttcagtgagcgcatttttcttttgtgttgatagttctggctgcccttcacctctgggtgggcccgaggacttctaggaacttgttttatcagtgaccatctctgtagttcagttaacactttactcccaacttgcttcatcattgctattgcctcacagtggcaggcagctccttggatttgaaagaattcaactttgggaccacacactttgaattcaaaatggaaaacccattccctggaattagactgcttcattgcaaaagaatgatgttgtttctttgtatgtccttgcttcttttttcattgatgtaaatttttttaacttaatatgaaaactctccaagtcttgatcatcagccaggattttgccacagcaatttcattctcttatcggaacttgtatgtgtcaaagtatacttcagagtgcaaacattaagcaagtaatatattttacctacagatacttatgaagacattctttcgctatcgtgagtaaaagtatataaagctgtttctaactgaaaatgcttgaaataagcctgtaatagaaatattttttcattttttaaaaaagggcctaaattgtttatattgtagtttgtaactcacaaagtaatatttgatattgtatttttattactgtatcgttgtcgttatgtattgtgtaatactcaggtttgaaggctttctgaattctgataaatgttcagctgatgctccacgtggaatttctcttgcaaactgcataagagtactcccgagaatgagttatgacattgtggatcagactgtacctgatgttcaga

SEQ ID NO: 284648 - DNA, 1000 bp, Homo Sapiens
aaatccgattttagatgtacctagtgtgtatttcttatctctagacaagttcatgtttattgtttaatttatgcccaagtgaagttgtaaacttatggttcaactctgacacagaatttgtcacttgtctgaggtcagtggcaggtttctctgctgtcaagcactctgtgtcacccaccagattagtataactattaattcagactgtactcctatgtttaagataatttttacaagagctggctgaagcagcacattagtaacctgacaagatttctttttcccttttcagggggaaagggtcaccttaaaaataaattattttcagggactttgggaatctaatgataaatattacacataatctatgaatagcttaatcctttatatattccttaaaataggaattcctcgacatcactcctggccacactttccttgcctgtgttgttgctatgtgtatttgaaagtaatatctgcattccttttaagatgttctgtaagtcatatttgtcagttatacagagtagtcttccttttccccacgttcagtgtaatctcactgaacagtaataatagcaatagctaacaacatctgcacagcaccttacagtttgcaaagaacgttcacacattctcatttgagttttgcatagtgaacctgttacgagatgtctcttgacgtcgatgctaaaagtgttagaatctttacatcactagagtcattgaatatgctgtagtattgaatagtgccctgactagggggaggatttggatgtgctgcatttcaagccgtgtataatcatcaaaatggggggcttgagttccttagctacttgaatccgatttacttctgttaagtgatgcttttctaaccgttttctggatggattttgtattcactatattgtagcttgtaatttgtataaatgtaccatctgatgtcattaaaaaaagtgtttgtagtgctaaaaaaaaaaaaaaaaaaaaaaaaaaaaaa

SEQ ID NO: 284649 - DNA, 1000 bp, Homo Sapiens; identical to SEQ ID NO: 115423

SEQ ID NO: 284650 - DNA, 1000 bp, Homo Sapiens; identical to SEQ ID NO: 220853

SEQ ID NO: 284651 - DNA, 1000 bp, Homo Sapiens
tttactcccaaaagtcatcgttgtactaggtacatattttaattgtttcccttactaaataagcataatgagacagccaccattccattaatgtttataaatcatctaaattttcagctcatagtggagttctgctggtcaaattatattttaatatctttcttactgaaccttctcataccaaaactacagacaatgtctaattcttaagagagatagatattataatatcaaattaatgtcattatggtacaatttgacagaggtaattttatttctatttcttagtgtaatagcacatcttaaataatttctgtagaccaggattacagatacttctcttgtgcaaggatttcactgtgggaaaatatagctgcagcatctttattaattatacattttactaccagtatactaacacagttttatccttggaaagcttttagaataattctactttattatgtccagtaactagcaatacttatttatgcaaagtgtctctgagatactaacatctttgaaaatatcaatgtatgttcctataatgtctaaaatattttagttactccagtgatgatttattaaccaattttaagtaccagtatgtttattccaatctatgcagtgatttctgaatatttggatatcagcattatttgtatttttcagggtaatttctgaaaatttaaaatatttatttggattgcttattcaggcattataaggtactctggaggaaggaatcacttctctttttttcttagttgggaaacttgtacttatgttataaatctttaaaatggaatcagtaagaattttttgtttaaggtaatacttttcaaataatttgattattccttattggctttatctgacaacataatctttaaaatgcatgtaaccaaaattaatctccaaaaacactttattttatataacttgctttcagtacattaaaattgcttcatacttgtataaaaaaaaaaaaaaaaaaaca

SEQ ID NO: 284652 - DNA, 1000 bp, Homo Sapiens; identical to SEQ ID NO: 115424

SEQ ID NO: 284653 - DNA, 1000 bp, Homo Sapiens; identical to SEQ ID NO: 115425

SEQ ID NO: 284654 - DNA, 1000 bp, Homo Sapiens
gggacctcctctcctaacacctctcagatacactggaccccgtaccgggcgatgtaccagtacaggccccagaacgaagacgagctggagctgcgcgagggggacagggtggatgtcatgcagcagtgtgacgatggctggtttgtgggtgtctcccggaggacccagaaattcggaacgttccctggaaattacgttgccccggtgtgagtggtctccatggcaacttggagccagccaggatggggtggggagcggtggcactcgtgggagggagaggacccccgcccacatcctccttccccaggacctgagctcccagcatctgcagacgacccccgcagcatttccctcggacccccctcgaagccccctggactgattcccacccacgactcacaggcattcctcccacagccctttcatttcctccccaccccactccccaaatacagaggtctgctttgaagcggagaccatttccaggccttattgagaccagaccccaagtcccccacccccatcctgctccagcgtttcctctaacagggaccagctctccgctttgcccccacggggttcctctaaccagaaccagcttcctagcctcgtagagaccaaaggccgcccccgcctgctggggttcctcccagcaccccagcttgctggctgccctctttgccttctggcctccagctgggtgtgggggggcggagcaaggcgggggacagacgcagcaccttcttagcgatctaggcctggcaagagctctggccccaaggcctcctcttcccaggggctgccaagtcctggccctggccctggcatatcaccccgcactgtggggccaggcaccactagcctggctcaaatattccccagggagactgctgtgtgctgcccgcctgcctgctggctctcccccagccccacatcccctctggaagagaatgtaaaataaacctggacacaagggaaaaaaaaaaaaaaaaaaaaaaaa

SEQ ID NO: 284655 - DNA, 1000 bp, Homo Sapiens; identical to SEQ ID NO: 115426

SEQ ID NO: 284656 - DNA, 1000 bp, Homo Sapiens
tttctcttctcaccctcagtttgtatgggaaaatggagatgtcctctccactttatcccacgatatctaaatgaaaaagaaagaaaacccacacacaaagcaaaaactcaagtattaagagcacatatttttgacccagtggaggcttaaaaaaaaaaaaatccaagaacacaattcattttcaccacctctggtgttcagagggggcttttaaaaaagcgtgtatgctgggatacccattaaaaccattttctagaaggctaccatgagctgcactttttggggtgggaaaggtgaatgccagtggggatgcggggggatgagggtaggagggacttatagaaggggatttgtggctgtgggggagaaggttctacagcataagccttatcctgccagccaaggggatttattctaagagaagtgcatgtgaagaatggttgccactgttattagattgacaagatgttaatttctctgtaggttgtaactttaaaaataaatgaaattatttaagggttatgctgcactagtattccttagaggaaacagttctttaaagttaggaaagggagtaggcaggcatgtgttggcaaaggctgttaatagtagttaagtgttaagactgcttttctttaacgttttcatggtaatgcatatttagagcactgtatttttgtcttgttaagaaaatttagcatttctaaaagaaaaaagcaaccctctttcaaactgttaattctgtcacagcctgtatattttagtcatttgtaaatctcttcatacaatagtgacttcttttttgactgatacagtatcttaattacaaggttattttgtacttgtcttaatacactaagtgtaataaaaacggcttgagaaaagtttctcctttctgtgacttcaaataagaactcccagtattgcctaaatcttctaggcaaccctttttccataaggaagagcatggagtgctgtggtcaccagtaatcattttcaa

SEQ ID NO: 284657 - DNA, 1000 bp, Homo Sapiens; identical to SEQ ID NO: 115429

SEQ ID NO: 284658 - DNA, 1000 bp, Homo Sapiens
gcatcactcgtggaggaaaaggcttagtttctggatttgttagtggcataacaggaattgttacaaaaccaatcaaaggagctcaaaaaggaggagcagctggtttctttaaaggtgttgggaaaggtttagtaggagcggtagcaaggccaactggaggcatcatagacatggctagcagtacatttcagggaataaaaagagctacagagacttctgaagtggagagtctgcgacctcctcggttcttcaatgaagatggagttatcagaccgtacaggttgagggatgggactggaaatcaaatgttacaggcatcaaaaagtttgatatgaaaagttaatgcatgactttgcaagtgaaagccaacagtagattttagtcttaaaatttacaaactacgtacagctgtttcagtattttgaatacaaagaaaaccttttgtattggtaacttttaataggaattttaatgaatctggtttttttatagggtgttcttagttctgcactggatttgctagatttgttggaagcctttgtaccttatgtatcctcgtcattggtggtacttacttaaccaattaaaccatttctgttgtggggttattaaaccactggtagcttttataccagatatataatccttatatccaattacacatgaagaaggaaaagcaaaactcaggaacactgctattgtgaattactcttggattcttgtgctttgcctttgaaaatgcttaaatggccatgaccctcttcctgctttattctagtgtagtctttataaaacttgtgggatttgataagcagttcacatgcaaaccagtatcttttaataatacaaagtagcatctggaacaatagacagtttgaagttagaatctgcttagacaactttcttacttggtaaattcgactttttaaaacctggattatgctgtaggtaactagtaatcatatataggctataccagtgtcatgttgtttctgtggtt

SEQ ID NO: 284659 - DNA, 1000 bp, Homo Sapiens
gacatttgtcaaaagttagtaaatactcaggacatgtcagcctctcaggttgatgtagctgtgaaaattaataagaaagttgtgcccctggacttttctatgagttctttagctaaacgaataaagcagttacatcatgaagcacagcaaagtgaaggggaacagaattacaggaagtttagggcaaagatttgtcctggagaaaatcaagcagccgaagatgaactaagaaaagagataagtaaaacgatgtttgcagaaatggaaatcattggtcagtttaacctgggatttataataaccaaactgaatgaggatatcttcatagtggaccagcatgccacggacgagaagtataacttcgagatgctgcagcagcacaccgtgctccaggggcagaggctcatagcacctcagactctcaacttaactgctgttaatgaagctgttctgatagaaaatctggaaatatttagaaagaatggctttgattttgttatcgatgaaaatgctccagtcactgaaagggctaaactgatttccttgccaactagtaaaaactggaccttcggaccccaggacgtcgatgaactgatcttcatgctgagcgacagccctggggtcatgtgccggccttcccgagtcaagcagatgtttgcctccagagcctgccggaagtcggtgatgattgggactgctcttaacacaagcgagatgaagaaactgatcacccacatgggggagatggaccacccctggaactgtccccatggaaggccaaccatgagacacatcgccaacctgggtgtcatttctcagaactgaccgtagtcactgtatggaataattggttttatcgcagatttttatgttttgaaagacagagtcttcactaaccttttttgttttaaaatgaacctgctacttaaaaaaaatacacatcacacccatttaaaagtgatcttgagaaccttttcaaaccagaaaaaaaaaaaaaaaa

SEQ ID NO: 284660 - DNA, 1000 bp, Homo Sapiens; identical to SEQ ID NO: 220856

SEQ ID NO: 284661 - DNA, 1000 bp, Homo Sapiens; identical to SEQ ID NO: 115430

SEQ ID NO: 284662 - DNA, 1000 bp, Homo Sapiens; identical to SEQ ID NO: 220858

SEQ ID NO: 284663 - DNA, 1000 bp, Homo Sapiens
acatgatggatccatggatgtacagcagagagcctggaggtccaaccrcagtagacagaaagggctgaggtccatttgtatgcacacaaagaaaagagtttcttcctttcgaggaaataaaattggcctgaaagacgtcattactctacggaggcatgtggaaacaaaagttagarctaaaatccgtaagaggaaggtgacaacgaaaatcaaccgtcatgacaaaatcaatggaaagaggaagaccgccagaaaacagaaaatgtttcaacgtgcgcaagagttgcggcggcgggcagaggactaccacaaatgcaaaatccccccttctgcaagaaagcctctttgcaactgggtcagaatggcggcagcggagcatcgtcattcttcaggattgccctactggctctacctcacagctgaaactttaaaaaacaggatgggccgccagccacctcctccaactcaacaacattctataactgataactccctgagcctcaagacacctcctgagtgtctgctcactccccttccaccctcagtggatgataatatcaaggagtgtcctcttgctcctcttccaccctctcctcttccaccctcagtggatgataatctgaaggaatgtctctttgtcccgcttccaccctctcctcttccaccctcagtggatgataatctgaaggaatgtctctttgtcccgcttccaccctctcctcttccaccctcagtggatgataatctcaagactcctcccttagctactcaggaggccgaggtggaaaaaccacccaaacccaagaggtggagggtggatgaggtggaacaatcaccgaaacccaagaggcggagggtggatgaggtggaacaatcgcccaagcccaagaggcagagggaggccgaggcacaacaattacccaaacccaagaggcggaggttgagtaagctgagaacacgccattgcactcaagcctgggcaataagaataaatccgtag

SEQ ID NO: 284664 - DNA, 1000 bp, Homo Sapiens
catgcagacggaggtgtctgagctgcggggccaggagggaaagctgaaggaggttgtgctgaagagcagcaaggtcgtgcgggctgacgtctgcgtggtgggcattggtgcagtgcccgccacaggcttcctgaggcaaagcggcatcggtttggattcccgaggcttcatccctgtcaacaagatgatgcagaccaatgtcccaggcgtgtttgcagctggcgatgctgtcaccttcccccttgcctggaggaacaaccgcaaagtgaacattccacattggcagatggctcatgctcaggggcgcgtggcagcccagaacatgttggcgcaggaggcggagatgagcactgtgccctacctctggaccgccatgtttggcaagagcctgcgctacgcgggctacggagaaggcttcgacgacgtcatcatccagggggatctggaggagctgaagtttgtggctttttacactaaaggcgacgaggtgatcgccgtggccagcatgaactacgatcccattgtgtccaaggtcgctgaggtgctggcctcaggccgtgccatccggaagcgggaggtggagactggcgacatgtcctggcttacggggaaaggatcctgagctcacatgcagtagacttgggcaggcaaagggggcaccaagggcacaggccaagccttgggggcaggtgccaatctccagtcccaggatcccccagggcagaacctgagccctcccagtgcttgccttcagccacctggctcccctcctgggaggcctctgctggatccagaagatgctcaaccctcaaggcctctgctgccactgacagctggcactggaggcaggacaagccctgcctcttctccctctattgggactggtcccctgaagaaccctgcaacatgttagacattaccgtaaaattaaaacgcacaaatttgcagaaaaaaaaaaaaaaaaaaaaaaaaaaaaaaaaaaaaaaaaaaaaaaaaaaaa

SEQ ID NO: 284665 - DNA, 1000 bp, Homo Sapiens
gcttgtggagagaagcagtcctttttgcaggtctctagaagaaactgtcagtgccagtgaagaagaaaacgtgggacaccagcaggctgggaatgtgaagcagcaggaaaaatcgcagccctcagagagtcgctggctgaagtatctagaaaaggactcccaagaactggagctggaaggaacaggagtgtgtttcagcaaacagccttcatccaaaatggaggagccaggcccccgcttcagtcaagacctgcctagaaaaaggaagtggagcaggagcaccgtccagcctccgtgcagccgtggcgtgcaggactcgggtggctctgaggtcgcctggggaccccagaagggacaggctggcctgacatggaaggtgaaacaaggcagcagcccctgcctccaggagaactctgcagactgcagtgccggggagctgaggggtcctgggaaggagctatggagtcccatccagcaggttacagccacatcctctaaatgggcgcaatttgtcctgccacctagaaaaagttcacatgtggacagtgagcagccaaggtctcttcagagggaccccaggccagctggtccagcacaggctaagcaagggacccccagagcacaggcctcaagagaaggcctcagcaggcccactgccgctgtccagcttcctcgggccacacaccccgtcacatctgggtctgagaggccttgcgggaagacctcatgggacgcaaggactccctgggcagagggtgggcccctggtcctggaggcacagaatcctcgacccacacgactatgtgacctctttataactggggaagacttcgatgatgatgtgtgatctgggactggcaggttattaatcgagatacacttgttaggagggacagggttcccctaaggcacttttaaagatactctgtaagaaccattaacaataaacttactgtcaatcatttctctctaaaaaaaaaaaaaaaaaaaaaaaaaaaaa

SEQ ID NO: 284666 - DNA, 1000 bp, Homo Sapiens
catgcccacccgtccttttaactgtgcaagcaaaattgtgcatggtcttcgtcgattaataccttgtgtgcagacactactgctccagacgtcgtttccctgataggtagagcagatccataaaaaggtatgacttatacaattaggggaagctaatggagtttattagctgagtatcaatgtctctgcgttgtacggtggtgatgggttttaatgaatatggaccctgaagcctggaaatcctcatccacgtcgaacccacaggactgtgggaagggcagaatcaatccctaagggaaaggaaacctcaccctgagggcatcacatgcactcatgttcagtgtacacaggtcaagtcccttgctctgggctctagttgggagagtggtttcattccaagtgtactccattgtcagtatgctgtttttgtttccttcactccattcaaaaagtcaaaatacaaaatttggcacagcatgccaacgggaggctgtgcccagaccaagcactggaagtgtgcttctaggcatagtcattggttttgcaaaaagagggctcaaatttaaatagaaatttacagctatttgaatggtcagatataccaagaaagaaaaatatttctgttcctcaagaaaacttgctaccctctgtgaggggaattttgctaaacttgacatctttataacatgagccagattgaaagggagtgattttcattcatcttaggtcatgttatttcatatttgtttctgaaggtgcgatagctctgttttaggttttgcttgcgcctgttaattactggaacaccttatttttcattaaaggctttgaaagccaattctcaaaaattcaaaagtgcaaattaacagaacaaaaggaaatccagtagcaactgcagtcaagcgagggagttgacaagataaaccttacgtccattcaagttatatgctggcctatgagagatgagagttgggtcgtttgttctctttgttgatgattt

SEQ ID NO: 284667 - DNA, 1000 bp, Homo Sapiens; identical to SEQ ID NO: 220859

SEQ ID NO: 284668 - DNA, 1000 bp, Homo Sapiens
tcctcctttgccgaccccctccaggtgcgctgcctgagctggagcaggaatggcagacacctgaactctcagctgacaaagaattcaccagggcaacatgtactgactcatgtaccagccccatcctggatcaagaggacagctggagggacagtgcctccccagatgcaggggaaggcctgggtctcaggccagagtcttcccaaaaggccatcagagaggcacaatggggccaaaacagagagagaccttgggccagttccttgacacattctcctgagtcccaccctcatttatgcaaacttcaccaagaaagggatgaatcaacattggcgacctctttggaaaaggatgtgaggcaaaactgctattcagtttgtgatatcatgagacttggaagatattccttctcatctcctctaaccagactttcgacagatattttctgagcaccttctctgcatgtctgcagtgctgtgtaaaatgccctacctttgcatggactattctttctaatcaagaggcgtgtgtggcgaacttggggcagcccctggaagtcttgttctttgaccattacgtctgcggctgcatcaccagataatgagcttcaccactcgtctgcctcctgtgtccttccgcggggagtaaatgtcacttcagcttgccgcatctctaaataggcaaattttcagtgctcagaaaaggacctgatctttgcacaaagtgctttgatggttgcctgcttgagtcactcccaatcccttcctgaagccctttctttataattcttctgttgaaatagccatcatattcacagtactaatcacagcatctcacatttactaaaaacttaccccataccaggaacccagagttgggggggctgtgtcagaattatgtaatttacgtgtcccaataatcctagacgcttcttgaccatctagttttgtcaaatgagaaaactgaggttccaaagaagtcaataaacttgtccaaagtc

SEQ ID NO: 284669 - DNA, 1000 bp, Homo Sapiens; identical to SEQ ID NO: 115415

SEQ ID NO: 284670 - DNA, 1000 bp, Homo Sapiens
aggccctgggagatggtgactttgtcaagtgtctgcactccgtgggccagcccctgacaggacaaggggagccagtgagccagtggccgtgcaacccagagaaaaccctgattggccacgtgcccgaccagcgggagatcatctccttcggcagcggctatggtggcaactccctgctgggcaagaagtgctttgccctacgcatcgcctctcggctggcccgggatgagggctggctggcagagcacatgctgatcctgggcatcaccagccctgcagggaagaagcgctatgtggcagccgccttccctagtgcctgtggcaagaccaacctggctatgatgcggcctgcactgccaggctggaaagtggagtgtgtgggggatgatattgcttggatgaggtttgacagtgaaggtcgactccgggccatcaaccctgagaacggcttctttggggttgcccctggtacctctgccaccaccaatcccaacgccatggctacaatccagagtaacactatttttaccaatgtggctgagaccagtgatggtggcgtgtactgggagggcattgaccagcctcttccacctggtgttactgtgacctcctggctgggcaaaccctggaaacctggtatgtgcggtggggaaggtgtggcacagcctccaggcctcagcaccttaatggtggaaaagctttctccacaacctccaaccatcttctaggactgccaggaggcacagaagtcatgaacgtttgcagtttccagtcccaggcaaaatctcagttcatgtcccaactccaccagtcactggttttgtgatctggctaagttgctcaacttccctaagctttagtttccacatcagttgaatgagggtagttgtgatagtacctatctcatgagattgttggaggattaaatagtgcataaaaagggtttatcacactgacaaatacacagtaaattctcaataataaaaaaaaaaaaaaaaaa

SEQ ID NO: 284671 - DNA, 1000 bp, Homo Sapiens
ggcacatggtgcctccaacctcatctcctccctcttctcttgctttcccaactcggctacgctggccaccaccaatctactggtggatgctggtgggaaaacacagctggcaggcctcttctcctgcacagtggtcctgtcggtgctgctgtggctggggcccttcttttactatctgcccaaggctgtcctggcttgcatcaacatctccagcatgcgccaggtgttctgccagatgcaggaacttccacaactatggcacatcagccgagtggactttgctgtgtggatggtcacctgggtggcagtagtgaccctgagtgtggatttgggcctggctgtgggtgtggtcttctccatgatgactgtggtctgccgcacccggagctcctccaggtcccggggctctgcatcctgagctatccaacaccactgtactttgggacccgtgggcagtttcgctgcaacctggagtggcacctggggctcggagaaggagaaaaggagacttcaaagccagatggcccaatggttgcagttgctgagcctgtcagggtggtggtcctagacttcagtggtgtcacctttgcagatgctgctggggccagagaagtggtgcagctggccagccgatgtcgagatgctaggatccgcctcctcctggctcagtgtaatgccttggtgcaggggacactgacccgggtaggactcctggacagggtgactccagatcagctgtttgtgagtgtgcaggatgcagctgcttatgccctggggagcctgttaaggggcagtagcaccaggagcgggagccaggaggcactgggctgcggcaagtgaggcaggggagctcactgacccaaagatttgcaccgtgtgggtctgacctcatcatgtggagtgcagagggccctgatgacatgtgtgtgatgaggaccatgacccttgaacccccttacctaacgtaactaataaaatgaagctgagagctttggaatcc

SEQ ID NO: 284672 - DNA, 1000 bp, Homo Sapiens
tcaggaatctgtgctgcctttgtgaacagatggaagcatcctgccagcatgctgacgtcgccagggccatgctttctgattttgttcaaatgtttgttttgaggggatttcagaaaaactcagatctgagaagaactgtggagcctgaaaaaatgccgcaggtcacggttgatgtactgcagagaatgctgatttttgcacttgacgctttggctgctggagtacaggaggagtcctccactcacaagatcgtgaggtgctgagcttcagcagcccgctcctgagcacacttcctctgccagttacgataacgtgcgtgaggaggaggcgaccatgggaaagcccggggaacgctctggtcagccttttcctgtgaggatgaggtcggaaggtgcgcccactgcagtatcctgttccgcctctggaagtcctgcaccaatgtttgtcccactcactgtgacctcctcctgtgtggagtctccccttgctcctccttccctgggtgtgattcaggctctagagctggccctgcctctcagccccccacatttctagaacacactgtagctgtgcctctacagactcccgctgcctggcctccacagatcctgctcagattcaccagtaggcaaagcttggccctattagctttttctctccatggctctgtggagatgtgcggagacccttacaggtcgggaggcggaagctgaggagtgggggctgggtggaaggtggacatcggggtttggtggaaatggggctctggggtttgcttccctctagtgtgggcaggggaccttgaagtgaagtcttgagaaaccagtagaatttgccactgtttccaggccttgtcaaccttttcattctttattttgctcctcatttcccatccctcacagtaactgtttaactgctcaattaaatgtgttgtaccgttcggtacttttactgaaacagtgaataaagcactgtgtgatttcaaaaaaaaaaaaaaaaa

SEQ ID NO: 284673 - DNA, 1000 bp, Homo Sapiens
ctcacccaacatgtgcctctgctcaaaaagaccctggaacttttagtttgcagagtcaaagctatgctcactctcaacaattgtagagaggctttctggctgggcaatctaaaaaaccgggacttgcagggtgaagagattaagtcccaaaattcccaggagagcacagcagatgagagtgaggatgacatgtcatcccaggcctccaagagcaaagccactgaggatggtgaagaagacgaagtaagtgctggagaaaaggagcaagatagtgatgagagttatgatgactctgattagaccccagataaattgttgcctgcttctgtgtctctgccagcctgtgatcattttgtgttagagtttgaaatccgctgtttgcctttcttactggtaggatccttttttgttcctctttttttttttttttttttttttttaaagacggggactcgctgtgtttcccaggctggagtgcagtgctgcaatcttggctcactgcaacctccatctcctaggttcaagcgattctcctgcctcagcctcctgagtagctgggacgacaggcacatgccaccatgcccagctaatttttgtatttttagtagatacggggttttaccatgtcggccagatggtctcaatctcctgaactcatgatccacctgcctcagcctcccaaagtgctgggattacaggcatgagccaccgctcccagccatattttgttcttaaagtggggtctttattaacttgtggacatcatggattgtctaacaccatcacagtccctggctcaggattctaatgtagcattatttattggtttggataaacccagctgtgctacactgcagagtaaaatctctgagtcatgattctggactttgggagctagttttgaaactctgatttattgtagaacttaggcttgtaccaattttacaaataaattctgttctaagttcaaaaaaaaaaaaaaaaaaaaaaaaaaaaaaaa

SEQ ID NO: 284674 - DNA, 1000 bp, Homo Sapiens
catggccaactgtgagcgtaccttcattgcgatcaaaccagatggggtccagcggggtcttgtgggagagattatcaagcgttttgagcagaaaggattccgccttgttggtctgaaattcatgcaagcttccgaagatcttctcaaggaacactacgttgacctgaaggaccgtccattctttgccggcctggtgaaatacatgcactcagggccggtagttgccatggtctgggaggggctgaatgtggtgaagacgggccgagtcatgctcggggagaccaaccctgcagactccaagcctgggaccatccgtggagacttctgcatacaagttggcaggaccatggccaacctggagcgcaccttcatcgccatcaagccggacggcgtgcagcgcggcctggtgggcgagatcatcaagcgcttcgagcagaagggattccgcctcgtggccatgaagttcctccgggcctctgaagaacacctgaagcagcactacattgacctgaaagaccgaccattcttccctgggctggtgaagtacatgaactcagggccggttgtggccatggtctgggaggggctgaacgtggtgaagacaggccgagtgatgcttggggagaccaatccagcagattcaaagccaggcaccattcgtggggacttctgcattcaggttggcaggaacatcattcatggcagtgattcagtaaaaagtgctgaaaaagaaatcagcctatggtttaagcctgaagaactggttgactacaagtcttgtgctcatgactgggtctatgaataagaggtggacacaacagcagtctccttcagcacggcgtggtgtgtccctggacacagctcttcattccattgacttagaggcaacaggattgatcattcttttatagagcatatttgccaataaagcttttggaagccggaaaaaaaaaaaaaaaaaaaaaaaaaaaaaaaaaaaaaaaaaaaaaaaaaaaaaaaa

SEQ ID NO: 284675 - DNA, 1000 bp, Homo Sapiens
acaaggaattctaaaaaatgaaaatggggctccagaagatgaagagaattttgaagaagctattaaaaatgtgaacacagcactaaatacaactcagatcccaagcagtattgaagatatatttaatgatgatcgctgcataaatatcaccaaacagactccatcattttggattttagctcgtgccttaaaggaatttgtggccaaagagggtcaaggaaatttacctgttcgaggcacaattcctgatatgattgcagattcaggcaaatatataaaactgcaaaacgtttaccgtgaaaaagcaaagaaagatgctgccgctgtgggtaatcatgttgccaaattgctgcagtccattggccaggcaccagagtccatttcagagaaagaattaaaattactctgcagcaattctgcatttcttcgagtggtaagatgtcgatccttagctgaagaatatggtttggatacaattaacaaggatgaaattatttctagcatggacaatccagataatgaaatagtgttgtacttaatgttacgggctgttgatagatttcataaacaacagggtagatatccaggagtatctaactatcaagttgaagaagatataggaaagttgaagtcttgtctcactggcttccttcaggaatatggtttatctgtaatggtgaaagatgattatgtccacgaattttgccgatatggagctgctgagccacataccattgctgcattcttggggggagctgctgctcaagaggtcatcaaaataatcaccaaacaatttgtaatttttaataatacttacatttacagtggcatgtcacaaacttcagcaactttccagttgtagagtaagcaagcaccttaagtagtgtgttaatgattgaaactgtaattgccttcgggttgtgctttagtctgtaaaattctaaaggagagctgctaaattgttttcttaataaacatttttctcatttgtaaaaaaaaa

SEQ ID NO: 284676 - DNA, 1000 bp, Homo Sapiens
cggtagcgtgggctgacgcctcgctcaatttctcacagggctgcgcaggtttcccccgtctgcgaatggaccactggaggggttcaaaggttcgcgtcccagtacgggaatgagcctctttgatctcttccggggctttttcggctttcctggacctcggagcttcagcccaggaggagggatacgtttccacgataacttcggctttgatgacctagtacgagatttcaatagcatcttcagcgatatgggggcctggaccttgccttcccatcctcctgaacttccaggtcctgagtcagagacacctggtgagagactacgggagggacagacacttcgggactcaatgcttaagtatccagatagtcaccagcccaggatctttgggggggtcttggagagtgatgcaagaagtgaatccccccaaccagcaccagactggggctcccagaggccatttcataggtttgatgatgtatggcctatggacccccatcctagaaccagagaggacaatgatcttgattcccaggtttcccaggagggtcttggcccggttctacagccccagcccaaatcctatttcaagagcatctctgtgaccaagatcactaaaccagatgggatagtggaggagcgccggactgtggtggacagtgagggccggacagagactacagtaacccgacacgaagcagatagcagtcctaggggtgatccagaatcaccaagacctccagccctggatgatgccttttccatcctggacttattcctgggacgttggttccggtcccggtagccttgttaaccctcagaggccttcaagtcctttccacctctcacccattgcccaccattaataagcttagcttctcttgccacctcaggggcttggatatgtggaatagtgaactggggccatgtcagtttgtcactcacccaaactgaccaataaaacctttatttatgctaaaaaaaaaaaaaaaaaaaaaaa

SEQ ID NO: 284677 - DNA, 603 bp, Homo Sapiens; identical to SEQ ID NO: 115437

SEQ ID NO: 284678 - DNA, 1000 bp, Homo Sapiens; identical to SEQ ID NO: 115438

SEQ ID NO: 284679 - DNA, 1000 bp, Homo Sapiens
taaaactatgggaggaaaccttggccaccccaaaaggaaaactaacatgatttgtgtctatgaagtgctggataattagcatgggatgagctctgggcatgccatgaaggaaagccacgctcccttcagaattcagaggcagggagcaattccagtttcacctaagtctcataattttagttcccttttaaaaaccctgaaaactacatcaccatggaatgaaaaatattgttatacaatacattgatctgtcaaacttccagaaccatggtagccttcagtgagatttccatcttggctggtcactccctgactgtagctgtaggtgaatgtgtttttgtgtgtgtgtgtctggttttagtgtcagaagggaaataaaagtgtaaggaggacactttaaaccctttgggtggagtttcgtaatttcccagactattttcaagcaacctggtccacccaggattagtgaccaggttttcaggaaaggatttgcttctctctagaaaatgtctgaaaggattttattttctgatgaaaggctgtatgaaaataccctcctcaaataacttgcttaactacatatagattcaagtgtgtcaatattctattttgtatattaaatgctatataatggggacaaatctatattatactgtgtatggcattattaagaagctttttcattattttttatcacagtaattttaaaatgtgtaaaaattaaaaccagtgactcctgtttaaaaataaaagttgtagttttttattcatgctgaataataatctgtagttaaaaaaaaagtgtctttttacctacgcagtgaaatgtcagactgtaaaaccttgtgtggaaatgtttaacttttattttttcatttaaatttgctgttctggtattaccaaaccacacatttgtaccgaattggcagtaaatgttagccatttacagcaatgccaaatatggagaaacatcataataaaaaaatctgctttttcatta

SEQ ID NO: 284680 - DNA, 872 bp, Homo Sapiens
gtactttcgccatcatagtattctccaccactgttccttccagccacgaacgacgcaaacgaagccaagttcccccagctccgaacaggagctctctatcctctctctattacactccgggagaaggaaacgcgggaggaaacccaggcctccacgcgcgaccccttggccctcccctttacctctccacccctcactagacaccctcccctctaggcggggacgaactttcgccctgagagaggcggagcctcagcgtctaccctcgctctcgcgagctttcggaactctcgcgagaccctacgcccgacttgtgcgcccgggaaaccccgtcgttccctttcccctggctggcagcgcggaggccgcacgatgcctggagttactgtaaaagacgtgaaccagcaggagttcgtcagagctctggcagccttcctcaaaaagtccgggaagctgaaagtccccgaatgggtggataccgtcaagctggccaagcacaaagagcttgctccctacgatgagaactggttctacacgcgagctgcttccacagcgcggcacctgtacctccggggtggcgctggggttggctccatgaccaagatctatgggggacgtcagagaaacggcgtcatgcccagccacttcagccgaggctccaagagtgtggcccgccgggtcctccaagccctggaggggctgaaaatggtggaaaaggaccaagatggcggccgcaaactgacacctcagggacaaagagatctggacagaatcgccggacaggtggcagctgccaacaagaagcattagaacaaaccatgctgggttaataaattgcctcattcgtaaaaaaaaaaaaaaaaaaaaaaaaa

SEQ ID NO: 284681 - DNA, 539 bp, Homo Sapiens
ctttctttttgaggaagacgcggtcgtaagggctgaggatttttggtccgcacgctcctgctcctgactcaccgctgttcgctctcgccgaggaacaagtcggtcaggaagcccgcgcgcaacagccatggcttttaaggataccggaaaaacacccgtggagccggaggtggcaattcaccgaattcgaatcaccctaacaagccgcaacgtaaaatccttggaaaaggtgtgtgctgacttgataagaggcgcaaaagaaaagaatctcaaagtgaaaggaccagttcgaatgcctaccaagactttgagaatcactacaagaaaaactccttgtggtgaaggttctaagacgtgggatcgtttccagatgagaattcacaagcgactcattgacttgcacagtccttctgagattgttaagcagattacttccatcagtattgagccaggagttgaggtggaagtcaccattgcagatgcttaagtcaactattttaataaattgatgaccagttgttaaaaaaaaaaaaaaaaaa

SEQ ID NO: 284682 - DNA, 1000 bp, Homo Sapiens
atgtgggaggggtggggagaaggagtagagaagggctaaggcatgcatgttgttttaggtgtgtttgagatgcctgaagaacatcagtgtatccccctaatttctgtcatgttactcaaaccagacacattgtggccatttctttttcctttatcattcccacgtccggccactgccccattcctttttgttccgtagtagaccctcaatatatatgtgtgtgttggtaaatggccatacacagcagggtattttttattattattttcagttccctcagcgcgtttaccacaaagctgtgcatataggtggcaccatatatggcgtaccttgacctcgaagagaatctacatggacttttatggacctacgtacacaattttagaaatcataataaatgaatgctggagtcctcaagaccccttccagatttgatttgctaggaagactcacaggactcagcattttgtcatactcaatggctatgatttaccacaccgaaagaatccagagcaaactcagcaaaaggctcaaacccaagtccagaggaaaccaggcacaatctttgagaatcttaatgaaatcacacaggatgtgcttcattgaagctccatctgggacttaaaacaacacacgtgagatgtgttccaggaagtcgtcttgagcacccattgctcagagtttatattggacttgctttctagcacataccacaattgtagacctccagaagaacaggaggtgttcagcgtaagacaatctaggcacacggagctacttctcattactgggaacaatgggaaacttcccaaaacctaaagtacggactccagccaaggatgaaccttgcaagatcaaagaatagcagtctctggcctgctctgttctctttttcacagtaacttaaatggaaaaatgctgagttagcttaagtttctgtaacaaacattaagcaaataaaattttctataacagaaataataaaaaaaaaaaaaaaaaa

SEQ ID NO: 284683 - DNA, 1000 bp, Homo Sapiens
ctctggcaggtatgtgcaggatacagtgtgtttcatctgttccggtgccaagaatgagcactgtactgtggcagttccctttggatttgtatgtgctctgggctcatgaagatattgcatcgtgagctgcagcagttgcactctttttcagtgacctaaaaatggcttatttccgaggaatgaaaggctgccatcgttggctgtggatgtggaaaacctttcctagcttagagcatttgtatctacaatacattttaaagtcagagttcgtgttccctgttttaatcacatgactacctgtgccagtacacgaaagggcgctggttggcattcttcttaatgtatttagtaaagatcataagacatcctttaagagtttaaatgtctctgaaacaggcatacaggctctagtcaagaatgaattagagtgaaggaaagctgtgtgacacctggcattcctctctgttcatggagcttctttgaggcttgaagtttgattttactatctagacctctctggctaatacctattctccaaccacctcggttactctgacataggaatttacttcttttccttgagtggaaaacactttagaaaataataacaaacattattataaactaatatatgtgagagtacttagttgaaacaaaaaggaattttagtagacagtattatattatctttgaaaatcaaggagaagtttatgcaactgaaaatgtttacacactgtgctgcaatctactgtttgtgaatgtcaatgtattatcaggaaacatggctatacgatcgcagagttgtatttcctcacaaacttctttacgaagagtgaaatatgtttttgtacctctcagtttcagtcagggacatattttgtgcaatatttctgtgattgtgcctatgcgtgatgagtgaatgcatttcaatcatacattgcctaaatcataacttgatgatgcttgggaaagaatcaacagttaaaacttcatgaagttc

SEQ ID NO: 284684 - DNA, 1000 bp, Homo Sapiens
gaagagaaatcagcactgattatccagaaacattggagagggtacagggaaaggaaaaattttcaccaacagaggcagtctctcatagagtataaagcagctgtcacacttcaaagagcagcgcttaaattcctagcgaagtaccgtaagaaaaagaaactatttgctccttggcgaggactccaagaactcactgatgcacgccgagttgaactgaagaaacgagtggatgactatgtcagaagacatttgggctctccaatgtcagatgtggtcagtagggagctccatgcccaagctcaagaacgactgcaacactactttatgggcagggccctagaagagcgagcccagcagcacagagaagctctgatagcacagatcagcaccaacgttgaacagctaatgaaggcaccaagtctgaaggaggcagaagggaaagaacctgagctcttcctaagtagatccaggcctgtggcagccaaggccaagcaggcccatctcacaaccctgaagcacatacaagcaccctggtggaagaagcttggagaagaatctggagatgagattgatgttccaaaggatgagcttagtatagaattagaaaatttattcattggtggaaccaaaccaccttagtgagtaaccctaagaattgacacaaatctcatattttaggagattatattggttctgcctctggcatgctggtagactagggccatcctaacttattattttccagaggttctcctccagacaagacctgcagtaagcaaagagttatattctacctctctctcaattttctttttcttttctctgtatcctcatccttagccacacacagatttgtgtggcttttattgtagaactaaacttagcatagtgttctgttgtttacatgaagtgtgtttttctttggtttcttctgttttccaactaaatatttttttctaaataaatattttcaacaattgaaaaaaaaaaaaaaaaaaaa

SEQ ID NO: 284685 - DNA, 1000 bp, Homo Sapiens; identical to SEQ ID NO: 220865

SEQ ID NO: 284686 - DNA, 1000 bp, Homo Sapiens; identical to SEQ ID NO: 115442

SEQ ID NO: 284687 - DNA, 418 bp, Homo Sapiens
cttgcccgccgatatctctgccgggtgactagctgcttcctttctctctcgcgcgcggtgtggtggcagcaggcgcagcccagcctcgaaatgcagaacgacgccggcgagttcgtggacctgtacgtgccgcggaaatgctccgctagcaatcgcatcatcggtgccaaggaccacgcatccatccagatgaacgtggccgaggttgacaaggtcacaggcaggtttaatggccagtttaaaacttatgctatctgcggggccattcgtaggatgggtgagtcagatgattccattctccgattggccaaggccgatggcatcgtctcaaagaacttttgactggagagaatcacagatgtggaatatttgtcataaataaataatgaaaacctaaaaaaaaaaaaaaaaaaaaaaa

SEQ ID NO: 284688 - DNA, 1000 bp, Homo Sapiens; identical to SEQ ID NO: 284679

SEQ ID NO: 284689 - DNA, 1000 bp, Homo Sapiens
tgatgagcatgcgcagtgccaatggattgttgatgctacctccaaagacagaacagtacgtggagctccacaaaggcgaggtggtggatgtcatggtcattggacggctatgatggtcaccagcaggagaaagctttgatgcatgtccacatatcattgactgtatcctgtaatatgcaacggcacagctagttttcccgatttggataaaagttgatctgtatagtcaacatcttgaactatatttcaaatgaatttaaatatcttttaaagaaaaaaacacctaaaaataaatcttaacagaaaattctgttctgattatatcaaggcaaatttttcctttcttgcaaattgctttgtgtgttcaatgctaggtctgatagcgatagcttttagtagacagcggtaggtgcctgcagaacttgtgtttttctcatctttaaaatacaactacttatgctcttaaatcaaggctgtctgcttatttatactagcgtaggcaacacttggatttcccttcttagtatgcttcataactgctttacagagagcttttgcttgttctttctcatgtatctcgtgtttatgtgcacagtgccaaaagaagactgactgggtggaggctctgccttgcctcaagaaccatcccctgcagagcatccagggaggtttctcgccccaatagcctcacggcacagtactcttgggcagtaactggacaccttttatttgaagaaacaaactgaagaaaaaatgcttccttaagtgctgacagcctttttaaccaatacatttaaaattgtacagaacaaaaaaataaaatcaaagactgatcttgtacagatattagtgttaccagcattcatgtggaaatcaagagcaaagacaaaataatgttaaacaattctgtaccataacattttctgtaatgatactgaaacttaatgaataaaaaaattccttgatcattatttaaaaatgtaaaaaaaaaaaaaaaaaa

SEQ ID NO: 284690 - DNA, 1000 bp, Homo Sapiens
ctatgcaatattactcagctttttttattgtaaaaagaaaaatcaactcactgttcagtgctgagaggggatgtaggcccatgggcacctggcctccaggagtcgctgtgttgggagagccggccacgcccttggctttagagctgtgttgaaatccattttggtggttggtttttaacccaaactcagtgcattttttaaaatagttaagaatccaagtcgagaacacttgaacacacagaagggagaccccgcctagcatagatttgcagttacggcctggatgccagtcgccagcccagctgttcccctcgggaacatgaggtggtggtggcgcagcagactgcgatcaattctgcatggtcacagtagagatccccgcaactcgcttgtccttgggtcaccctgcattccatagccatgtgcttgtccctgtgctcccacggttcccaggggccaggctgggagcccacagccaccccactatgccgcaggccgccctacccaccttcaggcagcctatgggacgcagggccccatctgtccctcggtcgccgtgtggccagagtgggtccgtcgtccccaacactcgtgctcgctcagacactttggcaggatgtctggggcctcaccagcaggagcgcgtgcaagccgggcaggcggtccacctagacccacagcccctcgggagcaccccacctctgtgtgtgatgtagctttctctccctcagcctgcaagggtccgatttgccatcgaaaaagacaacctctacttttttcttttgtattttgataaacactgaagctggagctgttaaatttatcttggggaaacctcagaactggtctatttggtgtcgtggaacctcttactgctttcaatacacgattagtaatcaactgttttgtatacttgttttcagttttcatttcgacaaacaagcactgtaattatagctattagaataaaatctcttaactatttcaaaaaaaaaaaaaa

SEQ ID NO: 284691 - DNA, 1000 bp, Homo Sapiens; identical to SEQ ID NO: 220866

SEQ ID NO: 284692 - DNA, 1000 bp, Homo Sapiens
gtctttcacccaaaatttgttgggaagaccctagaaaccctgccagagaagagtgtggtgggaaccagctccctgcgaagagcagcccagctgcagagaaagttcccgcatctggagttcaggagtattcggggaaacctcaacacccggcttcggaagctggacgagcagcaggagttcagtgccatcatcctggcaacagctggcctgcagcgcatgggctggcacaaccgggtggggcagatcctgcaccctgaggaatgcatgtatgctgtgggccagggggccttgggcgtggaagtgcgagccaaggaccaggacatcttggatctggtgggtgtgctgcacgatcccgagactctgcttcgctgcatcgctgaaagggccttcctgaggcacctggaaggaggctgcagtgtgccagtagccgtgcatacagctatgaaggatgggcaactgtacctgactggaggagtctggagtctagacggctcagatagcatacaagagaccatgcaggctaccatccatgtccctgcccagcatgaagatggccctgaggatgacccacagttggtaggcatcactgctcgtaacattccacgagggccccagttggctgcccagaacttgggcatcagcctggccaacttgttgctgagcaaaggagccaaaaacatcctggatgttgcacggcagcttaacgatgcccattaactggtttgtggggcacagatgcctgggttgctgctgtccagtgcctacatcccgggcctcagtgccccattctcactgctatctggggagtgattaccccgggagactgaactgcagggttcaagccttccagggatttgcctcaccttggggccttgatgactgccttgcctcctcagtatgtgggggcttcatctctttagagaagtccaagcaacagcctttgaatgtaaccaatcctactaataaaccagttctgaaggtgtaaaaaaaaaaaaaaaaa

SEQ ID NO: 284693 - DNA, 1000 bp, Homo Sapiens; identical to SEQ ID NO: 115444

SEQ ID NO: 284694 - DNA, 1000 bp, Homo Sapiens
tcactggccagctctcaccagcggtgtctggggaagtagttctctttgtatgaagcatacctgtgccagagctgtggttgaggaggagccagttttaggttcgaagaagccattggctcctcacttagccattagacttgaataggatttccttggggtgggttggtctgtcattacccagccttctctgagcatcctaggaaatcacagattgttaaaggaaatgccgcttcactgctgaagacaccatctggcgacagcaaatgcaaaagaggggactctagggtcttcacttttctggggaaatgttcacgacttctcaaggtacgcttagaccatatgtgcattcaggggactcttgtctttgccagcactcctcaggtgagcccgggatggctatctgaaatgtctggaaaatagagtcccttccccaaacatctgacatggccactaaatctttagacttgccttatagatccttccatatcatccccaagtgccccttctgcctcagtcctgttcctctgggcaatagctctagggaaaagtaggtattagactgctgtgcaaaattcagagcaactacttaaaatgctctagaggattcttagccagtctgtgaaagtgggcctcctctgtggtggggctgtttggcttaggagatgctgtagtagtagagataatcaggttctattttaagcaatcagcagagatcaatattgtacagatacaagcaaaggtttaataaatatatatatatatatttatttctgtagttgtgccagggacagactggccaaagaccaaacactgcagggtccccaagaaatttgtccttatatcattgtgtctgagggccagatatgattatgaagctttttccaaagatccagggatgggaatgggagtgggtaggaggggtaatgcggtcattggagtcgggggctggaacattatgagtgctcaataaatataaactaatgagaatggtggtgatgga

SEQ ID NO: 284695 - DNA, 1000 bp, Homo Sapiens
ggcaagttatttaacacccctgagcttctttcttcatctgcaaaatggaacccctccccttcctttgaattgctgagcccattacgcgaggtgacggcggaatcccgctgtaagctgctcagctggctgatcccggtgcaccgccaattcggcctctccttcgagtcgctgtgcctgacggtgaacactctggaccgcttcctcaccaccacgccggtggctgcagactgcttccagctgcttggggtcacctccttgctcatcgcttgcaaacaggtggaggtgcacccgccgcgcgtgaagcagcttctggccctctgctgcggcgccttctcccggcagcagctctgcaacctcgagtgcatcgtgctgcacaagctgcacttcaccctgggtgcgcccaccattagcttcttcctggagcatttcacgcacgctcgcgtggaggcggggcaggctgaggcctccgaagctctggaagcgcaagccctggcgcggggggtggcagagctgagtctggccgactatgccttcaccagctactccccttccctcctggcgatctgctgcctggcgctggcggaccgcatgctgcgggtctcgcggcccgtggacttgcgactgggagaccacccggaggcggcgctggaggactgtatgggcaagttgcagctgctggtggccataaacagtacttccttgactcacatgctgcccgttcagatctgcgagaagtgcagcctgcccccgagctcgaaataaaacagatccttcgtttccttttagtccctggcccggctgctggacctctcccgtagcctcagaagagtgcagtactggtccacagagaaggcttcaggacctgcttggtcagctgcaggttgtaaatagtgtacgatactagcatctggtattttatttattttgcagcgagcacatgaggaagctgagtctttcaccaataaacagttgtggtttgtctaaaaaaaaaaaaaaaaaa

SEQ ID NO: 284696 - DNA, 1000 bp, Homo Sapiens
ggacggcgggatttaaatagatcataactggacatctggaaaacggggagtttgtgatgaaattaccctgctaatgccaggttcttgcaaactttgaaaaacattatattctaaacctcatttactgtttgggtaaaaattctaagctgaatgagagtttctgtataacataactggtttctttctttttttgagatggagtcttgctctgttgcccaggctggagtgcagcggcatgatctcgactcactgcagcctccgcctcctgggttcaagtggttctcctgcctcagcctccctagtagctgggattacaggtgcacaccaccacacctggctaatttttgtatttttagcagacagggtttcaccatgttggccaggctcgtatcaaacccttgaccccaggtgatctgcctgcctcagcctcccaaagttctgggattacaggcatgagccaccatgcccagccaatgtaactggtttctaagagtttagccacagtagcttctagagataggaaattagatttagtgggtgggaagaggccctgatgctggtctttccagagcttatagttgctaacacttttctttgtaaagaagtttaccttttgactggaaccagatggcactgagaaaaagaatgagaaccaccttattcttctgaaaaagactttcttctcatccagtaatttgggctaaaaaatggaaagatgttgatgacttgaagtgatgcaagaatggacaagtcagggaagtcattgggaacatggatgaggttgtaagcattggtacagtgtcctgtttcctgacttttttgagagaaatgtctacttttcctgttttctcttggggacttttgaccctagagtagccctggtgttatattttagatatcccaagctatatcagactttacctgaatatactggagttacttattatcccccattctataccccaataaactcagtttggggcttcttaaaaaaaaaaaa

SEQ ID NO: 284697 - DNA, 588 bp, Homo Sapiens
ggcatggcggccaggcagatctgggcacggacgggtgccgcgctctgcaggcaaccttccgccgccccgccgccagcacctctctgggtaagagctgggttccgacagcagctcagcttaaccctctgccctgctaacgagggaaactgcggcggctccgcgcccagcacgcccggtaggccggagagagcggcgaggccttcggtgagcgaagagttaaccgcggcggagcgacagatcgcggagctgcacgctgccgcctgcgcggctggccagctaaactatgtggatccagctactggctatgtggtgctcacacagattgcccacttgcaaagaggtgaatgttgtggctctgcgtgcagacattgtccatatggtcaagtcaatgttaaagatccatctaaaaagaagcaattcaattcatatttttatgtttgacaagaatttcatctctgttccctaactgtgcttgtattttttaaaaaataaagccccaattcagaattgctggattattagtacttgaacactagtttaatcctaaatacatatattaaaagaacatcaataaaatgaaaaagctaa

SEQ ID NO: 284698 - DNA, 1000 bp, Homo Sapiens
ggatttttcttttccattttgagttttactaatgccttccgcttttattggattcatttcttttgctactttttaacatggaagctgaggtccttcatttcaaacctttgggtttttttcccctaatatggggaagagatgttaatgttaaaaatctatctgagaactgctttaattacctcccatcaagcttgatgtggtttcatttttttttttgagacagtgtcttgctctgtcatccaggttggagtgcagtggcgcggtctcggctcactgcaagctctgcctcctgggttcacaccattctcctgcctcagcctcccgagtagcttggactacaggcgcctgccaccatgcctggctaattttttgtatttttagtagagacgaggtttcaccgtgttagccaggatggtctcgatctcctgatcttgtgatccgcctgcctcagcctcccaaagtgctgggattacaggcgtgagcccagccgatgtggtttcattttagttgagtttaggatgttttccagttaaaaaaattcttcttgacacatggctctttttaaatgtatgttatttaattcctaaatatttggggattttgcttatctttctggtagtttctgcaataattccattgtggtcagagtacattaagacttgaattatttacatttattgagatttgctttgtggcccagaatatgggctatcttggtatgagttacatgttcacttgaaatgtatactgtactctcgtttgatgaaggggttctacaagtgttgattaggtaaaaatggttgatgttatttaagttttttctatctttattgacattctgtggttttggttccagcaattattttaagaggattgttgacatctctgaatattaaattggatttacttctctgcagttctgtcagattttgcttcacatattttagtatgtttttattaggtgaataataaatatttcctattttatgtccaaaaaaaa

SEQ ID NO: 284699 - DNA, 1000 bp, Homo Sapiens
gagcagctggtgtctcggcagtagatgcggcggatcataaggacttgggttttgagcgccctgcaggaagccactggccgcgtccagggtcacctgtgcctggtcgttagtccctcacaatgctgtcactttgtgacgctcttgtgcaggattaaatgtgaacagcagagacgtgggtgatgcgctgcctcgtcagatgatggtcagttgtccaagcgggctgccttgctcttggtggcctcatcatccagggctcacacactggatggttgggccacagtcgcggtaccccccgggctgcaggctttccaccctgcttagcagggctccagggctccgggtagagcagggggtccctcccttggcacttccccagggaggagcacgaccgtgctcagctgcggtcaggctgctgctcttagctgtctttccttctaacactcaggcttcccttcctgcctcctgggtcgctgaagaaggtcaggtccacagaaaaggcctggggagagaatggtggggacacttgcctggcctttgtgttagcgctcagcacacatgtgtccagtgtaaagtccaccaagattagcagggcatggtagctgccgcctgtaatcccagcttctcaggagtctgaggcaggagaattgcttgaacctgggaggcggaggttgtagtgagccaagatcgtgcctctgcactccagcctgggcgacagagtgagactccatctcaaaaaaaaaaaagtccgtcgagagagcaggtggcggatgcagctgagagctccaggaatgggagggccacgtggtagccactggcagccttgactgaaagatgaaggagtccatggtgctaggaggaggagttgcatcccagcaggctcagctcctggagctgcctctctgcactctgaagggaggcccagtggctgcaatattcttctttgggaagtacaatgccaagtaaataaagatatttggggtcattctagttaaaaaaaaaa

SEQ ID NO: 284700 - DNA, 1000 bp, Homo Sapiens
gcagtacaagctggtaaggccgcgtgtggtcaaccactcttcattccacgccatgggcgccttgtgctacctgaaccgaggtgacggcccatgccacccggcagccggcgtgaacatccacccggtggcctcctacttcctcagttcccctttgcacccgcagccaaaaacgtatttagccgaaaggaataaactggtggtcccggcggtggagaaatacccttctggagtagctttcaaagacctgtcccaggctcagctgcagcattacatgaaagaaagcgcccagcttctgtcggaaaaaatcgcgttcaaaacctcggatttcagccgaggctctcctaatgccaagcccaaagttttcacttgcgaagtctttaatgcgcactataacttaacccgtcacatgccagtgcacacaggagccagacccttcgtttgcaaagtgtgcggaaaaggtttcaggcaagcaagcaccctgtgcaggcacaagatcattcacacgcaggaaaaacctcacaaatgtaaccagtgtggcaaagcatttaatagaagttccactttaaacactcatacccgaatacacgcgggctacaaaccgtttgtgtgtgaattctgtggcaaagggtttcatcaaaaagggaattacaaaaaccacaagttgacccacagcggggagaagcagttcaagtgcaatatctgcaacaaggctttccaccaggtttacaacctcaccttccacatgcacacccacaacgacaagaagcctttcacctgccccacgtgcggcaagggtttctgcaggaactttgacctcaagaagcatgtccgcaagctgcacgacagcagcctggggctggcccgcacgccagctggcgaaccaggcactgaaccgccgcccccgctaccgcagcagccgccgatgacgctgcctcctctgcagccgccgctgccaaccccggggcccctgcagcccgggctccaccagggccaccagtga

SEQ ID NO: 284701 - DNA, 1000 bp, Homo Sapiens; identical to SEQ ID NO: 220869

SEQ ID NO: 284702 - DNA, 1000 bp, Homo Sapiens
atcacaacttttctgctacctggttttcattattttcccacaattcttttgaaagatggtaatcttttctgaggtttagcgttttaagccctacgatgggatcattatttcatgactggtgcgttcctaaactctgaaatcagccttgcacaagtacttgagaataaatgagcattttttaaaatgtgtgagcatgtgctttcccagatgctttatgaatgtcttttcacttatatcaaaaccttacagctttgttgcaaccccttcttcctgcgccttattttttcctttcttctccaattgagaaaactaggagaagcatagtatgcaggcaagtctccttctgttagaagactaaacatacgtacccaccatgaatgtatgatacatgaaatttggccttcaattttaatagcagttttattttattttttctcctatgactggagctttgtgttctctttacagttgagtcatggaatgtaggtgtctgcttcacatcttttagtaggtatagcttgtcaaagatggtgatctggaacatgaaaataatttactaatgaaaatatgtttaaatttatactgtgatttgacacttgcatcatgtttagatagcttaagaacaatggaagtcacagtacttagtggatctataaataagaaagtccatagttttgataaatattctctttaattgagatgtacagagagtttcttgctgggtcaataggatagtatcattttggtgaaaaccatgtctctgaaattgatgttttagtttcagtgttccctatccctcattctccatctccttttgaagctcttttgaatgttgaattgttcataagctaaaatccaagaaatttcagctgacaacttcgaaaattataatatggtatattgccctcctggtgtgtggctgcacacattttatcagggaaagttttttgatctaggatttattgctaactaactgaaaaaaaaaaaaaaaaaaaaaaaa

SEQ ID NO: 284703 - DNA, 1000 bp, Homo Sapiens
tcattaaagaaaatggttttctaccatttcgactggatcatatcagaaagatggcatatcagatatgcaagtctgtgaattttttgcacagtaataagttgactcacacagacttaaagcctgaaaacatcttatttgtgcagtctgactacacagaggcgtataatcccaaaataaaacgtgatgaacgcaccttaataaatccagatattaaagttgtagactttggtagtgcaacatatgatgacgaacatcacagtacattggtatctacaagacattatagagcacctgaagttattttagccctagggtggtcccaaccatgtgatgtctggagcataggatgcattcttattgaatactatcttgggtttaccgtatttccaacacacgatagtaaggagcatttagcaatgatggaaaggattcttggacctctaccaaaacatatgatacagaaaaccaggaaacgtaaatattttcaccacgatcgattagactgggatgaacacagttctgccggcagatatgtttcaagacgctgtaaacctctgaaggaatttatgctttctcaagatgttgaacatgagcgtctctttgacctcattcagaaaatgttggagtatgatccagccaaaagaattactctcagagaagccttaaagcatcctttctttgaccttctgaagaaaagtatatagatctgtaattggacagctctctcgaagagatcttacagactgtatcagtctaatttttaaattttaagttattttgtacagctttgtaaattcttaacatttttatattgccatgtttattttgtttgggtaatttggttcattaagtacatagctaaggtaatgaacatctttttcagtaattgtaaagtgatttattcagaataaattttttgtgcttatgaagttgatatgtatctgaacagtttgttctaagtaccatttttcttcctacttctattaaagaatggacatag

SEQ ID NO: 284704 - DNA, 859 bp, Homo Sapiens
gctgccgcagcctgcgccatttccgatgccaggcaccctcaaggcacagaggctggggctcatgttgggggcacttggcctctccaggcctcgaaggcttctcctgggctgatgcgagctggggaacgggagggacggacgtgggagcgagaacgtcacactggaggcagctggtggcacgatgggggacagagtgaaaggtagcaagtcaaggcgccctgatctggttgtggaagtggcccatcccaaaataatccatgaatctggggcacaaatcctgcgccatgccaatctcctgagccttcgtgtcaccatggccacacaccccgatggcttccggcttgagggacccctggctgcagcccacagccctgggccttgcactgtgctctacgaaggccctgtccgtgggctctgcccctttgccccgcgaaattccaacaccatggcggcggctgccctggctgcccccagcctgggcttcgatggggtgattggggtgctcgtggctgataccagcctcacggacatgcacgtggtggatgtagagctgagcggaccccggggccccacgggccgaagctttgctgtgcacacccgcagagagaaccctgccgagccaggcgcggtcaccggctccgccaccgtcacggccttctggcggagcctcctggcctgctgccagctcccctccaggccggggatccatctctgctgagaagcctcctccctcccgagacaagatcatctgcctggcctctcaccaccaccatcccacccctgccctgccccacttccccagggtctcccttctgactcagtaaagatcaccgctgcctccaccaaaaaaaaaaaaaaa

SEQ ID NO: 284705 - DNA, 1000 bp, Homo Sapiens
tcatcctctttgggaacagctggacacagagccaactccccgtctctgttcggcacggaaggaaaaccaaagatggagcctgcggccagcagccaggcggccgtggaggagctaaggacacaggtccgcgagctgaggagcatcatcgagaccatgaaggaccagcagaaacgagagattaaacagttattgtctgagttggatgaagagaagaaaatccggcttcggttgcagatggaagtgaacgacataaagaaagctctacaatcaaaatgaatacttgatcaatgaaatgtcacattattcatcctgagtccgagactcaaattttctgccccagccaaaataatcttgtgccaaaagattaaaggtttgcctcaaaatgtccctgtttgaaagattagcacaaaagtcttgatagcacaacacaaattccatccaagaggagaatcttccccagggtttagtcctggggctggcactcgttgtgacttacacagagcaaaattgtgctaaaggcttttctactctgagatctcaatgcgaaatgaaaactcaggcagtttagtccatagtggtactattttgatgatattttccattaataaaatgtaatttcagattattcgtttacaagctttataattttatgattttttaatcgtgttttgtcacagacttccctagtgtttgtactacacgtagtcagaagcgagtgtccttttcttttgcttcaggctaagagctgcctcgctctttgtccccccattaggattctattacatatgcaattgtaggttcaacctgtccctttccctgccagcaaaccccaccaccctaagagaaattttagcttatatatgacggtatatttaccaaaagagaaagagaaaatctggtatttgcaatgatctgtgccttctttttaccaccctcttgattggagcttttgtgatgcagctaccatgattcaaaaaaattaaaaattaaaaaaaaaaaa

SEQ ID NO: 284706 - DNA, 1000 bp, Homo Sapiens
gtgaggctgacaatggcctgggggcccagcacagtaaagtggtgacactcaatgttacaggaacttccaggaacagaacaggccttaccgctgcgggaatcacggggctggtgctcagcatcctcgtccttgctgctgctgctgctctgctgcattacgccagggcccgaaggaaaccaggaggactttctgccactggaacatctagtcacagtcctagtgagtgtcaggagccttcctcgtccaggccttccaggatagaccctcaagagcccactcactctaaaccactagccccaatggagctggagccaatgtacagcaatgtaaatcctggagatagcaacccgatttattcccagatctggagcatccagcatacaaaagaaaactcagctaattgtccaatgatgcatcaagagcatgaggaacttacagtcctctattcagaactgaagaagacacacccagacgactctgcaggggaggctagcagcagaggcagggcccatgaagaagatgatgaagaaaactatgagaatgtaccacgtgtattactggcctcagaccactagccccttacccagagtggcccacaggaaacagcctgcaccatttttttttctgttctctccaaccacacatcatccatctctccagactctgcctcctacgaggctgggctgcaggattctgaacccaagaaagaacaaagttcaagattttccatgtctttgtaacacttagccctgtgcaaatcagagtatgtgagtggaagaaggggtgagtcctaactgtacatctcggatataacaaatgtgcaaattctgattgattgccctgtaaaatgaattattctcatgcagtgctctacttgacttttatctttgaattcacaactaaaaacccatagcccagaaatctaaaaaaagtaattttagtggagcctttgaaaataaaagaccattggaaaaagtaaaaaaaaaaaaaaaaaaaaaaa

SEQ ID NO: 284707 - DNA, 1000 bp, Homo Sapiens; identical to SEQ ID NO: 115446

SEQ ID NO: 284708 - DNA, 1000 bp, Homo Sapiens
gggaaagacaacacgcacctacctggaggacatgagcacatggggcctggaggtgggtttcgcccgcacacccctgtgggcatttgcacatgttccaaggctacgcgctcccctttctagaagcccatattagcctcaagccttctaatgagtccttgctgtcctggattttgatgatggaaggggataccttggctgccctatggctgtcgcttggtgagtgagtgcattaatgtcccttcgtgcaaagctctcaagtgggtgacgtgtgccggaccttctggccgccgtcctggtgccctggccaccttctccacctgttctgtgtccccaggtggccactacagcctgtcaatggcctctcttccctctgggttctggttgggcttggcctgtaggaggcgctagtgggagacagggggcaggccagagagagagggcagatggactctgccacctcctcccagctggacaacaggggtggtggctgcgttcccccgccaaggccctctctcagcagctccctggagtctgcgtctgccctttcccttctcccaagacggggtggcgggggtggcactcccactgctgctgtcctgggatgcctctccagccactgggctcccttcaccctgcccacagcatggggagaggccgtcgtgaaactctccttagccactcacctcaatacccagcagacgcccctttcctcctggtgccctgaaggctgcgatggccccctgaatcaggagcccagctgatcggacgaggtgcactttggcacctcaaagctgggagccaggccctggagaggcccactccttccacccgaggaccgcccatattcccatagggtgtgcaggggtggacagcaggcgttgctctggcatgccgcccttttggctactttgtgatcaaagccagcctattttgacatttcatgtcttcagttttatttttatttattttaaaatattcttgcagaaaaaaaaaaaaaaaa

SEQ ID NO: 284709 - DNA, 1000 bp, Homo Sapiens; identical to SEQ ID NO: 220871

SEQ ID NO: 284710 - DNA, 1000 bp, Homo Sapiens
aaacgtgtttcaagaccaaaaaacacaataccaggcatacatttggcagaataaatgaaccaggcttcagcagaagaaacacttcctataaatctcgcccaaacaggaaaggagaagcattagggtgtccgactacgtgggtttcatagctgtggaaaagccaaaggggagactcctgaagaaaggcggtgaagactgtgaagagcgggtcaggaagatgagcacagcactgctactcctgtgggcacagggacagcatgtctccagccagcgccaccttgtttaatacatgggaactcactgaaattcattctgtattttgcccgcaaagttttaaagctttcatccacagtcaggaattaaacttataccaatgagagcctcacacattcaaggatgtactaagcactacaggcctcacagaaacagagatcccatcttggagttttcagtaccacatgggagataaagggttttgaacatgaaatgacaaaaacaacagcaagaagaaaattcttgtcctttttcattactatcagactcaaataaatgtcttggctcttacattacattcattcttcaaccattgtggtctggcttccacttccttcacttcaccaacatggctctgccaaaggaagcccgtgatctctaggccatcactttaattgatctttctacaacatttatcctggttgttaagccctccttacaacattcttctctctttgtttttatagctccatctctcctgcttctttaacttgataatgcatacttgatttttctatttgttatttcataaaccaattaatacacagataaaatgactgtatatcaaaccatgtttgtatagaaaaaatggattttggatgcctctcatatgtaattagttctattaaacatattaattgtattgtttaatttgtcaggtttttgacagaattttgtttacaagtaataaaaattttatctccaattttcaataattacacccatt

SEQ ID NO: 284711 - DNA, 1000 bp, Homo Sapiens
agggtgtgcccgcaggcctcgctgactgccacccacagcagcacactggcggaggaggtggtggcactgctgcacacgctgcactccctgactcagtggaatgggctcatcaacaagtacatcaactcccagctccgctccatcacccacagctttgcgggaaggccttccaaaggggcccagttagaggactacttccctgattccgagaaccctgaagtggggggcctcatggcggtcctggctgtggttggaggcatcgatggtcgcctgtgcctgggcggccaagttgtgcacgatgactttggagaagtcaccatgactcgcatcaccctgaagggcaaaatcaccgtgcagttctctgacatgcggacgtgtcacgtttgcccattgaatcagctgaaaccactccctgccgtggcctttaatgtgaacaacctgcccttcacagagcccatgctgtctgtctgggctcagttggtgaacctcgctggaagcaagttagaaaagcacaaaataaagaaatcgactaaacaggcctttgcaggacaagtggacctggacctgctgcggtgccagcagttgaagctatacatcctgaaagcaggtcgggcgctgttctcccaccaggataaactgcggcagatcctgtctcagccagctgttcaggagactggaactgttcacacagatgatggagcagtggtatcacctgaccttggggacatgtctcctgaagggccgcagccccccatgatcctcttgcagcagctgctggcctcggccacccagccgtctcctgtgaaggccatatttgataaacaggaacttgaggaaagaatgtccagatgttgtttttggagaagaagaactacaaagttagagcaaatactcttatttataagaagaatgaactcagtgtgtgagaaggagaatacaaatgcaacagcctcaaattagcagtggatgcctactgggcttctgcaaccgctttccacgg

SEQ ID NO: 284712 - DNA, 1000 bp, Homo Sapiens; identical to SEQ ID NO: 115447

SEQ ID NO: 284713 - DNA, 1000 bp, Homo Sapiens; identical to SEQ ID NO: 115448

SEQ ID NO: 284714 - DNA, 1000 bp, Homo Sapiens; identical to SEQ ID NO: 115449

SEQ ID NO: 284715 - DNA, 1000 bp, Homo Sapiens; identical to SEQ ID NO: 115450

SEQ ID NO: 284716 - DNA, 1000 bp, Homo Sapiens; identical to SEQ ID NO: 115451

SEQ ID NO: 284717 - DNA, 1000 bp, Homo Sapiens
ctcggttggtgacagagggggtgggacaggggcggggggttccccctgtacataccctgccataccaaccccaggtattaattctcgctggttttgtttttattttaatttttttgttttgatttttttaataagaattttcattttaagcacatttatactgaaggaatttgtgctgtgtattggggggagctggatccagagctggagggggtgggtccgggggagggagtggctcggaaggggcccccactctcctttcatgtccctgtgccccccagttctcctcctcagccttttcctcctcagttttctctttaaaactgtgaagtactaactttccaaggcctgccttcccctccctcccactggagaagccgccagcccctttctccctctgcctgaccactgggtgtggacggtgtggggcagccctgaaaggacaggctcctggccttggcacttgcctgcacccaccatgaggcatggagcagggcagagcaagggccccgggacagagttttcccagacctggctcctcggcagagctgcctcccgtcagggcccacatcatctaggctccccagcccccactgtgaaggggctggccaggggcccgagctgcccccacccccggcctcagccaccagcacccccatagggcccccagacaccacacacatgcgcgtgcgcacacacacaaacacacacacactggacagtagatgggccgacacacacttggcccgagttcctccatttccctggcctgccccccacccccaacctgtcccacccccgtgccccctccttaccccgcaggacgggcctacaggggggtctcccctcacccctgcacccccagctgggggagctggctctgccccgacctccttcaccaggggttggggccccttcccctggagcccgtgggtgcacctgttactgttgggctttccactgagatctactggataaagaataaagttctatttattct

SEQ ID NO: 284718 - DNA, 1000 bp, Homo Sapiens; identical to SEQ ID NO: 117136

SEQ ID NO: 284719 - DNA, 1000 bp, Homo Sapiens; identical to SEQ ID NO: 115452

SEQ ID NO: 284720 - DNA, 1000 bp, Homo Sapiens; identical to SEQ ID NO: 220874

SEQ ID NO: 284721 - DNA, 1000 bp, Homo Sapiens
tcttttgcttatatgttaatagttttaccctctgcattggagagaggagtgctttactccaagaagctttcctcatggttaccgttctctccatcatgccagccttctcaacctttgcagaaattactagagaggatttgaatgtgggacacaaaggtcccatttgcagttagaaaatttgtgtccacaaggacaagaacaaagtatgagctttaaaactccataggaaacttgttaatcaacaaagaagtgttaatgctgcaagtaatctcttttttaaaactttttgaagctacttattttcagccaaataggaatattagagagggactggtagtgagaatatcagctctgtttggatggtggaaggtctcattttattgagatttttaagatacatgcaaaggtttggaaatagaacctctaggcaccctcctcagtgtgggtgggctgagagttaaagacagtgtggctgcagtagcatagaggcgcctagaaattccacttgcaccgtagggcatgctgataccatcccaatagctgttgcccattgacctctagtggtgagtttctagaatactggtccattcatgagatattcaagattcaagagtattctcacttctgggttatcagcataaactggaatgtagtgtcagaggatactgtggcttgttttgtttatgtttttttttcttattcaagaaaaaagaccaaggaataacattctgtagttcctaaaaatactgacttttttcactactatacataaagggaaagttttattcttttatggaacacttcagctgtactcatgtattaaaataggaatgtgaatgctatatactctttttatatcaaaagtctcaagcacttatttttattctatgcattgtttgtcttttacataaataaaatgtttattagattgaataaagcaaaatactcaggtgagcatcctgcctcctgttcccattcctagtagctaaaaaaaaaaaaa

SEQ ID NO: 284722 - DNA, 1000 bp, Homo Sapiens; identical to SEQ ID NO: 220875

SEQ ID NO: 284723 - DNA, 1000 bp, Homo Sapiens; identical to SEQ ID NO: 220876

SEQ ID NO: 284724 - DNA, 1000 bp, Homo Sapiens
aaacacaatctgctaggaacttgggaaaggaatcagagagctgcccttcagcgattatttaaattattgttaaagaatacacaatttggggtattgggatttttctccttttctctgagacattccaccattttaatttttgtaactgcttatttatgtgaaaagggttatttttacttagcttagctatgtcagccaatccgattgccttaggtgaaagaaaccaccgaaatccctcaggtcccttggtcaggagcctctcaagattttttttgtcagaggctccaaatagaaaataagaaaaggttttcttcattcatggctagagctagatttaactcagtttctaggcacctcagaccaatcatcaactaccattctattccatgtttgcacctgtgcattttctgtttgcccccattcactttgtcaggaaaccttggcctctgctaaggtgtatttggtccttgagaagtgggagcaccctacagggacactatcactcatgctggtggcattgtttacagctagaaagctgcactggtgctaatgccccttggggaaatggggctgtgaggaggaggattataacttaggcctagcctcttttaacagcctctgaaatttatcttttcttctatggggtctataaatgtatcttataataaaaaggaaggacaggaggaagacaggcaaatgtacttctcacccagtcttctacacagatggaatctctttggggctaagagaaaggttttattctatattgcttacctgatctcatgttaggcctaagaggctttctccaggaggattagcttggagttctctatactcaggtacctctttcagggttttctaaccctgacacggactgtgcatactttccctcatccatgctgtgctgtgttatttaatttttcctggctaagatcatgtctgaattatgtatgaaaattattctatgtttttataataaaaataatatatcagacatcga

SEQ ID NO: 284725 - DNA, 842 bp, Homo Sapiens
ctggggcccgctgtcggtctcccgtcctccgacatcttgtctggaacttccgcctggcagtctccagtaggagtggagctctgtgcggcgtagtttggtggaaaaacgggccttgcgtcggcctcacccccagtgtttgtgtttcagaatgaagactattctcagcaatcagactgtcgacattccagaaaatgtcgacattactctgaagggacgcacagttatcgtgaagggccccagaggaaccctgcggagggacttcaatcacatcaatgtagaactcagccttcttggaaagaaaaaaaagaggctccgggttgacaaatggtggggtaacagaaaggaactggctaccgttcggactatttgtagtcatgtacagaacatgatcaagggtgttacactgggcttccgttacaagatgaggtctgtgtatgctcacttccccatcaacgttgttatccaggagaatgggtctcttgttgaaatccgaaatttcttgggtgaaaaatatatccgcagggttcggatgagaccaggtgttgcttgttcagtatctcaagcccagaaagatgaattaatccttgaaggaaatgacattgagcttgtttcaaattcagcggctttgattcagcaagccacaacagttaaaaacaaggatatcaggaaatttttggatggtatctatgtctctgaaaaaggaactgttcagcaggctgatgaataagatctaagagttacctggctacagaaagaagatgccagatgacacttaagacctacttgtgatatttaaatgatgcaataaaagacctattgatttggaccttcttcttaaaaaa

SEQ ID NO: 284726 - DNA, 1000 bp, Homo Sapiens; identical to SEQ ID NO: 220877

SEQ ID NO: 284727 - DNA, 1000 bp, Homo Sapiens; identical to SEQ ID NO: 115453

SEQ ID NO: 284728 - DNA, 1000 bp, Homo Sapiens
aggtggccctcaggcctggcccctgctgctggccagctgcctggtgcccggggcgctccagctcgcctccctgcctctgctccctgaaagcccgcgctacctcctcattgactgtggagacaccgaggcctgcctggcagcactacggcggctccggggctccggggacttggcaggggagctggaggagctggaggaggagcgcgctgcctgccagggctgccgtgcccggcgcccatgggagctgttccagcatcgggccctgaggagacaggtgacaagcctcgtggttctgggcagtgccatggagctctgcgggaatgactcggtgtacgcctacgcctcctccgtgttccggaaggcaggagtgccggaagcgaagatccagtacgcgatcatcgggactgggagctgcgagctgctcacggcggttgttagttgtgtggtaatcgagagggtgggtcggcgcgtgctgctcatcggtgggtacagcctgatgacctgctgggggagcatcttcactgtggccctgtgcctgcagagctccttcccctggacactctacctggccatggcctgcatctttgccttcatcctcagctttggcattggccctgccggagtgacggggatcctggccacagagctgtttgaccagatggccaggcctgctgcctgcatggtctgcggggcgctcatgtggatcatgctcatcctggtcggcctgggatttccctttatcatggaggccttgtcccacttcctctatgtccctttccttggtgtctgtgtctgtggggccatctacactggcctgttccttcctgagaccaaaggcaagaccttccaagagatctccaaggaattacacagactcaacttccccaggcgggcccagggccccacgtggaggagcctggaggttatccagtcaacagaactctagtcccaaaggggtggccagagccaaagccagctactgtcctgtcctctgcttcct

SEQ ID NO: 284729 - DNA, 1000 bp, Homo Sapiens
tggaatttctgtatgtttatacttgtaaatatgattgttgttagtgctcctgttgctcatggtgtcctgcctcgcatttgtgattctgttaatgacatgtatcttaactaatttcttagtggtgttgtaatagggagatggggcaggtggggggttatttgtaccactgaatcttcattaatttggttctttactgttttgaggggagaaagaacgtgaaatggtttgtgtattattgaattttaagcaatattttagaagctgtgtgactgctttaataactttttcccagtgttatttgaatcatactacccgttatactaaagctgaatgacaattgtgtgaaagttactgccttcataagatcaagtcaccactgttacacagctgacatatagtgtattacctttgcagctagtaaactataaagtttagatattgaatctcgttacagggttatttatataatgtgacattattcagtactgacagactacatgaagtagttttaaaatctagtgctatttttattttaaaggttagcaatgaggaggaaatgtgatctggctgtgtttgtcttctgtacaaagcctgaagtgcttatggttttttggctaacagccacagagggcaaagtttaagactttcttgtaaggactaactgttcttttcaagctactgtttgtttttctaaaagcaggatttgcttccgtaggaggcaagttccttgatgtggaatagtgcaacctgtatatgggttattataataggaaagacatttgtacttgcacagtttaaatcattcttaaattttgaacatgtgaattgtcccaaaaaatctttaattttttggtaatttttactctttttgtgcacatgttgatttcttaatggtaaatccttcatttaaagatagtgttctctgttgagaatatttacatggaataaaacaatcttttcatggcctgttaaaaaaaaaaaaaaaaaaaaaaaaaaaaaa

SEQ ID NO: 284730 - DNA, 1000 bp, Homo Sapiens
tagtggtaggtcagaagaagatgctgtgaacaccaggactttaatcttatgcttaaaatgccagatgttgttcgggggacaacttgtatctttctagcagcagatctgtagtttgtatagcctcaacaacaattttaaataagatggagaataaattattgaggggactaggctatatgcatttgccttcatccacccatgtttattaagaatcattgtgcttaataataccaagactaagcaccataaccaagaaatactaatgtaaagattgtttcttgtttcaggaatggttaattcttcaacgttggtatgataatgataacttgttttgacttgaataaagtactacatcagtgtggaaaaaaattctgatacattagcagctatgtaaatgacctaattgatagcaggtgtaataagactatcgtcttcctacacataggaggctcattctctggacacactatcacctattacattttactgattaacaaataaattggaatttaaaaatatcgatatcaccatgatttaatccagatctgggattatgtagctaaacattgtgatgattattatttaaaaccattatttaataagagtaaaaatatgtgaatctggatatatttaaaaaaagaaatttgatgcccagataatatattaggcactactgattttttagttaaattgatgcactacacttttgatgtttgaagttacaaacctgtaatttttttgtaaaggaaataattgccaaatacctaggcccattgctgacgattagttctaaaatcttattcctcctcttctcccctcacttttccctacttcctctgcaaaaagatttaacaaatacattcataaggaaatgtgtgttgtaacaaatatattgcaaaaacatagtttgtaaaggcattctataagctatttatgtaaaatcaataaaagttgatcataattaaactgtatcagttgagtattatagcagcaaaaaaaa

SEQ ID NO: 284731 - DNA, 758 bp, Homo Sapiens
aagcaccgataggctctgcctcccgaagaaaagggagccgcgcagcgcctacgggagtccggcggcagcagccggtaccggcaaccacgggcagctctcagggaatctccgtcgtgaggccagaggctccagtccccgcgagtccagatgcctgtccagcctccaagcaaagacacagaagagatggaagcagagggtgattctgctgctgagatgaatggggaggaggaagagagtgaggaggagcggagcggcagccagacagagtcagaagaggagagctccgagatggatgatgaggactatgagcgacgccgcagcgagtgtgtcagtgagatgctggacctagagaagcagttctcggagctaaaggagaagttgttcagggaacgactgagtcagctgcggttgcggctggaggaagtgggggctgagagagcccctgaatacacggagccccttggggggctgcagcggagcctcaagattcgcattcaggtggcagggatctacaagggcttctgtctggatgtgatcaggaataagtacgaatgtgagctgcagggagccaaacagcactgtgcgggaactctgagtcagacgtgattatctgggggtctgtccaccctggctggatctggaggcaagatgccaggccccccaggtgttctcagggcagttcttggtgtctgcttctcagattccaaggactggaattaaaacctttcctgggactctggaaaaaaaaaaaaaaaaaa

SEQ ID NO: 284732 - DNA, 1000 bp, Homo Sapiens
tctctgtgtggccccccagcccctttccccactgccttgtgtccaaggccctttccttcatgtatccatggaggagagacaaaaatacacatcaataaaataagatagggaatccataaatagacattcagaagtatggccaacggatttatcttaaaaccaatggaggaagaagagtttcaataaatgttgtggacttccatttgtcaaagaccaaaacaaaggaaccccaaccttacatgtaatacaaacttaactcaaaatggatcatatatctaaatgtaaaatggaaagctataaaactgaaaacagactatctttacaacctaggcgtaggtatagtttttagacattacaccaaaagcacatgccgtaaaagaaaaaatagataaattggtggatttcattaaaattaaaaaactttttctctctgaaaaatcctgttaagctgggcgctgtggttcatgcctgtaatcccagcactttgggaggctgagttgggaagaaattaatagcttgaggccaggagttcaagatcatcctgggcagcaaagtcatacactcttgagggaagagagagaccttctcatattgttttatattgttttatactcagtacctgttttaagaaaaaaacaaggaagtgaaatcaaagacaggcagcccggcaccaggcctgaaaccagccctgggcctgcctggcctaaacctagtagttaaaaatcaacttacgacttagaacctgatgttatccgtagattccaagcattgtataaaaaaattgtgaaactccctgttgtgttctgtaccagtgcatgaaacccctgtcacatatcccctagattgctcaatcaatcacgaccctttcatgtgaaatctttagtgttgtgagcccttaaaagggacagaaattgtgcacttgaggagctcagattttaaggctgtagcttgccgatgctcccagctgaataaagcccttccttctacaaaaaaaaaaaaa

SEQ ID NO: 284733 - DNA, 1000 bp, Homo Sapiens
gtacacatgctttattttacttgggctctgagaaatgtgtggctttccttcagcattttatttgtgcttctctttttaatggagattgaaaagggagaataatgtgaatatcacggcttatattattaaatgttgattgatggcttgtaatgtactgcacacaatatatgttaactctgcagaatgacagaccctgggagaagtaatgccccagttgtcccccactcctaatgccaggcagagaaggacagcctttatagacttaatctgctttttgtcccatttgacaaggtaccaggaggaaattttttaagggatcaactgtatcacagtgcccactctggacctaagtctagtgtatccatacaattggtgcagagaaataaggtgtaaatggtgctttgttcctgctggttccaagctcagaaaccaagactagctttgtaggagagaatgagagcctgcaagcctctctttggattggctgaggagtggtgggagcagggggttgatagaaaacatccagacacacatataagcaagtggccgtgctacctttttagagaataaagaaacagacttttgagtttatatgcaatgccttcattaggtaccaccggcacttacaaaatgtgcggactgaatcccagagaacactggcagatgtatacagtatatggattgtatcgcttccccaatgtttgtaaattcacagtatttggaaaactgccttcattttccagtgtgggaaaaactcttgctacctgtattacttgatctcagacccatacctgatggttcagtctgtccttaagttaaaagaattttgcttttctaatgttatactatttacctgtcagtgtattactgcaacttgaatcactcttttactgttgttggatataaacttatcctgtaccaatgtatttattaacacttgtattttattattgagcatatcaataaaaatattaaaaaataacagattgttttttaccaa

SEQ ID NO: 284734 - DNA, 1000 bp, Homo Sapiens; identical to SEQ ID NO: 115456

SEQ ID NO: 284735 - DNA, 1000 bp, Homo Sapiens; identical to SEQ ID NO: 116642

SEQ ID NO: 284736 - DNA, 1000 bp, Homo Sapiens; identical to SEQ ID NO: 220880

SEQ ID NO: 284737 - DNA, 1000 bp, Homo Sapiens
gttgtcagccatgatgcccgactcatcacagaaaccaattgccagctgtgggtggtggaggagcagagtgttagccaaatcgatggtgactttgaagactacaagcgggaggtgttggaggccctgggtgaagtcatggtcagccggccccgagagtgagctttccttcccagaagtctcccgagagacatatttgtgtggcctagaagtcctctgtggtctcccctcctctgaagactgcctctggcctgcagctgacctggcaaccattcaggcacatgaaggtggagtgtgaccttgatgtgaccgggatcccactctgattgcatccatttctctgaaagacttgtttgttctgcttctcttcatataactgagctggccttatccttggcatccccctaaacaaacaagaggtgaccaccttattgtgaggttccatccagccaagtttatgtggcctattgtctcaggactctcatcactcagaagcctgcctctgatttaccctacagcttcaggcccagctgccccccagtctttgggtggtgctgttcttttctggtggatttaatgctgactcactggtacaaacagctgttgaagctcagagctggaggtgagcttctgaggcctttgccattatccagcccaagatttggtgcctgcagcctcttgtctggttgaggacttggggcaggaaaggaatgctgctgaacttgaatttccctttacaaggggaagaaataaaggaaaggagttgctgccgacctgtcactgtttggagattgatgggagttggaactgttctcagtcttgatttgctttattcagttttctagcagcttttaatagtcccctcttccccactaaatggatcttgtttgcagtcttgctgacagtgtttgctgtttaaggatcataggattcctttcccccaacccttcacgcaaggaaaaagcaaagtgattcataccttctatcttggaaaaaaaaaaaa

SEQ ID NO: 284738 - DNA, 1000 bp, Homo Sapiens; identical to SEQ ID NO: 115457

SEQ ID NO: 284739 - DNA, 1000 bp, Homo Sapiens
gacgtacatttgcctccaaagttcaacacaagttcaactgaccatatccttccatgacctgaatagatgctatcctttatcacgatgttcaattgcctttgaaagagagtagtccaggtatattcctgatcaaaatttggcatttttgatgatactactctacacagatcagactcatgtgcagaatcgtgcctggagagagaggtttggttaagacagagatttctggaaacattcaaattgcaaatggaaacttgaaacccacaatctaatgaggaatgtactggaaaaataatctgaagagttgacaaattgtgtactagattgaacacatggaatgcaatgcaatgagactttctgcactaaaacttatcctcatatgtacaacaatgatgtgtgtattatataacagtgatgtgtacatttctgacaccccatacataatatacacagtttgtataaatgcatacatttaaaaatatatatgtacaatacagctaacataaaactgtagtacgcctgaaggatattactagtgcctaatattgagtatgagtcactgcgtgttcgcatcaacttggaagtgcagtaattgttataaaattaatcagtgcagccaacattatttatgaatcacatctttgaaactgtgcagtagcatatacatatatatttttaaataacatttttcacagttttccagagttactgttgaaatctgcatcaccaaaaaaaaaaaaaagcaagatttttttaacaatgtagacactcttcagacccagtaatctgcgtgtgatttcctatttgtagattcccaagagactttagcagtcaccagccttaatgcatgtacaggatattattgtgacttaatttatctgcagtttttaatccatgtgaaattggaatttataaacggacttggattaaacatgtctgcctttctaaggttgcaaatgttacattaaatgatttatgttgtaaaaaaaaaaaaaaaaaa

SEQ ID NO: 284740 - DNA, 1000 bp, Homo Sapiens
agactctggtcttctttgggtaaacgtgtgacgggggaaagccaaggtctggagaagctcccaggaacaatcgatggccttgcagcactcacacaggacccccttcccctaccccctcctctctgccgcaatacaggaacccccaggggaaagatgagcttttctaggctacaattttctcccaggaagctttgatttttaccgtttcttccctgtattttctttctctactttgaggaaaccaaagtaaccttttgcacctgctctcttgtaatgatatagccagaaaaacgtgttgccttgaaccacttccctcatctctcctccaagacactgtggacttggtcaccagctcctcccttgttctctaagttccactgagctccatgtgccccctctaccatttgcagagtcctgcacagttttctggctggagcctagaacaggcctcccaagttttaggacaaacagctcagttctagtctctctggggccacacagaaactctttttgggctcctttttctccctctggatcaaagtaggcaggaccatgggaccaggtcttggagctgagcctctcacctgtactcttccgaaaaatcctcttcctctgaggctggatcctagccttatcctctgatctccatggcttcctcctccctcctgccgactcctgggttgagctgttgcctcagtcccccaacagatgcttttctgtctctgcctccctcaccctgagccccttccttgctctgcacccccatatggtcatagcccagatcagctcctaacccttatcaccagctgcctcttctgtgggtgacccaggtccttgtttgctgttgatttctttccagaggggttgagcagggatcctggtttcaatgacggttggaaatagaaatttccagagaagagagtattgggtagatattttttctgaatacaaagtgatgtgtttaaatactgcaattaaagtgatactgaaacacaaaaaa

SEQ ID NO: 284741 - DNA, 1000 bp, Homo Sapiens; identical to SEQ ID NO: 115460

SEQ ID NO: 284742 - DNA, 1000 bp, Homo Sapiens; identical to SEQ ID NO: 115461

SEQ ID NO: 284743 - DNA, 1000 bp, Homo Sapiens
gactggatgtaagctggatctacccagatcagaaagaaaacactcatttcactgtgctgattcatgagttagcagaagcctttcagaaggacttcacaaaatccaccaaggaaaggcttctcttgactgcgggcgtatctgcagggaggcaaatgattgataacagctatcaagttgagaaactggcaaaagatctggatttcatcaacctcctgtcctttgacttccatgggtcttgggaaaagccccttatcactggccacaacagccctctgagcaaggggtggcaggacagagggccaagctcctactacaatgtggaatatgctgtggggtactggatacataagggaatgccatcagagaaggtggtcatgggcatccccacatatgggcactccttcacactggcctctgcagaaaccaccgtgggggcccctgcctctggccctggagctgctggacccatcacagagtcttcaggcttcctggcctattatgagatctgccagttcctgaaaggagccaagatcacgcggctccaggatcagcaggttccctacgcagtcaaggggaaccagtgggtgggctatgatgatgtgaagagtatggagaccaaggttcagttcttaaagaatttaaacctgggaggagccatgatctggtctattgacatggatgacttcactggcaaatcctgcaaccagggcccttaccctcttgtccaagcagtcaagagaagccttggctccctgtgaaggattaacttacagagaagcaggcaagatgaccttgctgcctggggcctgctctctcccaggaattctcatgtgggattccccttgccaggctggcctttggatctctcttccaagcctttcctgacttcctcttagatcatagattggacctggttttgttttcctgcagctgttgacttgttgccctgaagtacaataaaaaaaattcattttgctccagtaaaaaaaaaaaaaaaaaa

SEQ ID NO: 284744 - DNA, 960 bp, Homo Sapiens
ggcagcggcatggcttccctctggctcctctcctgcttctcccttgtgggggccgcctttggctgcggggtccccgccatccaccctgtgctcagcggcctgtccaggatcgtgaatggggaggacgccgtccccggctcctggccctggcaggtgtccctgcaggacaaaaccggcttccacttctgcgggggctccctcatcagcgaggactgggtggtcaccgctgcccactgcggggtcaggacctccgacgtggtcgtggctggggagtttgaccagggctctgacgaggagaacatccaggtcctgaagatcgccaaggtcttcaagaaccccaagttcagcattctgaccgtgaacaatgacatcaccctgctgaagctggccacacctgcccgcttctcccagacagtgtccgccgtgtgcctgcccagcgccgacgacgacttccccgcggggacactgtgtgccaccacaggctggggcaagaccaagtacaacgccaacaagacccctgacaagctgcagcaggcagccctgcccctcctgtccaatgccgaatgcaagaagtcctggggcaggaggatcaccgacgtgatgatctgtgccggggccagtggcgtctcctcctgcatgggtgactctggaggccccctggtctgccagaaggacggagcctggaccctggtgggcattgtgtcctggggcagccgcacctgctctaccaccacgcccgctgtgtacgcccgtgtcaccaagctcataccctgggtgcagaagatcctggccgccaactgagcccgcagctcctgccacccctgccttaagatttcccattaaatgcatctgtttagaaaaaaaaaaaaaaaaaaaaaaaaaaaaaaaaaaaaaaaaaaaaaaaaaaaaaaaaaaaaaaaaaaaaaaaaaaaaaaaaaaaaaaaaaaaaaaaaaaaaaaa

SEQ ID NO: 284745 - DNA, 1000 bp, Homo Sapiens; identical to SEQ ID NO: 115462

SEQ ID NO: 284746 - DNA, 1000 bp, Homo Sapiens
ggggagaaagccaggcataaattagttacgatagttggtgtttaatgtttctccagtgaaaatttggacttttctttttcccttatagaatgcataattaaaacagactattattttgaaatgaaatattgaatattaaaaaaaataaaatagagactcttaatacaggagccacaaactcacatacctagagaaaccaaacaggtaaaagcaagtggtgaagccacatggattaatgagatgatagaaagtacaaaatcactatgtaagtcagattaaaaagccagcttgcactctctgctttcatctttttgaagcaataactattacataaatcagtgaatacagtatttctacagtatttgaaacggtgttcacacccagcaattccacttctagacatatatccaagagaatggaaaacatgtgcacacaggcacttgtacatgaatatttatggaagcattattcacaatagccaaaaagtggaaacagtccaaatggccatcaagatgaatgaataaataaaatgtagtgtgtgcatgcagtggaatattatttgcccataaaaagaaatgaagcactgatgcaggctgcaacatggatgaacttgaaagctttatgctacgtgaaagaagccagtcataaaaggtcacctactgttattcctttcataggaaatatccagataggcaagtccatagagacagagaggagaggagtggttgccaggggctgggcaaggagaatgagagtgaccgctaatgggtgtggcatttctttgtgaggtaatgaaaatgttctgtattagatagtggtgatcattgcacaactctgtgaatgtactaaaaatcattgaattgtacactttgaaagaattatatagtatgtaattatatctcagtttaaaaaaaaaaacaggataacagtaaccaaaatcttctatgtaagcttaaaattttctctgttaattatgccaaataaaactgaattcacagca

SEQ ID NO: 284747 - DNA, 1000 bp, Homo Sapiens; identical to SEQ ID NO: 220884

SEQ ID NO: 284748 - DNA, 566 bp, Homo Sapiens
gcgatcttgagggcatgttcatcttcatcaaacatggagataatcagcagtttctggtcaataccaactgtgctgtcgtcgtgttgctgtattacatccgcagtaaagtaaagttgcctaaaacaaacaccatcgatttgtgtgaacaaacggggaaaatgaagatgcttttcctgatgaagcccaatcatgcagagtatgccagcaaataccttacagctcgaagcacctactacgtttgtaaggtggaacgtgggccaccaggaaccaggctggagaatgcttacagagcttttgtgcctctcctcaagaatccggagccttggctgcttgttgcactgcgcatacaatgtgatgccctggagaggagacgaattcagatgcttaaaatgaaagaagccaagaaggtcgttataattgaaccccctgcgagtgtcccgtccaagcaatcaggacgatcagacaaaaagaagtccactcgcaagtctccgacctttaggaacagaccagacttcaggaagaataaaggtcgccaactcaataaaaccaccaagcaaaagaagtaa

SEQ ID NO: 284749 - DNA, 1000 bp, Homo Sapiens
tcggcttcccaaagtgctgggattgcaggcgtgaaccaccacgcccggccggctttacttctaatcctccacttcttggtctatttgaaccatcacaagtattttgggaccgataacaaaccccttttatgctaatttaattcttgacttgggtaataggtgcacctggataatttataaagctgtccatagatctaagtttagtggtacagatactactgggcaggagaaaaagcacaagttaaaatatttctacagtcagctcttaatattcccacatcttgtttgcaaaattttatggtcacgttctggcttttttacatgaggaaaacaaagttttaacagttttctcttctgtccccttctccagaggaggtgtgaaccagaactgaggaggccagttatattttaggcttttcagtagtacgattttgtcctctcccactgaggaggagggaagaagggggaagccagtgggagttccacacacgtggtcagtgctgtaagttcccggatatcagtgtctctcacatcaacacagaaatagggcacttctcaacattaattttggaattattcaccatttaaaaattgtcactgctctttttcattactgtagataactgagagttagctgttctaggaaaaggccatgtttcagttagtgctatgacttcttttttcgattaaggttgaagcagtgttctcttagtagcctgaacacttctcaaagcgacttatcactagcggctttaatattgagcttctatatcgttgtgtccacctcactttttaaggctgttcatacctggcaatattcacttactctgctatttttaaaaactattttaaagttttaagcacaatgttgactcttctgtaatttcctaaaattatattgttttcctacagacagctcaactttccttgatatgtaacactttaggaaaataactgccttgtaaaataaacgtgattttttttttcttttataccagaa

SEQ ID NO: 284750 - DNA, 1000 bp, Homo Sapiens
agttttagcataaacaggtaaatgtgcttttttaaaagtatatttcaaaaaacaactccataaaattacatatctgtcaatctttgttttatttctatgttactgttggaagctagctgttaattttgtttaggttgaaatggttttaccttttaaaaacctacccccgcccttgctccaacagcattgcatgctggaaaaaacactagagtaagaataagaaatgtgggttcttgctccaggctctgccactaactagtttgtgactttggataagtaatgtagttgtctgtgcctataaatagaagtagtagtagtagtagtagtagtagtagtagtagtagtagtggtcactgctatatggtgagcacttactacaccagcagaaggcctcatcacagccctgaaagttatccccgttttacagatgaggacgagaagtctcagagaggtagaaatttacctgctgtggcacagctgctcagcaagtggtcagggccaagggctgcaagtgaattctttttaactatctttctgtctgttccttagcttactttcaggtttagattgactttgctttgttgaaaatactaatggctcacacacataaaggtcagacatgatggagccctttcctcgttttagaatttggtccttgttacagccctgtgaagatagtgacataattatcctatggtattagtgaaactgattttctttaagtgtgcccctgtcattacttgtcacttgccttttgaattaaaataatgctacaagaactgctttttaatctatatattccatcattcaaattcaagtgtcttaagccttttacataccaaaataggtatatttgaatacaggagaagtcaaagaaaggcaatctggaccagaattctgatttttctgggtagtaaagtttccttcagaatgctggtggccagcataggattgccagttctttattttgccaagtaagaacataaaaaaaaaaaaaaaa

SEQ ID NO: 284751 - DNA, 1000 bp, Homo Sapiens; identical to SEQ ID NO: 220886

SEQ ID NO: 284752 - DNA, 1000 bp, Homo Sapiens; identical to SEQ ID NO: 220887

SEQ ID NO: 284753 - DNA, 541 bp, Homo Sapiens
tggctgtgtgactttcgaccgtctcatttcccctctgtttctcagttccctcttatgaaagatggaggacactatacctgccatgcctcagtgggacaagatcatctataatgttctgcatggaagcaccatgaaaggcattaccagcttgaagaaaaccagtgtctggaatgaggcgacaccagtatgtagggagagcaatcgggaagcgataagaaggagattcactaggggtctgctgggccgcctgctgcagagaacgcctctagaatcctgcactcccgtcttccttcctgcagctcaaagctggcccaccctggagatggtaccagctggggctctccttccgggcctcagtgagggaggggaaggagccaagaatgggtcagtaaccacaggattctttgagttcacagagagtctgcctgctgtgggcctccaaagagttctgccagttcttcccaagtcagcttgggcttaaagtccttcctgcaccaactgggaaggagctggagaagctccacctgggatgggaagctcg

SEQ ID NO: 284754 - DNA, 362 bp, Homo Sapiens
tggtggccacagctggagtgaccgcagtgtacagagatgggatgggagcaggaaacccaaaagagccggccctggaaccaggtggaggggaggcagcccggccatgacccagagcaggacacctgctccacttcaccttttgccatgagtaaaagctccctgaggcctcccaagaagttgatgccctgtgcttcctgtacagctgcggaaccggatggctttccgtggctttgctacagccactcctggaagtgctgcctgactgaatcctcagggcaccccggcaggatggacgtggtgtaccccctactttacagatggggaaactgaggcttgagagctaaagcagcccacccagctcc

SEQ ID NO: 284755 - DNA, 1000 bp, Homo Sapiens; identical to SEQ ID NO: 115464

SEQ ID NO: 284756 - DNA, 1000 bp, Homo Sapiens; identical to SEQ ID NO: 115465

SEQ ID NO: 284757 - DNA, 1000 bp, Homo Sapiens
cctcaaaagccctgaagaatctagattgtagaggcaggcagagccacatacgagtcttgggtctgccacttactagccatgtgatgtgcagaggagacctgttctcagagcctcagtttcctcacctaggaaatagggtgatgatatctactgtatagggcaggtgttgtaggagtaaataagctgagctacagaaatctcccagccaactgcctggtccacccagggacagaaaaccactcctctgctcacaccccttcactcactcctccctctgcctcagggctccacaaagccctgggtcctctgaagcctagaagggccaggccaggccctgggctccaggagctcaggaggggctgttacctcatcctcttgccgtgtgtgactaaggacgcttgatacttctgcacgcactcctcctggaacacctgcaggagtcttttggctaaatgactgaaattcaccctagaacgacagagaaccaaggtgcagatgagctgccagaaccactatgcacaagcccaccatccctcagtctccgtcagtctccgccaccaccttgtcgtaagtgcccaagccctgcgtccacagcagggctatgtctctgggaaaggaggaaggacggtcacacacttggattgtgaaggttgcagtggccagcaaagcccacatcaacagggagacgtgggagacacacagggggtcctcagggaacacacatgtgctcaagcttagtcctcaggaaagggaagggaaagtgaggcagccgtggaaagaaggtgtgtgagtgcgtgtgtgtgtgagacaaaaaggggtcggggtgcttgtagaactgggggagtgagttcccagataaccattaaatcagggagggcctcctggacgtgagtgtgtccgggaaacatgggagacagaggagcggggggaggcagggaaggttcaggcagagggcagaagcaggaagtggtaagtggtgcatcagtgaggacaactagag

SEQ ID NO: 284758 - DNA, 1000 bp, Homo Sapiens; identical to SEQ ID NO: 220888

SEQ ID NO: 284759 - DNA, 1000 bp, Homo Sapiens; identical to SEQ ID NO: 115142

SEQ ID NO: 284760 - DNA, 1000 bp, Homo Sapiens; identical to SEQ ID NO: 220889

SEQ ID NO: 284761 - DNA, 1000 bp, Homo Sapiens
tctaagtttggtactgtgaggcaagtacttaaaattttcatgctggttacttaaaaggcatttagagatttcaagaatgattttgtatacgatgttttaaattttgactgatctcatagtcttcatagaattgcagtagtcttcattgtatgaaatcccgaaagtccatgagttgatcttaaagaccactaacagactggctatcagatcccttttcactttggctatttttttcattttttgagatggagtcttgctgtgtcactgaggctggagtgcagtggcgcgatcttgactcactgcaacctctgcctcccaggatcaagtgattctcctgcctcagcctcctgagtagctggtattacagatgcttgccaccacgcctggctaatttttgtatttttagtagagacagggttttgccatgttgatcaggctggtcttgaactcctgacctcatgatctgcccttggcctcccaaagtgtcggaattacaggcatgagccactgcgcctggcccactttagctatttttaaaaataggacctattgttttggattactatctgagaatttcatggattcactcctgggtataggagataagaatacgtttaattcataacttttatattaaccaatatagtaaaaaaataaagctcacacatacaaaaactaagttgcctttccttgaatgaaccctgtctgaataaaacaatgaaaaataaaaataaaattaatggtatgtagtctaatttgtaaatgaatgaatatggaaataatacacactgtggatatattttaaggccttatgtagttttaattgttctgctcgttccgtggttatgtttaagactatagtatatgactctcttcaaagtatatcaagtattgtgaatgctttggttcagatgtgtcaaattaacagtaaaacaacaaatataccactgaaaaaaaaaaaaaaaaaaaaaaaaaaaaaaaaaaaaaaaaaaaaaaaaaa

SEQ ID NO: 284762 - DNA, 1000 bp, Homo Sapiens
ttcggggaggacttccagccctggctgattgagatcaacgccagccccacgatggcaccctccacagcagtcactgcccggctctgtgctggcgtgcaagctgacaccctgcgcgtggtcattgaccggaggctggaccgcaactgtgacacaggagcctttgagctcatctataagcagcctgctgtggaggtgcctcaatatgtgggcatccggctcctggtagagggcttcaccatcaagaagcccatggcgatgtgtcatcggcggatgggggtccgcccagcagtccctctgctgacccagcgaggctctggggaagcccgtcaccacttccccagcctccacaccaaggcccagctgccttctccccatgtactccgacaccagggccaggtcctcagacgacagcacagcaagctggtgggcactaaggccctgtcgaccacaggcaaggccttgaggactctacccacggctaaggtcttcatttccctcccaccgaaccttgatttcaaggtggcacccagcatcctgaagccaagaaaggtgggcctcgacctgtgactcacacccagtggacagtgctgagcacggggtcagggctggagggcacaggcagagggcagctcccaggctggctggcaccccaagggaagagctggtctccctcagaagccccttcctccacagacttctgatcatctccctcttctcccctcctttcacaccgaggctcctgctctcctgtgcctccgaggcccccagctggaagtgccttgttgcctctgccctttgaagtcggaacaattcctagcacctgtcggaaggtcaaggccaaaggcaaattcaaggccagactgtgacaaacccagggctgaggcctgccccatgaagaggctgagccccctgaaacccctgccccttgttggtacattccagaggcgcaggggcctgggggatatgaagctagggaagcccctgcttcgattccccactg

SEQ ID NO: 284763 - DNA, 514 bp, Homo Sapiens
cttcctttttgtccgacatcttgacgaggctgcggtgtctgctgctattctccgagcttcgcaatgccgcctaaggacgacaagaagaagaaggacgctggaaagtcggccaagaaagacaaagacccagtgaacaaatccgggggcaaggccaaaaagaagaagtggtccaaaggcaaagttcgggacaagctcaataacttagtcttgtttgacaaagctacctatgataaactctgtaaggaagttcccaactataaacttataaccccagctgtggtctctgagagactgaagattcgaggctccctggccagggcagcccttcaggagctccttagtaaaggacttatcaaactggtttcaaagcacagagctcaagtaatttacaccagaaataccaagggtggagatgctccagctgctggtgaagatgcatgaataggtccaaccagctgtacatttggaaaaataaaactttattaaatcaaaaaaaaaaaaaaaaaaaaaaaaa

SEQ ID NO: 284764 - DNA, 1000 bp, Homo Sapiens
aaaagtggacattaaggagacctacgaggtggaagccagcactttctgcttccctgaatctgtggatgtgggtggtgcatcaccccacagcaagaccatcagtgagagcgagctgagcgccagcgccactgagctgctgcaggactacatgctgacgctgcgcaccaagctgtcatcacaggagatccagcagtttgcagcactgctgcacgagtaccgcaatggggcctctatccacgagttctgcatcaacctgcggcagctctacggggacagccgcaagttcctgctgcttggtctgaggcccttcatccctgagaaggacagccagcacttcgagaacttcctggagaccattggcgtgaaggatggccgcggcatcatcactgacagctttggcaggcaccggcgggccctgagcaccacatccagttccaccaccaatgggaacagggccacgggcagctctgatgaccggtcggcaccctcagagggggatgagtgggaccgcatgatctcggacatcagcagcgacattgaggcgctgggctgcagcatggaccaggactcagcatgatggacagtggatgggggggcacccacaccttccgcgcagtcgtcataggccttcccagaaggagctgcccagacctgcgtgtcagcccttggtggtggccagggagaggcgcccggtgcagatggccccgggcggcccaggtcctctactgtgaaggagcagggagctgccgagggacacgagcctcagtgcggggtggaaggctctttgccttgtccaccagggctcagccaagccctgcagtgtgtccccgctcggggagggcccggccgagcgggcagggagagccagtcctgtcggctgggcccttggacggctgtcagttttgcacatgatgttcctattgtaactctcagagaccttaaaaagaagtttactgcaatgtgaataatttaatctctggttgccaagcaaaaaaaaaaa

SEQ ID NO: 284765 - DNA, 1000 bp, Homo Sapiens; identical to SEQ ID NO: 115466

SEQ ID NO: 284766 - DNA, 1000 bp, Homo Sapiens
agaatctctgtttcatgtgcaggaagaaagtgggacttactaggtttgaatgcggtgtagaaatgtttactgtggtgtacactgttactcagatctacacaattgctcttaaaattacaaagctgatgccgctgagaaaatcagaaaagaaaatccagtagttgttggcgagaagatccaaaagatttgaactcctgctggaatacaaaattcttgatcatctgcaaactaaaaattgacttgaggttttttttttccctagtcattgggaaagtagagcagtgtatcttgcatgtcatcggatgaatagatttttgttttgattttgttttgaaaatgactctgaacatttatttccattgcaatttctgtggctgagaagacttaaactttacaagtattatccttataagatcattttaattttagttgagtgcagagggcttttataacaaacgtgcagaaattttggtggactgtgatttttccagtattaaatatgcatgcattaatcttgcagtttattttctcattgtgtacatatatattgcttttctttgcagcacgatttctcttttgataatgccctttggggcacaactagttatcggtaactgaatgtatcttaatcattatggctgcttctgttttttcattaacaaaggttattcatatgttagcatatagtttctttgcacccactatttatgtctgaatcatttgtcacgagagtgtgtgctgatgagattctaagtttgtgtgtttaaacttttttttgagcgagggaagaaaaagctgtatgcatttcattgctgtctacaggtttctttcagattatgttcatgggtttgtgtgtatacggtatgaagaatgatctgaagtaattgtgctgtatttatgtttattcaccagtctttgattaaataaaaaggaaaccccgaaaaaaaaaaaaaaaaaaaaaaaaaaaaaaaaaaaaaaaaaaaaataaaaaaaaaaaaaa

SEQ ID NO: 284767 - DNA, 1000 bp, Homo Sapiens; identical to SEQ ID NO: 115468

SEQ ID NO: 284768 - DNA, 1000 bp, Homo Sapiens
tgccatccagggcaagcaacccaagcactgcttcccaccgggtgatgagccatgcaggcctccaaactgcacgtcatgattcatccctaaagtgagtttggccttgagagtccccagggtcctcccccactgggcaggggtcctcaaagccaaggaagcctggtgacacaggcacccatgggaggtgggcccagaaaggggcttcccatagataggccctgtgagtagggagcttgtacactgggccatgggcagcgccagttcccttgagcagtaaaggcccttttccccctacggtgggacccaggagtctctctgacagcttttctgccaggcacagtggctcatgcctgtaatcccaacactctgggaggccgaggcgggaagatcacttgaggtcaggagttcaagaccagcctggccaacatggtgaaacgtcgtctctgctaaaaatacaaaaattagctgggtgtggtgacaggcgcctataaccccagctatttgggaggctgaggcagtagaatcgcttgaacccagatagcagaggttgcagtgagctgagagtgtgccattgcagagagactccatcccaaaaaaagacagctgtcccaggccaagggtacttgggagagcccctcatggagaacctagtttagaccaagtagcagaagctgtggtcataacaaaacaatttgaggaagaaatcttacaaatcaccactgccctttctccttttccataaaactgtccatcttttcggtgctccctaatccaagcagcttgactttagagaagttgcagaagcagtgaagccactaacatgctgtgtgactttatgcaagtcactcacctcactgagccacctccatttcttcatctgtgaaataggcataacagtaatacataaccctacctacctcacagggctgttgtgaggatcaaatgaaataatgtaacgtgagaatacagtataaatgataaaagaaaaaaaaaaaaaaaa

SEQ ID NO: 284769 - DNA, 1000 bp, Homo Sapiens
gaaattggcgtgaaattgttgttcaagataaaaatgcaaatcggaggaggaaattttatatcacacaactgaaaacagattctgagggggctgtattaaatgtcgaggatgctgccactcggctccagcttttaaatcgctcagctttaagatctgtgcaggcacaggctaggatacctggttctcagagagagcaagggtcaacattatctccctggggagaagttttgacacctctagcaagctcttctgttactcacttaagtagtaaacaggaagaatatgttaaggttgccaaaacactttttactgatgaagcattaaaaccttgcccaaggtgccagtcccctgctaagtaccagccatataagaaaaggggactgtgtagcagaacagcctgtggttttgacttttgtgtgttatgtctgtgtgcttatcatgggtctgaagaatgtagtagaggagcagcaaagccaagaaatagaaaagatgctctcccaggaagtgcccagagtaagcggaatttaaaacgcctctgaagagactaaatatagaactcccccatgcagtgttctatttatctgacttaaaattatgaatattttgaatacatgcaaatcttcccattaatgacaggtgatgattaatttcctattttgtatatattataatcgatgtcattgtatgttttctttaaagttgttttgaaaaaattttattttactatgtcattttacccattttaataacttggtattttaaataaagaattttcattgttgttatatgtatgtactttattgttttatgtaacattttaaatttgtgcatttcatcactcttgacatgttcttcaatccttttttaaaaaaatagtttttcagataatattaaagattttgaactctagacagatggccttatagatttggaaaatgagtacttgactgaaatgaaatataaataaaatattttcagaagtccaaaaaaaaaaaaaaaa

SEQ ID NO: 284770 - DNA, 1000 bp, Homo Sapiens
cataaaatactagtttgctttaggacttccagagaatggctataatgtcaaatcgccaaagagaaatgaatatacaatgtagaggaaaacacatgggctgtgtctatgcctcacaagctaccctgtgtatttaatttggtgactctttggttgaaatctgcctgaaactataaattctagtttttgaaccgataaatacggtggttaaaattttaaaaagacatttcaatacttaccactattctcacattgggagcagtgtataagtgattcagcctttcctttcttgttggactccttacccttcagacaaattccacatatagcatttggaatgacctttggctggaagggtagaagagggctataaattcatgccagaagagcttactatgggtttaaaaggaattctgttactttattgccctatttttacttttggtaacttgctaatgaggaccattttgaaagacaaaacttgacaggagtctgcctacaatgtaagactgcctactgaagaaagcattaatttcatcataaaatttggtaaacagcatgatctcgtaagattaaatgtagcattctatactccctacatgcacagtaagatttgtttaatgaatggaaggaaagactaaatacaatgtcaaatgtcactattaattggacaagaaaatccaagtagcaaatgaccattatgtgtaagacttactctaaaaagaccattttaaatagctcatatattaattttgtttaaaacctgctattttccaaaactgcaaaactagagctataaaatctaagttaaaaaatcagcttatcctcattggtatagtggtatttaaaaaaaaatcagtttaaacatttttaattgaaagatgtctcatgcatacattggcgtgtacataaacgtttgtggaaaacttaaaaaaaaaaaaaaaaaaaaaaaaaaaaaaaaaaaaaaaaaaaaaaaaaaaaaaaaaaaaaaaaaaaaaaaaaa

SEQ ID NO: 284771 - DNA, 1000 bp, Homo Sapiens; identical to SEQ ID NO: 220893

SEQ ID NO: 284772 - DNA, 1000 bp, Homo Sapiens; identical to SEQ ID NO: 220894

SEQ ID NO: 284773 - DNA, 1000 bp, Homo Sapiens; identical to SEQ ID NO: 220895

SEQ ID NO: 284774 - DNA, 1000 bp, Homo Sapiens; identical to SEQ ID NO: 220896

SEQ ID NO: 284775 - DNA, 1000 bp, Homo Sapiens
tccttgggcctcatgatcagtgggggagtgtcaggaatgtgcactgagatctttggccccagtcacatctgccttcattcttcttaataaaccagcatctaaagaggtttctcttttcaactttctatggttatcttccttctgagaggcttatctcttcaatgtgaacatgtaggatggcatctggggaaatacatgttgggggaaagggaaggaacagctgctgtctttatcctgtgggtcagctccttgtgcagtcttaattctcatattacttctaggagttggagtatttcctccactgggcagattaggggcctggcattacagagtcgtttggtaacttgctcatggttgtgccattggtaagggacagagacagaattcaagcccacattctcaccactgcctggggttgcccattttgttgtagttggtcattaacagcaaccacatggttcttggtaggtctcttggacacttgtccgtcatctgaaggaatgtggttgaggcagatgttgtgccgtgagggcagggattgtgctgattctttctgtgctgttaagtggcagttgtgctttatgctacgataataaaatttctgtgcaactaactgcaggagaagagcagtgtgctgaataagggggtgtgactcagttgaccttacaaaagagatatgctagcctgcttctcattagctctcacgttttcttagaagttgtaagtttaacttcaatcttttcccttactgatatttgcagttcttccagcagaaacgcttttaaaggtgaatgtgttgccgctgcttccaaagccagccagcgctggctggaggccccctcctctacgtgtcgggcattgagattttcaagtaggatctggtccctgccttcagggtgctcttggttttgtgaagggggagctaaacaataaacagtaatggcaaaatggcaacgtgagagggacagtgacgtcaatacaacaatgtactctccgccca

SEQ ID NO: 284776 - DNA, 1000 bp, Homo Sapiens
gtgttggtcctgccacccacgtgctgtgtgagaggagaatccgtgacccctgccctgggccttaacacacatccgacgaatgaatgaagggttgcctcagcaccggtgctccaagtcctgcgatgctaagtgcttttctcctctgagtcttagcaatggacaattccaatacctccacacaggacactagagtaagaatccttcacagttagaacgcagtgctgtgcggaggccttaacttgagttctgttttgcacctggatttaccagcacatcaaagctgcttcgcaagccccctcatcagcagggctcatgtgggggagctgctgatggagtcctcgctgctcatgcccacagccctcccagagtgctatgcgagtggctgccgtgcagttgggggtggggcgtggtgtttagacacagataggagtccagggtatgactgatggaggccccggcccacgtgaccagcaaggtcagaggcccagccagattccatcctgaggaagcaagtgaattctcagaggaagtggtctgtgtctgcatgaactgctctcaaaccaacaaataggcttctcttggcaactgactcgtgacaaagggttcaagattgtttgaaaaaaaaaaaagggggggggggacagggaggcagtaggtcctggaaaagtaaattctttattttacaataagaaagtgattacatattttatttttttttataatggtggaaaattagaagtgattgtgaaaatgatgtctacccgccttgctgatgagtaggatgtgatttggctctttaggaaactgaatttgcagaactgaagaatattgatttataaagggcatggccattgacccagtccatcttatgcaaatctggatgccataaataatatttaaaaatgaaagtattggggtggaggttgcagtgagcggagatcgccccactacactccagcctggtcaacagaaacaaaaaaaaacaaaaaaaaaaaaaaaa

SEQ ID NO: 284777 - DNA, 1000 bp, Homo Sapiens
gagtgtgcatatgcctgcaatgaagatttgtgagaagctgaagaagttggatagccagatctgtgagctgaaatatgaaaaaacactggacttggcatcagttgacctgcggaagatgagagtggcagagctgaagcagatcctgcatagctggggggaggagtgcagggcctgtgcagaaaaaactgactatgtgaatctcattcaagagctggcccccaagtatgcagcgacacaccccaaaacagagctctgatctccaatgccagcacatttgtgacttgtaattagagagaaaagtgactctctaggatatggacatgttgattaaggataactgggaatgcatcatatttggtctcatgctttttgtgttggtattattcctcagaattttgttacgtgggtttatgagtgaaactaatactactgatagcttacatttgcagtgtaccaaaagctaaaagttcctttctcataagtttcttggaatgactatgccagttttcattgcctgtctcctaaaagtgacctactgacaaattgatggagtaaattgattccaagaaagaagaaggcattcagagactcctctctggatgcaattttaaaatatattggactaaaacaaaagacacaacagtcagcttatctaatgcacaacttcaatcccaaatacagaatcaaaagtttttttcaagtgaattttctgttttcactctatattgtagctctctttggtatcagaaatggtcaggcaggagtactcgtttttcccattggaagaaaacccacttaaacctacttaaagaaaatagagagatcaagaaaccgtataagtatagccaatgtttggcaattatatcaacatttacattgttaattgaaccaagctcaaggtctttttcattccttacagtcacatatcagacaagtttttgatggaagattaaagcatattaaaaacactcataggcaacttagaaaaaaaaaaaaaaaa

SEQ ID NO: 284778 - DNA, 1000 bp, Homo Sapiens
caggttcctcaactgtacaaaattaagagatatcagccattctctgtccacaagtcttcaacaagttacagacctcaaaagcttgcccgagccctaaagcaaggagctgaggatgaagtcaccaccatcacagcccttccgaaacaggactccacaactcagctctctggcaaaacatcaatcttgagcatgaaaccacctgaggccttagccatgtctctagattatgatcctctgtatgtttttaatcccaacccaggattatttgctgtaatgcatcctctgacctatgcagaaacgttgatagattaccatctatgctctcaccccaagtacaaattcaccaaagagtcccgccacgggtccagcattcctgtcacccaaaagcagtttctccatcacacggacattattcccggaataatgcactggaaaagcttccagtccctggttctctcctccctgccggacccctccaagatggagaccacaaagagctgcgattccttcaattcatttatgcttccgatagacgtccctgccatccttgatgccttaccagaagaggacagactagaaacagtagaacgtgagctctgtgagcagaatgtagaagttatgttgactccagaaatgatcaaagtggaattccctatgttgaactacaaggacatcaggaaggagaaagaagtgaaagatcaagcacaaccagcagagaaggccggagagaagctgctcgaggagatgaggaacctgcggggcaaagcactcaacacatacctgattctagaatgaaagtcaccagtaggtcagtcccttccatttgctttctgtgggccactgtggccccttgcgtccatttacatgccagccatctctgcaattaaagtttctggataaaaaaatgaaatgtagaggatgtatatatcttttaagtgataattataaatcttatatttaaaaataaaatggagttaggatgatgaaaaaaaaaaaaaaa

SEQ ID NO: 284779 - DNA, 1000 bp, Homo Sapiens; identical to SEQ ID NO: 115472

SEQ ID NO: 284780 - DNA, 1000 bp, Homo Sapiens
ctcagcaggggtcatagatcgaatagatgctgaaaagcgtaagatatatgcattccttgacatcatttttaaagacattccttcaaatagtttccacacagaaattcctcactcccattatgagagattgtggttatatgtcttaaatttattataagctgcttcaaagaaagggtctgaatgtttgaattatgagtgaaatcatgtgaaattttgagttaaactctgtgatttgattttcagggtctttaaaatatatcttaatatcttcttcctctttattcaataatttctgtcttgcacttacacactcataacagccaaatatgaggcacaaaaatgttacaatcagtttgaaagcagcatcaattaatggtagattctattcacattccacaacccagaccaaatttttttcctattacgcagatgtgctgagcactttccagattgcccctgttggccaaaagcagcctgttacatcctggaattaagcacacttaaggtatttgagacaatttattaatgaaaatttccttggcagatttgacaaatgttggcaatatttttttaaaagttaaatcatattgctttcatgaataaatgaaaatataaaggtcatggatgcaaacaaatgttacatatacacattctgtctctccagatgaaaagaacatgcaaaaccatttaataaccaaaatatcaagtaaaattagttcccaacggggcagcagctttcaaatgagtgtccaatatttgcttctgctatagctgcaagaactgtaactggacccaagtagagaatgaagccacgtatagaactacgagaacacttttctgtgtttcccccatgccgtcctgtcacatcctcttacacgtcctctcttgatttgatagacaatattggcatcctgggtctcactgaggccgtgctatgtcctcagcagctgtttttgttgtttcgttattatgcccacaacaaaaaatcattccttagaaa

SEQ ID NO: 284781 - DNA, 1000 bp, Homo Sapiens
aggaaagaaaatatgccctggaaataggctttatcttaaaactcaaacaaaactaaagcaacttacaataagtggacatgttgctgctgctgataattttctgaaaaactgatgtatcatctctcagtggcacaaggcttaagagggaaaaatgggaagggaaaaggagagcaatcagaaatatgcaggtcacttggaaattaggtaatgagggaaaatgctatgaagagttttttttttctcttagtttgttgttgttccagtttatgtgttgagacaaggcgctccttagctttgggtctaataattttttgtttgaaaatgagagtgagttgaaactcgcctagagatgaattttaggaagactttgaggaaaccagattggcagtgaatatgtggtggtgaagtgagaaacccttcagcagaaggtggaacaaattattaactgacttattgcccatcctggcagaaacagccacttagataagagtctaaagactcctctcaaacctagaatgtcttggtgggaaggtgggagataaggagcttgtaaatagcaaaatcaagtgggattttgagtttacttgtttgtgttctacccatacccaggaaacttaactggagctttaataaatgacactatctcttactcttttctctttttggccacatgtccaactgataaagggaactagccatgcgggtgagagatgagactgaagtgattgctgcactaattctcagaattgtgcattacagtgacctgaggacattttgttaaaaatctacaaatgtaggctttcccctgaggattttgatgtaatagaccttataaggcctgaacatttttaaaaacattttcttgaagctgggcacagtgacatgttcctgtagtcccaggttgagcctgagtttaagttcagcttgagcaacatagtgagactcttgcctctaacaacaataacaccaaaaaaaacaaaaaacaaaaaaaaaaaaaaaa

SEQ ID NO: 284782 - DNA, 735 bp, Homo Sapiens
cttttacctcgttgcactgctgagagcaagatgggtcaccagcagctgtactggagccacccgcgaaaattcggccagggttctcgctcttgtcgtgtctgttcaaaccggcacggtctgatccggaaatatggcctcaatatgtgccgccagtgtttccgtcagtacgcgaaggatatcggtttcattaagaaagacctgagctgtcttccttggcactgcctatggaggtgacacccatctcctccatcatggccatcctgagaccgctcgcgaagcccaagatcatcaaaaagagcaccaagttcactgggaaccagtcagactgatatgtcaaaattaagggtaactggtggaaacacagaggtattaacaacagggttcatagaaggtttgagggccagatctatgcccaacattggttatgggagaaacaaaaagacaaagcacatactgcccagtggcttctggaagttcctggtccacaacgttaaggagctggaagtactgctggtgagcaacaaatcttactgtgttgagatcactcatgatgtttcttccaagaactgcaaagccatcttggaaagagcagcccaggtggtcatcagagtcaccaatgccaatgccagcctgcacagtgcagaaagtgaatagacagtgaatgtgtttgttttattggggtttaaataaaaccaataaaactgtaaaaacaaaaacaacaaaaaaaaaaaaaaa

SEQ ID NO: 284783 - DNA, 1000 bp, Homo Sapiens; identical to SEQ ID NO: 115474

SEQ ID NO: 284784 - DNA, 1000 bp, Homo Sapiens; identical to SEQ ID NO: 115475

SEQ ID NO: 284785 - DNA, 1000 bp, Homo Sapiens; identical to SEQ ID NO: 115476

SEQ ID NO: 284786 - DNA, 673 bp, Homo Sapiens; identical to SEQ ID NO: 115478

SEQ ID NO: 284787 - DNA, 1000 bp, Homo Sapiens; identical to SEQ ID NO: 220899

SEQ ID NO: 284788 - DNA, 1000 bp, Homo Sapiens; identical to SEQ ID NO: 220900

SEQ ID NO: 284789 - DNA, 1000 bp, Homo Sapiens
cacagcagggcctgccagaggctgatgacatatctgtcactgtcccaagggggcaggggcagcaacggaaatattaggccacaaaaggcatgcctgcagacacatatgaggtaaacacccaaagccagatgtcaatgaaacagtaattcggtggaataggagaggtcatattctcctgcaaggctaaatacataggtctccttgggcacaatctgccaggggacaatggttcatgtcgagccagctattacactgccttgctaagaacttccaacacacacacacacacacatacacatgcacatatgcatgcacacacatgcatgcatacacacatgcaccccccacacacatacaagcacacatacagatacacacacacgcacaaacatacagatacacatacatacaggcacacacacagatacacacatacacacacagatacacacatgcacacaaacacacgaaagcacacacatgcacatacatacgaacacatgcacacacagatacacatatgcacagagatacacatgcatgaacacacatgcaaacacacatgcacactcatacatgcacacacacatgcacacatgtagagatacacatgcatgcacatacaggcacacacatgcaaacatgcacacgcagatacacatgtacacacatgtacacacaaacacatgcacacacatacacatgctcacacaaaaacacgtgcacacatgcacacacacagatgcacacagactcatgcagacagatacagacacacatgcacacacagatgcacacacatgcacacagccacatgcacacactcacacgtatgcacacacatgcacatacacacatgcttacagaagcacatgcacacgtgcacatgcacacacatgcacacacgcacacgcacacttgcacacgtgcacacacacgcacacacatggacacacatgcacacatacacacacaccactccttttccatttctctaatt

SEQ ID NO: 284790 - DNA, 1000 bp, Homo Sapiens; identical to SEQ ID NO: 220902

SEQ ID NO: 284791 - DNA, 1000 bp, Homo Sapiens; identical to SEQ ID NO: 220903

SEQ ID NO: 284792 - DNA, 1000 bp, Homo Sapiens; identical to SEQ ID NO: 222500

SEQ ID NO: 284793 - DNA, 852 bp, Homo Sapiens; identical to SEQ ID NO: 115480

SEQ ID NO: 284794 - DNA, 1000 bp, Homo Sapiens; identical to SEQ ID NO: 115482

SEQ ID NO: 284795 - DNA, 1000 bp, Homo Sapiens
gggtggtctcggtcccagggtggtcccagctggtgggagcctctggctgcatctgtgcagccacatccttgtacagaggcataggttaccacccccaccccggcccgggatactgcccccggcccagatcctggccgtctcatcccatacttctgtggggaatcagcctcctgccacccccccggaaggacctcactgtctccagctatgcccagtgctgcatgggacccatgtctcctgggacagaggccatctctcttccagagagaggcagcattggcccacaggataagcctcaggccctgggaaacctcccgacccctgcaccttcgttggagcccctgcatcccctgggtccagccccctctgcatttacacagatttgagtcagaactggaaagtgtcccccacccccaccaccctcgagcggggttcccctcattgtacagatggggcaggacccagcacgctgctggcagagatggtttgagaacacatccaagccagtccccccagcccagcttcccctccgttcctaactgttggctttcccccagccgcacgggtcccaggccccagagaagatgagtctatggcatcaggttcttaaacccaggaaagcacctacagaccggctcctccatgcactttaccagctcaacgcatccactctctgttctcttggcagggcgggggaggggggataggaggtcccctttcccctaggtggtctcataattccatttgtggagagaacaggagggccagatagataggtcctagcagaaggcattgaggtgagggatcattttgggtcagacatcaatgtccctgtcccccctgggtccagccaagctgtgccccatcccccaagcctcctgggaggatccagccaaatcttgcgactcctggcacacacctgtctgtaacctgttttgtgctctgaaagcaaatagtcctgagcaaaaaaaacaaaaaaaacaaaaaaaaaaaaaaaaaa

SEQ ID NO: 284796 - DNA, 1000 bp, Homo Sapiens; identical to SEQ ID NO: 115483

SEQ ID NO: 284797 - DNA, 1000 bp, Homo Sapiens; identical to SEQ ID NO: 220906

SEQ ID NO: 284798 - DNA, 1000 bp, Homo Sapiens
aagaggctgtcacatttgaccaagcaaaccctacacaaatattaggtaaactgaaggaacttaatggaactgcacctgaagagaagaagttaactgaggatgacttgatacttcttgagaagatactgtctctaatatgtaatagttcttcagaaaaacccacagtccagcaacttcagattttgtggaaagctattaactgtcctgaagatattgtctttcctgcacttgacattcttcggttgtcaattaaacaccccagtgtgaatgagaacttctgcaatgaaaaggaaggggctcagttcagcagtcatcttatcaatcttctgaaccctaaaggaaagccagcaaaccagctgcttgctctcaggactttttgcaattgttttgttggccaggcaggacaaaaactcatgatgtcccagagggaatcactgatgtcccatgcaatagaactgaaatcagggagcaataagaacattcacattgctctggctacattggccctgaactattctgtttgttttcataaagaccataacattgaagggaaagcccaatgtttgtcactaattagcacaatcttggaagtagtacaagacctagaagccacttttagacttcttgtggctcttggaacacttatcagtgatgattcaaatgctgtacaattagccaagtctttaggtgttgattctcaaataaaaaagtattcctcagtatcagaaccagctaaagtaagtgaatgctgtagatttatcctaaatttgctgtagcagtggggaagagggacggatatttttaattgattagtgtttttttcctcacatttgacatgactgataacagataattaaaaaaagagaatacggtggattaagtaaaattttacatcttgtaaagtggtggggaggggaaacagaaataaaatttttgcactgctgaaaaaaaaaaaaaaaaaaaaaaaaaaaaaaaaaaaaaaaaaaaaaaaaaaaaaaaa

SEQ ID NO: 284799 - DNA, 1000 bp, Homo Sapiens
tgaaaatctaattgtagcttttctaggctcacattcatgtactacttttagcacccttatgggctgtgctcgccccctggacagttgagctttggattatcttcctcttcaattttccctctattgacccgagtgtctccctctgcttctacagatttatagtactccttggctcttttgagtctccacttttactcactgtctctgggatttttaagatccttttcttctcttataaatcatcctcttaatgaaaattagcctaacaaaagtttggagactggaatcctactttgagccactgacttgaaataactcttttggcaagttgcctgacatcctgtcttaccaaggtggcatatttgcatttttactgcttaaaacattttttttttttaccatctttatccaaatttatcatattgatggtaggactaacaggctttttagaagctggctttaactttgagtctcaagctacaatgctgttgggcagcctggtcttcccacgtgagggtttaactttgtttatttgcctccagttattcctaaatgcttattaaatgaaaggcccaggaacatgtttattttagtcacctttgctttttaacaattttgttttgtaatcaatgagtaattcatgatgaattatttttgactaatggatagccgaaggccaagcttttaattctaataggtaatgttcttcttttgtcttattgaaacaatgagaatactctgtgcatttcaaatgcactccgattatgctgtggttttattcacataagcacaatatgtgttttatttataacttcataacaaacttataatataataatttaccttagcagacatgcaaaagcttattcttgtgtgacttactttctttaagctaataatataaaaataaatatgtatcttaaaaatctataataaaacattagaaattaaaaaaaaaaaaaaaaaaaaaaaaaaaaaaaaaagaaaaaaaaaaaaaaaa

SEQ ID NO: 284800 - DNA, 1000 bp, Homo Sapiens; identical to SEQ ID NO: 115486

SEQ ID NO: 284801 - DNA, 1000 bp, Homo Sapiens
tctgatcagcatgcaggcgaggggcatgtttaatttacttcactaactgctatattctatagctttagacttcatatttcttatccacctttgtctaggctcacgatctttgggcaagggagctttgtcaccgtggttgggctagaacaaatattgagaagtttaccaacacagatgttgagaagtttattgaaaggcactgacattagcagaataagtgatggacattagttgaaccccttcagtgtctatgtgttttattgtattgtctttaactcgttcttgaagcacagatttcagcgagcctttcagctattcagtgccagcggttttccccactcaggaaagatggtgtgagccatacacacagcaggattagacggggagagtttcagctgcagcttctagtttaagaccaaagcccttcctcccgctgctgcatctgtctgagaggggaagctcttgttttccaagctggaaccgtttatgaggaaaactgagcagggtggcaaaatggaaaaggaacaattttctagtttttcctacgcgtgatattgacgcgtgctttttctttgatttgaggtacagcatgtaaataacaaatttccatattcaaaatgatcatattagagtgactgagtgaccttttgattttgaagcagactaaaatctgaccagaccacaatgaaaagtataaaattagaaacttaaattccaagctaaatttcagctttgacccacctaactccagtgaataggtggcagctcagaaacaaggacagcactgctgctgccagagcaagctcacatccagctggcacttcgtgagagctccttcctgccgggcacgtgtgagttcagcgtgggcaagagacttttatgcacattctgtcattcaaaagggaaatgatgccaaccccagatgcagcatgtcctgaatgaatgatctgtaaaatacaataataaaagcttatagtttgagtagaaaaaaaaaaaaaaa

SEQ ID NO: 284802 - DNA, 1000 bp, Homo Sapiens
agcagtttgatcttattgttctcacaatgccagttcctgagattctgcagcttcaaggtgacatcaccaccttaattagtgaatgccaaaggcagcaactggaggctgtgagctactcctctcgatatgctctgggcctcttttatgaagctggtacgaagattgatgtcccttgggctgggcagtacatcaccagtaatccctgcatacgcttcgtctccattgataataagaagcgcaatatagagtcatcagaaattgggccttccctcgtgattcacaccactgtcccatttggagttacatacttggaacacagcattgaggatgtgcaagagttagtcttccagcagctggaaaacattttgccgggtttgcctcagccaattgctaccaaatgccaaaaatggagacattcacaggttacaaatgctgctgccaactgtcctggccaaatgactctgcatcacaaacctttccttgcatgtggaggggatggatttactcagtccaactttgatggctgcatcacttctgccctatgtgttctggaagctttaaagaattatatttagtgcctatatccttattctctatatgtgtattgggtttttattttcacaattttctgttattgattattttgttttctattttgctaagaaaaattactggaaaattgttcttcacttattatcatttttcatgtggagtataaaatcaattttgtaattttgatagttacaacccatgctagaatggaaattcctcacaccttgcaccttccctacttttctgaattgctatgactactccttgttggaggaaaagtggtacttaaaaaataacaaacgactctctcaaaaaaattacattaaatcacaataacagtttgtatgccaaaaacttgattatccttatgaaaatttcaattctgaataaagaataatcacattatcaaagccccatcaaaaaaaaaaaaaaaaaaaaaaaaaaaaaa

SEQ ID NO: 284803 - DNA, 1000 bp, Homo Sapiens
acgaggaggacacggccccagagtccgcactggacacatccctggacaagtccttctccgaggatgcggtgaccgactcctcggggtcgggcacactccccagggcccggggccgggcctcaaaggggaccgggaagcgaaggaagaagcgtccctccaggagccaggaaggcctcaggcccaggcccaaggccaagtgagagagcccaggccacaggacatgctgccattctgccaagagaggctcttctgggggccaggctgggactgggccccggaaaccaaaactccgtgccttacccagccggggccctcctggagccttcttggggtgttgtggctgggaacccgacaggcaccagtgccctgccaggcctggtgccctcctggaccgcctgcacgtgccagcctcccacctgcttcctaaaggcaaccctggcccacacccgcatgcgcccggtgcagcctgccaagggccagtcggggggtgctgcgtcctgccagtgtccaccacagctctgcctgcccttcagcccagcaaggtttaatcaaaatgcaatgctttgcaagtctttactgcttggaggtggctgagttgggggccctgggcaggggtaagctggcaggcagtgccatggcaggccagggtcccctcccatggggtctggcccccgttccagcatgtccagcccctgaagttggagttgggggcggtctgcctttgctgccactgccaggcctctgccctgcagctgaaacttggccatcacatcaacagaaaacccctcccagtgccagctgcccagcgtgggcaggccctggggacaatacaggtccacctgaggggctgcagggtgacacccagcagccgctgccccctcactgcccacccagcgagggcagcctacccgagcctgccccctgccaggtgtgtgccctgaggctggcggctggatgcgtggccaataaaaagcagacctagaaaaaaaaaaaaaaaaaa

SEQ ID NO: 284804 - DNA, 1000 bp, Homo Sapiens
ggcagctatgccatgctctccatcttcttcctgcgccggcctcatctgctgcacacgcccagggctcccaccttccgcatccgcctgggggcccaccgaggaggatctggagagctgctggagaacaccatggaggccatggagaactccatggcccagcgctcggacctcctggagctcgactgtcagctgacacgggacagagtggtggtggtgtcacatgatgagaacctgtgccgccagtcgggcctaaacagggatgtgggcagcctggacttcgaggacctgcccctctacaaggagaagctggaggtttacttctctccaggccactttgctcacgggtcagaccggcgcatggttcgtctggaggacctgttccagaggtttccaaggacacccatgagcgtagagatcaaagggaagaacgaagagctcatccgtgagatagcaggcttggtgagacgctatgaccgtaatgaaatcaccatctgggcctcggagaagagctcggtcatgaagaaatgcaaggctgccaaccccgagatgcccctgtccttcacaataagccgaggattctgggtgctgctttcctactacctggggctgctgcccttcatcccaatccctgagaagttcttcttctgcttcctgcccaacatcatcaacaggacctatttcccattttcctgctcttgcctgaaccagttattggctgtggtttcgaaatggctgatcatgaggaagagtctgatccgacacttggaggagcgaggggtgcaggtggtcttttggtgccttaatgaagagtcggattttgaagcagccttcagcgtgggagccactggcgtcataacggattatcccacagccctgcggcactacctggacaaccatggaccagctgcccggacctcctaagtccagaagcctcgaggtctcctgtttctcttcctgaaaaataaatatttgcctttcgatcaaaaaaaaaaaaaaaaaa

SEQ ID NO: 284805 - DNA, 1000 bp, Homo Sapiens
actggcaattgaccgaccctcacagaagctgctgaaattcctgaataagcactacaatctggagaccacagtcccacaggtgaacaactttgtgatctttgaaggcttctttgcccatcaacatcggccccctgctccctctctgagggcaactcgacactctcgtgctgctgcagtcgatcccacgcccgctgctccagcaaggaagctgccacccaagagagcagagggagacatcaagccatactcctctagtgaccgagaatttctgaaggtagctgtggagcctccttggcccctaaacagggcccctcgccgcgccacacctccagcccacccacccccccgctccagcagcctgggaaactcaccagaacgaggtcccctccgcccctttgtgccagagcaggagctgctgcgttccttgcgcctctgccccccacaccctaccgcccgccttctgttggctgctgaccctgggggcagcccagctcaacgtcgtcgcaccagggggactcccccaggtctggtagcccaaagctgctgctacagccgccatgggggggtgaattcctcatcccccaatacaggcaaccaagactccaagcagggagaacaggaaacaaagaataggtctgccagtgaggagcaggccttgtcacaggatgggtctggggagaagcccatgcacacagctcctccacaggccccggccccgccagcccagtcctggacagtgggtggggacatactcaacgccaggttcattcgaaacctgcaggaacgtcgcagcaccaggccttggtgaccgcagccccgtcaaacatcttcaaagtattatttctccctcactacaggaaagagccaaagcccaaccctcataatagatggatacattcattcattcattcattcagcaggcttatcagattcaagtcatttgtatcttttaaccagaccaataaaagtatttatttttatcacaaaaaaaaaaaaaaaa

SEQ ID NO: 284806 - DNA, 1000 bp, Homo Sapiens
tagccaacaacatcagcatcgacatagtggacatgaaagagaagaggaaagaggagatggaggtttttctgtgtttatccagctgatgcccataattgtattgatcctcgtgtcattattaagccagttgatggtctctaatcctccttattccttatatcccagatctggaactgggcaaactattaaaatgcaaacagaaaacttgggtgttgtttattatgtcaacaaggacttcaaaaatgaatataaaggaatgttattacaaaaggtagaaaagagtgtggaggaagattatgtgactaatattcgaaataactgctggaaagaaagacaacaaaaaacagatatgcagtatgcagcaaaagtataccgtgatgatcgactccgaaggaaggcagatgccttgagcatggacaactgtaaagaattagagcggcttaccagtctttataaaggaggatgaactggaatttttatttataccttttagcgtactctttattttttctgtaagtaagtttggtttcatcatgagggatgaaggaaaagatttgatactgaaaactaaactgaatagttggttcctgaaatcttggactgtttatgacctactggctcctttaaatagtaactgaaaactaaaatggaatattttagttaacgcttctacaagtattttcattttaaaagcttacatgattcctaactaaagtgtcatgagaaaggattatcacacctgtagcaatttccagttttagtgattctccattttttcccttgtcatgtaaatatttatggaatgatcattttgtgtacatacaggttactgcttttttatttaaattcttttagtgtttagctccatgagacacttcagtttaaattgatggaataaatgttatatgacacatttacattttccttatcaaggtgtcaaatatgtggactttaaacaatgaaacttttccaaaaaaaaaaaaaaaaaaaaaaaaaaaaa

SEQ ID NO: 284807 - DNA, 1000 bp, Homo Sapiens
cagagagtccatactattggtcagaaacagaagaatgaccagcaccttcggcgtgtccaggctctgctcagtggacgccaggcaaaggggctgacctcagggcgctggttcctacgccagggctggctgttagtggtgcctccccatggggagcctcggccccgcatgttcttcctcttcactgatgtgctcctcatggccaagcctcggcctccactgcacctgctgcggagtggcacctttgcctgcaaggccctctaccccatggcccagtgtcatctcagcagggtctttggccactcaggaggcccttgtggtgggttgctcagtctgtccttccctcatgagaagctactgcttatgtccacagaccaggaggagctgtcacgctggtaccacagtctgacttgggctatcagcagccagaaaaactagaggaatcttatagattccagaactcaggatacctcagggataggtcacagccaagagtacaaaggaatcttcagtactgaacaaaacagaacccttcatgatttgacaaaggtcactttctgtttgcctggaccaagctactccagatcatctgaccaactcttaaaaatcacggccaggcacagtggctcatgcctgtaatcccagcactttgggaagcagaggtggcaggatcattccagcccaggagttcaagaccagcctgggcaacacagtgagtgagaccctgtctctatttaagaaaaaataattaagaaattttattaaaaaagaagaatcaggaaaccaagtccaacccaactaaacctcaaatgaaccagcccctaacacagatgaggggatttgggactgataagctctgtgctgtgtccatggcccgtcatttatcaaggctgcagctttgtaaatgtggctatttttatgttgtgtatagtttctatcatttatttttccactggatttgagtaaagttttttttcttttttttgggaaaaaaaaaaaaaaa

SEQ ID NO: 284808 - DNA, 1000 bp, Homo Sapiens
gcctgctctttctgctcggcttcctgggctgctgcggggccgtccgtgagaacaagtgtctgctgctatttttcttcctgttcatcctgatcatcttcctggcagagctctcagcagccatcctggccttcatcttcagggaaaatctcacccgagaattcttcaccaaggagctcaccaagcactaccagggcaataacgacacagacgtcttctctgccacctggaactcggtcatgatcacatttggttgctgcggggtcaacgggcctgaagactttaagtttgcatctgtgtttcgactcctgaccctggatagtgaagaggtgccggaggcctgctgccggagggaaccccaaagtcgggacggggtcctgctgagccgggaggagtgcctcctgggaaggagcctattcctaaacaagcagggctgttacacggtgatcctcaacaccttcgagacctacgtctacttggccggagcccttgccatcggggtactggccatcgaggaagaaagagctcattctgtctcacaagccaccggcatcctgtatcagcttccagcctcccctcaggctttccagtcaccagggacactcggagccacagcctagagccccgtgttccctggcctgtgcgtctgcccccttctgagatgcagccagaagctctgtgcctgctgcaaagattcaggtggaccctcctctaatctcctcctgctgtgcccgccagtccttgccctcccaccaggtctctgagctcagtcttaccaaattcgccctttaacagcttgctctggcaaccccataaatgacacctgagctccgtagaagctaagctcctgagacccagggggacctgccactggtaccgcggcccagcctggggcctgggggctgcccctcttgaaccacccacatgcttagccccagctttttggaagaggcaaatggctggtctgaggatgacacacaaaaacaaaaaaaaaaaaaaaaaa

SEQ ID NO: 284809 - DNA, 731 bp, Homo Sapiens; identical to SEQ ID NO: 220403

SEQ ID NO: 284810 - DNA, 1000 bp, Homo Sapiens
ccagggcagccgggcagcgactggccacacaggctgtggtgctgtgcagctgccaaggccagctccgtcaggcagaggctgaaaatgcccggctgcagctgcagctcaagaaactgaaggatgagtacgtcctacggctgcaacactgcgcccggcaggcagtggagcacgcagatggtgcaggccaagcgccagccaccacggccctccggacattcctggaggcgactctggaggacatccgggcagcgcaccgcagccgtgagcagcagctggcccgggctgcccgcagctaccacaagaggctggtggatctgagccgcaggcatgaagagctactggttgcctacagggcacctgggaacccccaagctatttttgacatagccagcttggacctggaaccattgcccgtgcccctggtcactgacttcagccatcgggaggaccagcacggcgggcctggggcactgctctcatccccaaaaaagagacccggtggagcctcccaggggggaacatcagagccacagggcctggacgctgcatcctgggcccagatccaccagaagctccgggacttctcccgcagcacccagagctggaacgggagcgggcacagctgctggtccgggccacgatggctgaagagcaactttctgagctacaggagtacgtggaccagcacctgggcaggtacaagcacgaaatcctgaggctgaggaagctggcaggtgcaggggacccctggaaagtgggggctgtgcctccagccaagccccagcatccaaggaccggcagccactaggccgtctcccaaggagcagagcagagcagagctcctcagccagcacagaaccctcccacccagccccccataaaacatgagtcaggatagaacccaaaaaaaaaaaaaaaaaaaaaaaaaaaaaaaaaaaaaaaaaaaaaaaaaaaaaaaaaaaaaaaaaaaaaaaaaaaaaaaaaaaaaaaaaaaaaaaaa

SEQ ID NO: 284811 - DNA, 1000 bp, Homo Sapiens
ccaacgctgcgggcctcttggtggttggcaactttcaggtggatcatgccaggtctctgcactacgttggagctggcgtggccttccctgcggggctgctctttgtttgcctgcactgtgctctctcctaccaaggggccaccgccccgctggacctggctgtggcctatctgcgaagtgtgctggctgtcatcgcctttatcaccctggtcctcagtggagtcttctttgtccatgagagttctcagctgcaacatggggcagccctgtgtgagtgggtgtgtgtcatcgatatcctcattttctatggcaccttcagctacgagtttggggcagtctcctcagacacactggtggctgcactgcagcctacccctggccgggcctgcaagtcctccgggagcagcagcacctccacccacctcaactgtgcccccgagagcatcgctatgatctaaggtctggggagggtggctggcccggcctccacagcaccccaccccatatcttctttccatttatttcgtaccaaaaacaattttgagaaagtattctgttgggatctgggcttcctcacttctggagaagtggccatcccatgcccacctgtgccatggaggagtgggccctgccagctgccacagctgcatgacctgcttccccaccccacggtgtcgttttgtttttaaaggtcacctgtcctcactcacccagccagcccttcaggtgccttctactcccagtgccaaagccagaccactggggtttcctgctgcaggaattgggggctgggaacagcagaggggatagaagtctggtggaggtggagtgggcacgccttagcctacggaaaggcccatttctgggcccactgagctgcactgggattcttcactctgcccctcacttcctttagggcaaataacacagcagaaccacgtgggtattttagtacttttttttatattaaaagaattctaatttgaaaaaaaaaaaaaaa

SEQ ID NO: 284812 - DNA, 1000 bp, Homo Sapiens
aagctgctaggagaggccacgtggagtgtgtcaactctcttatagcttatgggggcaacattgaccataagatcagccacctgggcactccactctatttggcttgtgaaaaccaacagagagcctgtgtcaagaagcttctggagtcaggagcggacgtgaaccaagggaaaggtcaggattccccacttcatgcagtggccaggacagccagtgaagagctggcctgcctgctcatggattttggagcggacacccaggccaagaatgctgaaggcaaacgtcctgtggagctggtgcctccagagagccccttggcccagctcttcttggagagagaagggcccccttctttgatgcagttatgccgccttagaattcggaagtgttttggaatccagcagcatcataagataaccaaactcgtcctcccagaggatctgaaacagtttctcctacatctttaaatgcatctagggaatggattcacaaacgatgtgaaaacattattgagtgttgtagccactagaattttaaaatcaagttggatttatagagtttgactagttttttcgattagatttgtatttgttataaacttgtttatggagtttgactaattttttctattcaatttgtatttgttaaactcaagccagggtggaaagacactgcatacgtttgtattattagttagaaggcatgaagacttttttccctgcttggagagtgtcataagttattgttttgcatatctactgcatgccaagcactttctgcatcatctaatttagccctcacagccactgggtcaagatgtccaattttccagagtaaggatagaggagtcaaattcaaatacaggttttctgacattaacttatgtgatgacttgatcgaggcaggcttttccagcatcactgtcctggttccatctctgctatatgggaatgaaaataaagaaacatatttcttggcttgtctaaaaaaaaaaaaaaaa

SEQ ID NO: 284813 - DNA, 1000 bp, Homo Sapiens; identical to SEQ ID NO: 220909

SEQ ID NO: 284814 - DNA, 1000 bp, Homo Sapiens
tgattcatatgttctccacagctgaaggcctgctgacccagggtgataagatcactgctgatggacttcaggaggtgtttgagaccgatgtctttggccattttatcctgattcgggaactggagcctctcctctgtcacagtgacaatccatctcagctcatctggacatcatctcgcaatgcaaggaaatctaatttcagcctcgaggacttccagcacagcaaaggcaaggaaccctacagctcttccaaatatgccactgaccttttgagtgtggctttgaacaggaactttcaaccagcagcttcgcttttttgcaaatgcattcactttgacaccatataatggaacagaagctctggtatggcttttccaccaaaagcctgaatctgtcaatcctctgatcaaatatctgagtgccaccactggctttggaagaaattacattatgacccagaagatggacctagatgaagacactgctgaaaaattttatcaaaagttactggaactggaaaagcacattagggtcactattcaaaaaacagataatcaggccaggctcagtggctcatgcctataattccagcactttgggaggccaaggcagaaggatcacttgagaccaggagttcgagaccagcctgagaaacatagtgagcccttgtctctacaaaaagaaataaaaataatagctgggtgtggtggcatgcgcatgtagtcccaactactcaggaggatgaggtggggggatctcttgaggctgggaggcggaggttgcagtgagctgagattgtgccactgcactccagcctgggtgacagcgagaccctgtctcaaaacatatatatatttaatatatatgtaaagccagagctgacaatgacactctggaacattgcataccttctgtacattctggggtacatggatttctactgagttggataatatgcatttgtaataaactatgaactatgaaaaaaaaaaaaaaaaaa

SEQ ID NO: 284815 - DNA, 1000 bp, Homo Sapiens; identical to SEQ ID NO: 220910

SEQ ID NO: 284816 - DNA, 1000 bp, Homo Sapiens
gcaggtgtatgcagatcctgactgccttccccgaacactggactttggcctcaacgtgaagcttttctgggagaagtttgttcccacagattgtcccccggccttcttcccgctggccgccatctgctgcagactggagcctgagagcagagccccccccggggccgcaggagagggcccgggctgcgcggatgatgagggcccagtgaggcgccaagggaaggtcaccatcaagtatgaccccaaggagctacggaagcacctcaacctagaggagtggatcctggagcagctcacgcgcctctacgactgccaggaagaggagatctcagaactagagattgacgtggatgagctcctggacatggagagtgacgatgcctgggcttccagggtcaaggagctgctggttgactgttacaaacccacagaggccttcatctctggcctgctggacaagatccgggccatgcagaagctgagcacaccccagaagaagtgagggtccccgacccaggcgaacggtggctcccataggacaatcgctaccccccgacctcgtagcaacagcaataccgggggaccctgcggccaggcctggttccatgagcagggctcctcgtgcccctggcccaggggtctcttcccctgccccctcagttttccacttttggatttttttattgttattaaactgatgggactttgtgtttttatattgactctgcggcacgggccctttaataaagcgaggtagggtacgcctttggtgcagctcaaaaaaaaaaaaaaaaatgatttccagcggtccacattagagttgaaattttctggtgggagaatctataccttgttcctttataggccaaggaccgcagtccttcagtaacaccagtgtaaaagcttgaggagaaattgtgaagctacacagtatttgttttctaatacctcttgtcattctaaatatctttaatttattaaaaaatatatatatacagta

SEQ ID NO: 284817 - DNA, 1000 bp, Homo Sapiens; identical to SEQ ID NO: 115492

SEQ ID NO: 284818 - DNA, 1000 bp, Homo Sapiens; identical to SEQ ID NO: 220912

SEQ ID NO: 284819 - DNA, 1000 bp, Homo Sapiens
gcagcaggctgtgattgcaccactgcacttcagcttgggcaacagagcaagaccctgtctccgaaacaaataaaaaatactgtaataaaagtacttataaacatactaatcctctttcaggaccctaaagttgcaggttagtaggtcttcaaggacaaatctgtaagtttcttatttctgtagtgcaagtaaaatttcactttttgaaactatagagagatccctttctgattagcctacagaacttaaagtgagggaaccatttcctctcacagacaaagaggcctgggatattaggactttggggtttgagagcatcatggggcagacagatggtggatggtctggacaagaagcgagtaagccactgcggttggtcatactgaagggaattgatggcaagaggatcccctgagcaagtcagaagttactctcatcagtcgttcatggtcacaacctgaggtactctgctgagtgggcaaggctgaagaagaggcctgtggaatgcagcattacctgctggacagagcagggcaggcagttctatgccttggagctcctgactgcagggactctgtccccacactcaaaaagactcagctcactcaatgagagaatgtgatttactttatagaacgtataatcaactttgttgaataatttgttctattaaggctgtctaaagtatgtgatgtcttcatcatagtatgaagtgttgaaaattaataacgagcctagtttaggaaaaagctgcttaaaactgtggctctaagagagtaatcataaaataccttagataaaattgcactatggaattttcattgagtatgtttaaattattggcttgtctactaatacacatctgcttcaaaatgaacatatttcataaaattggcatcaattttaatgacgctcctggtatggaacctcagatataccctattggagacaatcctttgatcataaattctccccaactataaatcattttatgtcttta

SEQ ID NO: 284820 - DNA, 1000 bp, Homo Sapiens
caagccagccttggacttgtatcagctgtcacctagtgaagttaaacagcttctgctggatattctgcagcctcaacagaatggaagatgttggctgaacaggcgtcagatcgatgggtctttgaatagaactcccaccgggttctatgaccgagtgtggcagattctggagcgcacgcccaatgggatcattgttgctgggaagcatttgcctcagcaaccaaccctgtcagatatgaccatgtatgagatgaatttctctctccttgttgaagacacgttgggaaatattgaccagccacagtacagacagatcgttgtagagttacttatggttgtatccattgtactggaaagaaaccccgagctagaatttcaagacaaagtagatctagacagactggtcaaagaagcatttaatgaatttcaaaaagatcagagtcggctaaaggaaattgaaaaacaagatgacatgacttccttttacaacactcctcccctgggaaaaagaggaacatgcagctatttgacaaaggcggtgatgaatctgctgctggaaggagaagtcaagccaaacaatgatgacccgtgtctgattagctagtggggaaggtgtaggaagctctgttgagacacatgttctgaagtgtgttgtgtttcatgttcaagcttaatcaaggcagccattaatatacgaactgagcatgctggggaggtgaatgccacatccttggcggggttatggacctcttgcatgtcatagccaatctaacggtaatggtaaatgcttttaatcaagcaggaaaaagttctcatgattatgccaactataatagtaatcctcactgagtgataaaaatagtttatgaattgaaaatttgccgctgcatgttgtatgatcaaatagttcatcaaaatgaatctttgctctttggactgaattcttaccatactgccattaaaataaatttgccaactaaaaaaaaaaaaaaaaaaaaaa

SEQ ID NO: 284821 - DNA, 1000 bp, Homo Sapiens
gcggcgggggtgtgtgtgggggttagttttgcaaaaagtactgatggcaccgctgtgctccaagttaaccagaacacaagaatcgaaaaagcctgtgagatactggtgctcgtgatcgtaagctccaggtcggggggttttcagatgaacacaaaaagggggctgctcccgtcccaagatgagtgataaatgagtcacttctcatactcgcactcacactcgctccatttcctctgggatgactgtcttccgtcctaccgctgtggctgctgttatttgcctgataaacttctttccctctccctccctctgacacagaaacacacacacacacacacacacagacacacacacacacacacagcccgctggatctataagcagtttgtaacaggatgcaccagttctaatcacgtttcaagtcaaatgaaccagtcgcagcttcctaataagtgaatggctgacataaggagttaattcagaagcagctcaatactatggacaatactagtggacaatattagcatactgctcgtacaacaaagataccgtagtctctggtgctgcctcttcaggacgaatttgctgaaagtgagttgtaattagagatgttaaaaaaaaacattggctgcgcgcgatggcttactcctgtaatcccagcacttttggaggcgaggcaggtggatgacctgaggttaggagttcgagaccagcctggctaacatggcaaaaccccatctctactaaaaatacaaaaaattagccaggcatcgtggtgggcacctgtaatctcagctacttgggaggctgaggccgaagaatttcttgaacctgggaggtggaggttgcagtgacccgagatcatgccattgcactccagcctgggcaacaagagtgaaattgtgtctcaaataataataataataataataaactgagatttatcattcctcctctctccttttccttgagaacttaataaaaatggaaaatatccatt

SEQ ID NO: 284822 - DNA, 1000 bp, Homo Sapiens
tagaactgccaacagactctttggagaaaagacgtgtgatttccttccagactttaaagaatactgtcagaagttctatcaggcagagctggaggagttgtcctttgctgaagacactgaagagtgcaggaagcatataaatgactgggtggcagagaagactgaaggtaagatttcagaggtactggatgctgggacagtcgatcccctgacaaagctggtccttgtgaatgccatttatttcaagggaaagtggaatgagcaatttgacagaaagtacacaaggggaatgctctttaaaaccaacgaggaaaaaaagacagtgcagatgatgtttaaggaagctaagtttaaaatggggtatgcggatgaggtacacacccaggtcctggagctgccctatgtggaagaggagctgagcatggtcattctgcttcccgatgacaacacggacctcgccgtgaaagagtgatggatcttgaagaatttgaagctaactccaggacaggcagaggacaaacaaggatgctgatgaagtcttcttgcattccccatttctcgtctcatgctcccttctcatgcctcccttcatcttcagatgaaacacaattccctctcttttactctgagttgccctctgatttaaccctgaatagtcccctcattagactcagaagcagagttctgagccatgctctttgtcttttgtcaaacaatctctcccactcacagtagtatgtattgcatgaagattaatgtaatgaattggttagaattttctaaactgttaaaaaatgtttttaacatttgaaaggagttaggtacaaattgtttttattaaaaatttctgcctgtctcaaaaaaaaaaaaaaaaaaaaaaaaaaaaaaaaaaaaaaaaaaaaaaaaaaaaaaaaaaaaaaaaaaaaaaaaaaaaaaaaaaaaaaaaaaaaaaaaaaaaaaaaaaaaaaaaaaaaaaaaaaaaaaaaaaaaaaaaaaaaaa

SEQ ID NO: 284823 - DNA, 1000 bp, Homo Sapiens
caagatcaaagttggtccaaaagttttggggcctttctgtggagagaaagccccagaacccatcagcacccagagccacagtgtcctgatcctgttccatagtgacaactcgggagagaaccggggctggaggctctcatacagggctgcaggaaatgagtgcccagagctacagcctcctgtccatgggaaaatcgagccctcccaagccaagtatttcttcaaagaccaagtgctcgtcagctgtgacacaggctacaaagtgctgaaggataatgtggagatggacacattccagattgagtgtctgaaggatgggacgtggagtaacaagattcccacctgtaaaaaaaatgaaatcgatctggagagcgaactcaagtcagagcaagtgacagagtgaatgacgggaccccacacaatgcagacatccagaaatggatcactcccaagacccctggggcccagagctgcaccacccctccccacccacaacacccccgtgcccctttccatgtggattagaatgggtgctgaacaacatgatctcagcagttgaagctgctacgtgtgtgaaagcaaattctccacttgagggtttgcccatcattcaaacactattccagaaaataatgaaaaaaaaatgtgggatttattttagcacctctgagtggactgtacttttctcaacggaaaaaaaaaatgcccttggtccttgagacaaaagatttaatatacaaccatgtggcctcaggctgaccagatcaaagtggtttctaatccattctacatgtcaagtttaaatgaaccagactgcctgtgactttatgaatctgaaggtattacctgttgctgctttcttaaccaccatgagtaggtaaagcaaataataactcacagagtgtggatttttgagaaaaaaaaaaaaaaaaaaaaaaaaaaaaaaaaaaaaaaaaaaaaaaaaaaaaaaaaaaaaaaaaaaaaaaaaaaaaaaaaaaaa

SEQ ID NO: 284824 - DNA, 1000 bp, Homo Sapiens
agggaacctgttcagcctgacccaggagggggctcccttgtgccgcatcatagccaaggagggtggggtcgtagcactcttcaaggtttgccggcaggacagtttccggtgcttgtacccccaggcgctccgcacgctggcctccatctgctgcgtggaagagggtgtccaccagctggagaaggtggatggcgttctgtgcttggccgacatcctgactgacaacagccactcagaggccacacgggctgaggctgcggctgtggtggcccaggtcacctccccacacctgcccgtcacccagcacctcagtagcttcctggagagcatggaggagatcgtgacagccctcgtcaaactgtgccaagaggcctcatcaggggaagtcttcctactggcctctgcggcccttgccaacatcacgttctttgacacaatggcctgcgagatgctcctgcagttgaatgccatccgtgttctcctggaagcctgcagtgacaagcagagagtggacacgccttacactcgggaccagattgtgaccatcttggcaaacatgtctgtcctagaacagtgtgcctctgacatcattcaggaaaatggggtccagcttatcatgggcatgctgtctgaaaaaccaaggtctgggactcctgctgaagtggcagcctgtgagcgagtccagcagaaagctgcagtgaccctggctcgtctcagccgagacccagatgtggcacgggaggccgtgcggctcagctgcatgtcccgtctcatcgagctctgcagatccccatcagagaggaacagcagtgacgccgtgcttgtggcctgcctggctgctctgcgtagattggctggggtctgccctgaaggcctccaggactctgactttcagcagttggtccagcctcggctggtggactccttcttactctgcagcaacatggaggagagttttgtgtagtgagtgtgggcgaagaaatacatttggctgttctca

SEQ ID NO: 284825 - DNA, 1000 bp, Homo Sapiens; identical to SEQ ID NO: 220914

SEQ ID NO: 284826 - DNA, 1000 bp, Homo Sapiens
cccgggctggacgacgtctggccggctcccggcgaagggcagcggaggagcggcccagagcgcgcagctagggcactggcgaaaccccgggacagtccctctccgtgcgggggcggcgcagagcagtcccatccccggggtcccgggcgcggctgactgccggctggttccctgcgcgcagtagctccccgagccgggctgcaccggaggcggcgagatggtcgcgcgcgtcggcctcctgctgcgcgccctgcagctgctactgtggggccacctggacgcccagcccgcggagcgcggaggccaggagctgcgcaaggaggcggaggcattcctagagaagtacggatacctcaatgaacaggtccccaaagctcccacctccactcgattcagcgatgccatcagagcgtttcagtgggtgtcccagctacctgtcagcggcgtgttggaccgcgccaccctgcgccagatgactcgtccccgctgcggggttacagataccaacagttatgcggcctgggctgagaggatcagtgacttgtttgctagacaccggaccaaaatgaggcgtaagaaacgctttgcaaagcaaggtgagcactgttaaaatccggctaggccaagatttcccaatgtcttgaagccaatggctaggaaaacagctgagcctgggactggactttgtcagtaacctctcttccctagggcacgggaggagtgggtgaataggacctcttggcttgaggaccatgattgtgaatacagacatttaattcagaatgacacctacattgatgaattttcattgtacaagtgtttttccagatcaaacacaaaacccatgtaattccttgataaattttcaatgcagggcagataaactgttgctaacatttttcatttatatttactgaagttattttcatcagaattcattctttttcataagttattaaacaaatgtgtgatctattgaaaaaaaaaaaaaaaaaaaaaa

SEQ ID NO: 284827 - DNA, 1000 bp, Homo Sapiens
tgattcttctaaagcactggtttcaagaatatggaggctggaaggaaataaacattacggtacagacatggagatgtaaaatgagtttgtattattacaaatattgtcatctttttctagagttatcttctttattattcctagtctttccagtcaacatcgtggatgtagtgattaaatatatctagaactatcatttttacactattgtgaatatttggaattgaacgactgtatattgctaagagggcccaaagaattggaatcctccttaatttaattgctttgaagcatagctacaatttgtttttgcatttttgttttgaaagtttaacaaatgactgtatctaggcatttcattatgctttgaactttagtttgcctgcagtttcttgtgtagatttgaaaattgtataccaatgtgttttctgtagactctaagatacactgcactttgtttagaaaaaaaactgaagatgaaatatatattgtaaagaagggatattaagaatcttagataacttcttgaaaaagatggcttatgtcatcagtaaagtacctttatgttatgaggatataatgtgtgctttattgaattagaaaattagtgaccattattcacaggtggacaaatgttgtcctgttaatttataggagttttttggggatgtggaggtagttgggtagaaaaattattagaacattcacttttgttaacagtatttctcttttattctgttatatagtggatgatatacacagtggcaaaacaaaagtacattgcttaaaatatatagtgaaaaatgtcactatatcttcccatttaacattgtttttgtatattgggtgtagatttctgacatcaaaacttggacccttggaaaacaaaagttttaattaaaaaaaatccttgtgacttacaatttgcacaatatttcttttgttgtactttatatcttgtttacaataaagaattccctttggtaaaaaaaaaaaaaaa

SEQ ID NO: 284828 - DNA, 1000 bp, Homo Sapiens; identical to SEQ ID NO: 220915

SEQ ID NO: 284829 - DNA, 1000 bp, Homo Sapiens; identical to SEQ ID NO: 220916

SEQ ID NO: 284830 - DNA, 1000 bp, Homo Sapiens; identical to SEQ ID NO: 220917

SEQ ID NO: 284831 - DNA, 1000 bp, Homo Sapiens; identical to SEQ ID NO: 115493

SEQ ID NO: 284832 - DNA, 1000 bp, Homo Sapiens; identical to SEQ ID NO: 115494

SEQ ID NO: 284833 - DNA, 1000 bp, Homo Sapiens
ggactgaacagctcttcctctagctgtctggctgtataactcttacagtagtctgtataataagggcatctctattagatctttaggggacagaggatttgtcaagatggttagctctttgttttggggtgcagagaaagaaaagagcagcaacagcagaggctggactccctggttcagtatttaatgccattttattcacatgctcccatgttctccctccctcccattgtagccttgctgcccaggggagggatatgtcttcctttatgcatctgggaaaccaggaacagaccctgcgcaggagagtcagagggggaagagttagaatgggtcagtggctggaacaaagttctggttaaggaggaaattagtgccacccacggtgagaagcagagaaggcacttgcatcctatgcagccctgaagaccaggctcctttgggcaaaaggcaagactctggcaggtgggtcaatgctctctccttggagcaagaagccagcttttggggaaggcaggtcctgaggcaggcactgccctgtggtcttccccaggttgaggagagaagtggaagccccatggaagacagtgctcccagctgaggtaggaggcggaggtgggggtgggggtagtttaagcctatggggcccagggggaaaggccaaacagaaacccaactaccccctaatgaagggcctggaggttggggtatcttggagctcctcagagcccttcttcccatcaaaaaggtatcaaatgccttggaagctccctgatcctacaaaacaaaaaaatgcttatttttaccactgtgaggcaagctgaggtgaacatttaaaaggctatttcaagacgaggtgcggtggctataatcctagcactttgggaggctgaagcaggaggatcacttgagcccaggagttcaagaccagcttgggcaacatagggagaccctgtctctgcaaaaaaataaaaacgaatacataaaaattaaaaaaaaa

SEQ ID NO: 284834 - DNA, 1000 bp, Homo Sapiens; identical to SEQ ID NO: 115495

SEQ ID NO: 284835 - DNA, 1000 bp, Homo Sapiens
aaaggctttactctgagttcaaatcttcaagcccatcagagagtccacactggagagaagccatacaaatgcaatgagtgtgggaagagcttcaggaggaattcccattatcaagttcatctagtggtccacacaggagagaaaccctataaatgtgagatatgtgggaagggcttcagtcaaagttcgtatcttcaaatccatcagaaggcccacagtatagagaaaccttttaagtgtgaggagtgtgggcagggtttcaatcagagctcacgacttcagattcaccagctgatccatacgggtgagaaaccatacaaatgtgaagagtgtggcaagggatttagtcgtagagcagatcttaaaattcactgtaggatccacacaggagagaaaccatataattgtgaggagtgtgggaaggtcttcaggcaggcctcaaatcttttggcccatcagagagtccacagtggagaaaaaccattcaaatgtgaagaatgtgggaagagtttcggtcggagtgcacatcttcaagcccatcaaaaagtccacactggagataagccatacaaatgtgatgagtgtgggaagggcttcaagtggagcttgaaccttgacatgcatcagagggtgcacacaggagaaaaaccatataaatgtggggagtgtggtaagtacttcagtcaggcctcaagtcttcaacttcatcagagtgtccacacaggagagaaaccatacaaatgtgatgtgtgtggtaaagtcttcagtcggtcttcacaactacagtctcatcagcgagttcacactggggagaaaccttataaatgtgagatatgtggtaagagcttcagttggcgatcaaatcttacagttcatcacagaatccatgttggtgataaatcctataaaagtaataggggtggtaagaacatcagagaatccacacaggaaaaaaaatctataaaatgattctttgtgaaaaaaaaaaaaaaaaaaaaaa

SEQ ID NO: 284836 - DNA, 934 bp, Homo Sapiens
gggattccttaccccatcaccatgtgcacctcagaaactttccaagcgctggacaccttcgaagccagacatgatgacatcgtgctagcatcttatccaaagtgcggttcaaactggattctccacattgtcagtgaattaatatatgctgtttctaaaaaaaagtataaatatccagaattcccagttcttgaatgtggggattcagaaaaatatcagagaatgaaaggctttccatcaccaaggattttggcaactcacctccactatgacaaattacctgggtctatcttcgagaataaagccaagatattggtgatatttcgaaaccctaaagatacagcagtatcttttttgcatttccacaacgatgtccccgatattccaagctatggctcttgggatgaattcttcagacagttcatgaaaggacaagtttcttggggaaggtattttgattttgcaatcaattggaacaaacatcttgatggcgacaatgttaagttcatattatatgaagacctgaaagagaatctggctgctggaataaaacagattgctgagttcttgggattctttctaactggggagcaaattcaaactatctcagtccagagcaccttccaagccatgcgtgcgaagtctcaggacacacacggtgctgtcggcccattccttttccgcaaaggtgaagttggtgattggaaaaatttgttcagtgaaattcagaaccaggaaatggatgaaaaattcaaagagtgcttagcaggcacctccctcggagcaaagttgaagtatgaatcatattgccagggttgattccagtcaattcagcaggcctagatttattttccttaataataattaagtgtaaataattaaatgataattcaatcaaataatcaaataataattaaacaatattgaaatctaa

SEQ ID NO: 284837 - DNA, 1000 bp, Homo Sapiens; identical to SEQ ID NO: 220918

SEQ ID NO: 284838 - DNA, 1000 bp, Homo Sapiens
agtccagttactttcaggctcggggagtgaaggcctcgttgagagaaggtctcattcggtgttttgggaagagagtcgtgtgggcccaggtctgtctgctatcagctatgccgctgcccgttgcgctgcagacccgcttggccaagagaggcatcctcaaacatctggagcctgaaccagaggaagagatcattgccgaggactatgacgatgatcctgtggactacgaggccaccaggttggagggcctaccaccaagctggtacaaggtgttcgacccttcctgcgggctcccttactactggaatgcagacacagaccttgtatcctggctctccccacatgaccccaactccgtggttaccaaatcggccaagaagctcagaagcagtaatgcagatgctgaagaaaagttggaccggagccatgacaagtcggacaggggccatgacaagtcggaccgcagccatgagaaactagacaggggccacgacaagtcagaccggggccacgacaagtctgacagggatcgagagcgtggctatgacaaggtagacagagagagagagcgagacagggaacgggatcgggaccgcgggtatgacaaggcagaccgggaagagggcaaagaacggcgccaccatcgccgggaggagctggctccctatcccaagagcaagaaggcagtaagccgaaaggatgaagagttagaccccatggaccctagctcatactcagacgccccccggggcacgtggtcaacaggactccccaagcggaatgaggccaagactggcgctgacaccacagcagctgggcccctcttccagcagcggccgtatccatccccaggggctgtgctccgggccaatgcagaggcctcccgaaccaagcagcaggattgaagcttcggcctccctggccctgggttaaaataaaagctttctggtgatcctgcccaccaaaaaaaaaaaaaaaaaaaaaaaaaaaaaaaaaaaaa

SEQ ID NO: 284839 - DNA, 1000 bp, Homo Sapiens
aggaacagggccctggagcacctggtttcggggacagtagggttggtgggagttgcgatgatattgccacctacctcttacatcttttagtctgtctgctatcagctatgccgctgcccgttgcgctgcagacccgcttggccaagagaggcatcctcaaacatctggagcctgaaccagaggaagagatcattgccgaggactatgacgatgatcctgtggactacgaggccaccaggttggagggcctaccaccaagctggtacaaggtgttcgacccttcctgcgggctcccttactactggaatgcagacacagaccttgtatcctggctctccccacatgaccccaactccgtggttaccaaatcggccaagaagctcagaagcagtaatgcagatgctgaagaaaagttggaccggagccatgacaagtcggacaggggccatgacaagtcggaccgcagccatgagaaactagacaggggccacgacaagtcagaccggggccacgacaagtctgacagggatcgagagcgtggctatgacaaggtagacagagagagagagcgagacagggaacgggatcgggaccgcgggtatgacaaggcagaccgggaagagggcaaagaacggcgccaccatcgccgggaggagctggctccctatcccaagagcaagaaggcagtaagccgaaaggatgaagagttagaccccatggaccctagctcatactcagacgccccccggggcacgtggtcaacaggactccccaagcggaatgaggccaagactggcgctgacaccacagcagctgggcccctcttccagcagcggccgtatccatccccaggggctgtgctccgggccaatgcagaggcctcccgaaccaagcagcaggattgaagcttcggcctccctggccctgggttaaaataaaagctttctggtgatcctgcccaccaaaaaaaaaaaaaaaaaaaaaaaaaaaaaaaaaaaaa

SEQ ID NO: 284840 - DNA, 1000 bp, Homo Sapiens
ggggtgccttgaacccaactcctaaatccctaagacctgcccacctcttgtgtctcctgtctcagcaaacattcccacactcttgcatattgttaaagtaacctctgcttaccaggcttctggtttaataaaagatggctagagtgactccatcttaaagcaagtagctaggcactcaaaaggaacctacaggcttaatacttgggtctgaaaatagccacagtctaagctgaccaccaattataattgcagaatatttaaggccatacaaaacatctcccactaagcctacaaaatgtccaggtgtcctaaaagttcagcccacttaaaggcagcattaatgagcaggtttaggttgaaggattaatggtcatcaataccactgttaagaagaaaattcttggccaaattgaatttaatggagtttaactgagcagacaattcacaaatctagaagcctcctgagccagagtaggttcagagagtcttgaacacagccacgtggtggaagaagatttatggacaggaaaaggaaaatgatgtactgaaaatgaaagtgaggtacagaaacagccagactggttatagctcagcattggccttatttgaacgagatttgaacagttggccacctttgattggccgaaactcagtgattggcacaagagtaggttgcagtctgtttacacatccttttaggttatagttcaccatgtacagagaaattttaggccaaacttaaaatatgtaaggaggcagctttaggctaaacttgatttaacagcaccaataccccctacctttagtgagcacatctgcacattccaattttaatgacagctccttagaatttcttatcaacgaagacactaacaaagaatggcgcattcctccttctcctttctgaggatgccctaccctgtaacaaagtcgtttctaataaatttgcttctttcaccataaaaaaaaaaaaaaaaaaaaaaaaaaaaaaaaaaaaaaa

SEQ ID NO: 284841 - DNA, 1000 bp, Homo Sapiens; identical to SEQ ID NO: 115500

SEQ ID NO: 284842 - DNA, 1000 bp, Homo Sapiens
tcttgtcaggagaatttcagattgtaaatcctcacttattgaaagatcttaccgagcggggcctatggcatgaagagatgaaaaaccagattattgcatgcaatggctctattcagagcataccagaaattcctgatgacctgaagcaactttataaaactgtgtgggaaatctctcagaaaactgttctcaagatggcagctgagagaggtgctttcattgatcaaagccaatctttgaacatccacattgctgagcctaactatggcaaactcactagtatgcacttctacggctggaagcagggtttgaagactgggatgtattatttaaggacaagaccagcagctaatccaatccagttcactctaaataaggagaagctaaaagataaagaaaaggtatcaaaagaggaagaagagaaggagaggaacacagcagccatggtgtgctctttggagaatagagatgaatgtctgatgtgtggatcctgaggaaagacttggaagagaccagcatgtcttcagtagccaaactacttcttgagcatagataggtatagtgggtttgcttgaggtggtaaggctttgctggaccctgttgcaggcaaaaggagtaattgatttaaagtactgttaatgatgttaatgatttttttttaaactcatatattgggattttcaccaaaataatgcttttgaaaaaaagaaaaaaaaaacggatatattgagaatcaaagtagaagttttaggaatgcaaaataagtcatcttgcatacagggagtggttaagtaaggtttcatcacccatttagcatgcttttctgaagacttcagttttgttaaggagatttagttttactgctttgactggtgggtctctagaagcaaaactgagtgataactcatgagaagtactgataggacctttatctggatatggtcctataggttattctgaaataaagataaacatttctaagtgaaaaaaaaaaaaaaaa

SEQ ID NO: 284843 - DNA, 1000 bp, Homo Sapiens
tttatttttgttaagtcttttgtgactgggacagttaattttagtagctgaagaacgtctagttgtttgcttgatatttgtgaacatttactgcatggatcacaaaacaatataccctgtatttcttacacgccacttatatgcagcaaggagtaaatgtgttactagattcgggtagtgcattttgtcactgaatctgaccttgagaatgtacattaattcttatattttacataatgtatgtgttgtttaagaaatgtataaaaaacctgaaaaaaatgagtaagaactggcagaagttaaaaccctttgtatcaaaagatctttattggtagagcactggttatcttctggatactaaaaagttgtattacaaagccaaacacttgcattcacaactttaaaaaaagatccaaggaactattcataatgatgaaatttcaactacatacaaggaggagaaaataagaacccagtcataacagaggaattctataggagtctgcatcaattcattcttaaggttgcctactctctgttatgtgaattagcgtctgtgtttcacccattgtctgtgtttagtccttgttcaccactaaggcaaggaattcttaactaggcctctgtttaccaacttctctttctcctcctttccctcttattcctccttctcctcttccttcttatataatgctagtatattctcaaaattgcaaagctgtgagaatattaaaataatcatggctaatgttccaataatgaggtctttgtgcatttagttccgcatatgatggttttttttttacattaaagagtatatgtgtcttaatgcagtcagattgtaaaaaacaaaaacaaagaaactaagaatcttactaaaaatcgataatgtcagttatctgttttgtccaatattggtagtacttttttgcctcttatgattcctctagcagataaataaaagaaacttttgccatccatgaaaaaaaaaaaaaaaaaa

SEQ ID NO: 284844 - DNA, 1000 bp, Homo Sapiens; identical to SEQ ID NO: 220923

SEQ ID NO: 284845 - DNA, 1000 bp, Homo Sapiens; identical to SEQ ID NO: 115503

SEQ ID NO: 284846 - DNA, 1000 bp, Homo Sapiens; identical to SEQ ID NO: 220924

SEQ ID NO: 284847 - DNA, 1000 bp, Homo Sapiens
aaaaattagataaaaatttgtctatttaagatggttaaagatgttcttacccaaggaaaagtaacaaattatagaatttcccaaaagatgttttgatcctactagtagtatgcagtgaaaatctttagaactaaataatttggacaaggcttaatttaggcatttccctcttgacctcctaatggagagggattgaaaggggaagagcccaccaaatgctgagctcactgaaatatctctcccttatggcaatcctagcagtattaaagaaaaaaggaaactatttattccaaatgagagtatgatggacagatattttagtatctcagtaatgtcctagtgtggcggtggttttcaatgtttcttcatgttaaaggtataagcctttcatttgttcaatggatgatgtttcagatttttttttttttaagagatccttcaaggaacacagttcagagagattttcatcgggtgcattctctctgcttcgtgtgtgacaagttatcttggctgctgagaaagagtgccctgccccacaccggcagacctttccttcacctcatcagtatgattcagtttctcttatcaattggactctcccaggttccacagaacagtaatattttttgaacaataggtacaatagaaggtcttctgtcatttaacctggtaaaggcagggctggagggggaaaataaatcattaagcctttgagtaacggcagaatatatggctgtagatccatttttaatggttcatttcctttatggtcatataactgcacagctgaagatgaaaggggaaaataaatgaaaattttacttttcgatgccaatgatacattgcactaaactgatggaagaagttatccaaagtactgtataacatcttgtttattatttaatgttttctaaaataaaaaatgttagtggttttccaaatggcctaataaaaacaattatttgtaaataaaaacactgttagtaataaaaaaaaaaaa

SEQ ID NO: 284848 - DNA, 1000 bp, Homo Sapiens
gggacggctccgtcttcacattgtgcacagatctgaggatgggattagcgaagctgtggagactgcacatccggacctgcccatgtctcaaaacaaacacatgtacagtggctctttttccttctcaaacactttaccccagaagcaggtggtctgccccaggcataaagaaggaaaattggccatctttcccacctctaaattctgtaaaattatagacttgctcaaaagattcctttttatcatccccacgctgtgtaagtggaaagggcattgtgttccgtgtgtgtccagtttacagcgtctctgccccctagcgtgttttgtgacaatctccctgggtgaggagtgggtgcacccagccccgaggccagtggttgctcggggccttccgtgtgagttctagtgttcacttgatgccggggaatagaattagagaaaactctgacctgccgggttccagggactggtggaggtggatggcaggtccgactcgaccatgacttagttgtaagggtgtgtcggctttttcagtctcatgtgaaaatcctcctgtctctggcagcactgtctgcactttcttgtttactgtttgaagggacgagtaccaagccacaagaacacttcttttggccacagcataagctgatggtatgtaaggaaccgatgggccattaaacatgaactgaacggttaaaagcacagtctatggaacgctaatggagtcagcccctaaagctgtttgctttttcaggctttggattacatgcttttaatttgattttagaatctggacactttctatgaatgtaattcggctgagaaacatgttgctgagatgcaatcctcagtgttctctgtatgtaaatctgtgtatacaccacacgttacaactgcatgagcttcctctcgcacaagaccagctggaactgagcatgagacgctgtcaaatacagacaaaggatttgagatgttctcaataaaaagaaaatgtttcact

SEQ ID NO: 284849 - DNA, 1000 bp, Homo Sapiens; identical to SEQ ID NO: 220926

SEQ ID NO: 284850 - DNA, 1000 bp, Homo Sapiens; identical to SEQ ID NO: 115505

SEQ ID NO: 284851 - DNA, 1000 bp, Homo Sapiens; identical to SEQ ID NO: 115506

SEQ ID NO: 284852 - DNA, 1000 bp, Homo Sapiens
tttccattaagtagtgttctataaactttgatccaaagcagaatcaatgtcttttccatctcgtgacttaaagttctgtgactgtgatgcatgtgagtgttccgacttcatctgttcctcttaactacggtgtttcccttaccatggcattcataggatgaaatgaatgactgcccagaatgagaatttgtccagattattcagataaacatcataaagcagaatacattataaataagtagaatatgaataaatagaataataaaattccaaaatactcaatgggaaatgactagtaatataggctttcaagagttggtaccttttagctatatttgcagattctctgggattttaaggaactgagaaaacagcaaagttgactaaattttatatttcttgtcctctaaatattttgataatttctggattgatgcagtgatgtttttgttccttccgtatttataaatgaaacacctttttttagtgtttctaaacctaaaatctacttggtttgaaatcaagtggttggaacactgtttgacttttatttgaagcatgttgttgattgaaaatttcattgaggaagttttcaatcagtgtgatcagtttgattctgtaatgagcacagcacctaatattttgaggagctctgttttgaggaccaatgcttaaggtggactttgttcgtaaacaatatcccaatagatttgttgacttgaggtctggtttggttttgtttttgttttgttttgttttgttttgtttccaatagaattaagaattctaatgttgaaaaactgcacaaatttttatgggacaaagcctagaaaagagaaatgtagtttgaatcataatctaaatcatcgtatgatagaagagggaaagttttggtgccataatttctcctttcactggtgttggacttaaatcagttgaaatgtatttctgtaccacaatttacgcttcaataaaagtttaattgtctagtgacattcag

SEQ ID NO: 284853 - DNA, 1000 bp, Homo Sapiens
aaaggaaaaattcaattgctctgaatatggaaatagatcttgcccagaaaatgaaagatctctgggtgtccgagtggctatgtattcatttatggcaggatccatattcatcacaatatttggcaatcttgccatgataatttccatttcctacttcaagcagcttcacacaccaaccaacttcctcatcctctccatggccatcactgatttcctcctgggattcaccatcatgccatatagtatgatcagatcggtggagaactgctggtattttgggcttacattttgcaagatttattatagttttgacctgatgcttagcataacatccatttttcatctttgctcagtggccattgatagattttatgctatatgttacccattactttattccaccaaaataactattccagtcattaaaagattgctacttctatgttggtcggtccctggagcatttgccttcggggtggtcttctcagaggcctatgcagatggaatagagggctatgacatcttggttgcttgttccagttcctgcccagtgatgttcaacaagctatgggggaccaccttgtttatggcaggtttcttcactcctgggtctatgatggtggggatttatggcaaaatttttgcagtatccagaaaacatgctcatgccatcaataacttgcgagaaaatcaaaataatcaagtgaagaaagacaaaaaagctgccaaaactttaggaatagtgataggagttttcttattatgttggtttccttgtttcttcacaattttattggatccctttttgaacttctctactcctgtagttttgtttgatgccttgacatggtttggctattttaactccacatgtaatccgttaatatatggtttcttctatccctggtttcgcagagcactgaagtacattttgctaggtaaaattttcagctcatgtttccataatactattttgtgtatgcaaaaagaaagtgagtag

SEQ ID NO: 284854 - DNA, 1000 bp, Homo Sapiens; identical to SEQ ID NO: 115507

SEQ ID NO: 284855 - DNA, 1000 bp, Homo Sapiens
  misc_feature (253)..(253): n is a, c, g, or t
ttactcctcccacagaatgcgctttataaccaatcatagcgaccaaccgccacaaaacttctcagcaacaccaaatgttactacctgtcccatggatgaaaaattgctatctactgtgttaaccacatcctactctgttattttcatcgtgggactggttgggaacataatcgccctctatgtatttctgggtattcaccgtaaaagaaattccattcaaatttatctacttaacgtagccattgcagacctnctactcatcttctgcctccctttccgaataatgtatcatattaaccaaaaacagtggacactaggtgtgattctgtgcaaggttgtgggaacactggtatttatgaaacaaagtatttatgtctgttgtatagtatggatgcttgctcttggtggattcctaactatgattattttaacacttaagaaaggagggcataattccacaatgtgtttccattacagagataagcataacgcaaaaggagaagccatttttaacttcattcttgtggtaatgttctggctaattttcttactaataatcctttcatatattaagattgggaagaatctattgaggatttctaaaaggaggtcaaaatttcctaattctggtaaatatgccactacagctcgtaactcctttattgtacttatcatttttactatatgttttgttccctatcatgcctttcgattcatctacatttcttcacagctaaatgtatcatcttgctactggaaagaaattgttcacaaaaccaatgagatcatgctggttctctcatctttcaatagttgcttagatccagtcatgtatttcctgatgtccagtaacattcgcaaaataatgtgccaacttctttttagacgatttcaaggtgaaccaagtaggagtgaaagcacttcagaatttaaaccaggatactccctgcatgatacatctgtggcagtgaaaatacagtctagttctaaaagtacttga

SEQ ID NO: 284856 - DNA, 1000 bp, Homo Sapiens
tgaaaaattgctatctactgtgttaaccacatcctactctgttattttcatcgtgggactggttgggaacataatcgccctctatgtatttctgggtattcaccgtaaaagaaattccattcaaatttatctacttaacgtagccattgcagacctcctactcatcttctgcctccctttccgaataatgtatcatattaaccaaaacaagtggacactaggtgtgattctgtgcaaggttgtgggaacactgttttatatgaacatgtacattagcattattttgcttggattcatcagtttggatcgctatataaaaattaatcggtctatacagcaacggaaggcaataacaaccaaacaaagtatttatgtctgttgtatagtatggatgcttgctcttggtggattcctaactatgattattttaacacttaagaaaggagggcataattccacaatgtgtttccattacagagataagcataacgcaaaaggagaagccatttttaacttcattcttgtggtaatgttctggctaattttcttactaataatcctttcatatattaagattgggaagaatctattgaggatttctaaaaggaggtcaaaatttcctaattctggtaaatatgccactacagctcgtaactcctttattgtacttatcatttttactatatgttttgttccctatcatgcctttcgattcatctacatttcttcacagctaaatgtatcatcttgctactggaaagaaattgttcacaaaaccaatgagatcatgctggttctctcatctttcaatagttgcttagatccagtcatgtatttcctgatgtccagtaacattcgcaaaataatgtgccaacttctttttagacgatttcaaggtgaaccaagtaggagtgaaagcacttcagaatttaaaccaggatactccctgcatgatacatctgtggcagtgaaaatacagtctagttctaaaagtacttga

SEQ ID NO: 284857 - DNA, 1000 bp, Homo Sapiens
ctgcggccacacacaacatgcaagcacgccttaaacacacagatatagacatgacactgggcaggtcatgggtcgggggcctccccgtgccagggacctgtgcccacgtggtctcaccccaccctgtgctacctcatcttcccgggaggaagctccttcagacaagatgagctcctggaggccacggggccagagaggccagagagggccattccctgctgccctgagggtgctgtccccacctctggtggaaagtatgacctacgcctgggctacaggcatagatgggccgtccttttgtttcccttgttaacggatgcctggtggccccttctgagcctaagtacctttcttccttccctgcccctcagttccttcaaggaactgggtgcctccttccgtcaaatatcaggaatggaaagaactgagcctggtcggctgaggccagtcctgtcctgtcagggtcgagattgcacgcgggtcactcattcccactcaggcccgcgctccctgggaggaccctcgtaatttatgctctgccctagagccgctttcctggtaggatcctttcatggcgtcttcccaggacctcctgccagctcccattgggagttttgggtcccctccaccccagtaggtgcatacttctgccctccccagccccagctcacaccccccaacacccccaagctggtgagtgaggtggaggagctgtacaagtccatcacagcgctgcgggagaagcttctacaagcggagcagtccctgcgcaacctcaaggacatccacatgagcctggagaaggacgtcactgccatgaccaacagtctcttcatcgaccgccagaagtgcatggcccatcgtacttgctaccccaccattctgcagctggctggctaccagtgagcagcggcacggtgcttccccccaatcccccaaataaacagtgcgttagctttaaaaaaaaaaaaaaaaaaaaaaaaaaaaaaaaaaaaaaaaa

SEQ ID NO: 284858 - DNA, 1000 bp, Homo Sapiens; identical to SEQ ID NO: 115509

SEQ ID NO: 284859 - DNA, 1000 bp, Homo Sapiens
gactatgtgttgctgcccgacgagaggacgatcagtctttgctgctgggactcgaggacagccgagcggagaaacctgctgtcgttggggcacaacaatattgtacgctgcatagtgcactcccccaccaaccccgggttcatgacgtgcagcgatgacttcagagcgcggttttggtaccggagatcgaccactgactgagccaccctctccgtagggttctttctcgaggactctaccctcctcccccacgtcctgtctcagctgcagtcgtaagtccgtgcaccatccttgacgttttgctgccacctctgtccacattcttcttggatttgtataaaagaatctttttttaccttgatgtagaatcatggtggaaaaagttggaaacacagatctgtgcagttctacattcactgattattacagtgtgattttcatcggttttgtaagtacaggacttgccgtttcttttgatctcttgattgaaggaggatagggcattaaagtgcttttgacatgaggaattttcatttggttcttctgtcaactttcttgcttattctgctgaaccctctgtgtatttcccttccaggtatatttgaacagataagcaggcatgcagctctgagactcctgagttttatgccattatcaaaagcattttcaagaatccctcaattctatcctgaaatgatgttattctgataataaagctcagatctgcaactttattgttatatatttttcacttctgtaaaattaatggccagtttttcctgacaatttataggaacagtatctttcaacatactccctacattatccttcaatatctgcaatacttgtctttagtaactgtatttctggtaagattatgatttcatgagaaacaattgaaaatatatccgatctaattaaattaggtcagcctgctattgctctcaggtgttgcctgtcttcacgaatgattagtatcgattgacctctttcttaggtg

SEQ ID NO: 284860 - DNA, 1000 bp, Homo Sapiens
tggacctgtcagaggaaatgtcactgccaaagctggagtcgttcaacggctccaaaaccaacgccctcaatgtctcccagaagatgattgagatgttcgtgcggacaaaacacaagatcgacaaaagccacgagtttgcactggtggtggtgaacgatgacacggcctggctgtctggcctgacctccgacccccgcgagctctgtagctgcctctatgatctggagacggcctcctgttccaccttcaatctggaaggacttttcagcctcatccagcagaaaactgagcttccggtcacagagaacgtgcagacgattcccccgccatatgtggtccgcaccatccttgtctacagccgtccaccttgccagccccagttctccttgacggagcccatgaagaaaatgttccagtgcccatatttcttctttgacgttgtttacatccacaatggcactgaggagaaggaggaggagatgagttggaaggatatgtttgccttcatgggcagcctggataccaagggtaccagctacaagtatgaggtggcactggctgggccagccctggagttgcacaactgcatggcgaaactgttggcccaccccctgcagcggccttgccagagccatgcttcctacagcctgctggaggaggaggatgaagccattgaggttgaggccactgtctgaaccatccctgtacatctgcaccttcttgtgcaaggaagtccttggcctaaagccttggttctcaaactgggttccttgggacctccggggtgggggggttccaggaggcacgtagggtaccttgcagggtcctaggagggaaacccaggattccaggagggatcccaggaactgtgggcacccattttctgtgtctcccagcccatttccactcctagtttgtcatggataatttttgttcttccctgtgtgatttttgccatcaaaataaaaatttgagactcgttaaccgaagtccacgccaa

SEQ ID NO: 284861 - DNA, 1000 bp, Homo Sapiens; identical to SEQ ID NO: 220930

SEQ ID NO: 284862 - DNA, 1000 bp, Homo Sapiens
taggggaaactaccgacaacttctggaggagatgctgactagttacaggctagctaaagtagagggagaagaaagccctgctgaaccagctgccacagctacttcttcgaacagtgatgctggaaacccagtgacaatgcaggaaagccatactgaatcagaaagtggtcttgctgaattagacagctctaatgaagatgcagggacaaagatgagtggtgaaaaaatatgactttcctttttggtaatatttttgtgatctttgatggtttttaacctaggaagtgtaatgtatgcatttatataactgttttgttatttgaatcttggaaaactagttttattatattcagatagccttgttttttaaaaaggcctttgcatacacctttatgagatagtgtaaaattgactatttatagtactatggatttaatgaaattatatgtcatttcacattgtatgccagaaattaggctaccaattatgaattaaagtcagtagttaaattaatactagatagaattagaaattttgattagagagattatgctatattatggaaaaacttgttaatgtagaattatactgcttcatattattttacctattagtacactcatagttagctttgtaataaatttatgttttctttaataattttagttcttcaaagaatggctgatgctggcctgtaatttttctttcaaggatgataatttgtgtgttgtttgatttgtttatattttacatctctgtagttttatttttagaagttgtgagatattggatgtgtggctatttttcctttctctgtattctttatgaaacataacttttgaaaaacctatgtattattcatacagctttggtttgtatattctgtatagcctaactacacacatcaaaatgtatgtcaaccaagtgtttagaatgaaattataagtgtttaagtccaaataaagcatgtgatgtggaataatctaaaaaaaaaaaaaaa

SEQ ID NO: 284863 - DNA, 1000 bp, Homo Sapiens; identical to SEQ ID NO: 115510

SEQ ID NO: 284864 - DNA, 1000 bp, Homo Sapiens
tcctgagcaactgggactacagggaaagaaggaagttttttcctcttgagaccaaatttccataaaatgagatgcaaaaattttaagtgtatatttgctgagttttgacaaatacatgccctatgcatcccatactcctatcaagatacagaacaaagagcactgtgacactcacctgtaatcccagctactcaagaggcagaggcaggaagattgcttgagcccaggagttcaagatcagcctgggtaacattgcaaaaaccatctcttaaaaaaaataaataaaagatatagaacaaaaaaagtccccacacctctttcccattcagtcgtccaccctccaatccccaaagcaaccacctttctattttctaccataaattagttttatctcttctggaatttcataaaaatgaaattatacagtatgcatctttttttacagagtttaaactctatgtactctttttgtaaggcttctttcactcagcataatttttacttttttaaaaattttttgggggagacagagtctcactctgttgcccaagctggagtgtagtggcatgtgatcataactcactgcagccttgaactcttgggctcaagcaatcctcccgcctcagcatcccgagtagctgggagactacaggtgcacaccaccatgcctggctagtttataaactttttgtagagacaaggtctcaccatgttgcccaggctggccactaactcctggcctcaagtgatcctccctccttagcctcccaaagctctgaattatattcataagccactgggcctggttgactcagcataatttttcttgagagtcttaatatgttgctacatgtatcagcaatttgcttctttttattgctgagtagtattccattgtatgaatacaccatggtttgtttatccgttttcctatgtatggacacctgggctgtttccagttcttagctattataaataaagctactctgcacaatcttaa

SEQ ID NO: 284865 - DNA, 1000 bp, Homo Sapiens; identical to SEQ ID NO: 115511

SEQ ID NO: 284866 - DNA, 1000 bp, Homo Sapiens
cgatgatataaaaagaaatactgtccctaccaaaaacaaatacttttatgtacattctgaatgctttaagttctgctagaattattgagatatttatacatgcagagttactttattaatatttgtaattcatgcataagagtattttaatgatagttataactgcagtattggctagcatatggaaagaaaacagctaacagccaaactaaaatggctaaattccagaggccaaaagggaatattttgtaaatatatgtacatattcaggcaagatatggtctcccaagctgagttctagaaatgatgtttctagacatttctaagtggtattgttagtgctcacttggctcactcttctaggtttaagttagcccagagattgtatttactcatggatcactttatttatttcacatttactcagaatgatcctttgggttctataaggacataaggtacaatttgccattgtctctccatttttaaaaacatacaagtcagtgtcagcttaccaacatgacattttttcagtcagttgtggtaggccagccttgaagccatcgcacagtctagaaacttgtgtagctgagtgtgcagctcacctttaagggtgaagttaggtaaaagcaattagcagaggcgttatctatgtgattatgttgcttccttgtcagtatgttgaattttatagccctttcaatgaaataaaaaaaaaatttgtatattaccaatgtttttagtttaaataaagagtcacccttactactgttgaatttcatcccaagtgtaaatcattctataatggctgtgtctgttatagtatattacagtaactgcatgtgtcaccaagtgttctatatcaggctaggataacctagaggcagtaattttttaaatgataaaataaatctaatgaatataaactctcatgataaacctattttttccatcatcagccttttcaagtatttaaataaataactgctgtgtactgtga

SEQ ID NO: 284867 - DNA, 1000 bp, Homo Sapiens
cattggctctctaggaaacaccagaattatcagtgaagaatatattaaatggctcacgggctactgtaaagcatatttctatggcttgagagtaaaactcctagaaccagttcctgtttctgtaacaagatgttcctttagagtcaatgagaacacacacaacctacaaattcatgcaggggacatcctgaagttcttgaaaaagaagaaacctgaagatgccttctgtgttgtgggaataacaatgattgatctttacccaagagactcgtggaattttgtctttggacaggcctctttgacagatggtgtggggatattcagctttgccaggtatggcagtgatttttatagcatgcactataaaggcaaagtgaagaagctcaagaaaacatcttcaagtgactattcaattttcgacaactattatattccagaaataactagtgttttactacttcgatcctgtaagactttaacccatgagatcggacacatatttggactgcgacactgccagtggcttgcatgcctcatgcaaggctccaaccacttggaagaagctgaccggcgccctctaaacctttgccctatctgtttgcacaagttgcagtgtgctgttggcttcagcattgtagaaagatacaaagcactggtgaggtggattgatgatgaatcttctgacacacctggagcaactccagaacacagtcacgaggataatgggaatttaccgaaacccgtggaagcctttaaggaatggaaagagtggataataaaatgcctggctgttctccaaaaatgaggaccttcaaataggagtgattgaaataaataactacttgcatgttatgctttcatttgggtggaatacttcattggaataaactactgatcttgtgctgtgtcaaagtaacagactagaaccttctttcaagtacctgaattgaaatgaaactcattttgaataataaaaactctagaaactctttatcttctc

SEQ ID NO: 284868 - DNA, 1000 bp, Homo Sapiens
aaggcctgggccctggtgacacaacgagcactttctgcggaaccccgaattacatcgcccccgaaatcctgcggggagaggagtacgggttcagcgtggactggtgggcgctgggagtcctcatgtttgagatgatggccgggcgctccccgttcgacatcatcaccgacaacccggacatgaacacagaggactaccttttccaagtgatcctggagaagcccatccggatcccccggttcctgtccgtcaaagcctcccatgttttaaaaggatttttaaataaggaccccaaagagaggctcggctgccggccacagactggattttctgacatcaagtcccacgcgttcttccgcagcatagactgggacttgctggagaagaagcaggcgctccctccattccagccacagatcacagacgactacggtctggacaactttgacacacagttcaccagcgagcccgtgcagctgaccccagacgatgaggatgccataaagaggatcgaccagtcagagttcgaaggctttgagtatatcaacccattattgctgtccaccgaggagtcggtgtgaggccgcgtgcgtctctgtcgtggacacgcgtgattgaccctttaactgtatccttaaccaccgcatatgcatgccaggctgggcacggctccgagggcggccagggacagacgcttgcgccgagaccgcagagggaagcgtcagcgggcgctgctgggagcagaacagtccctcacacctgggcccgggcaggccagcttcgtgctggaggaacttgctgctgtgcctgcgtcgcggcggatccgcggggaccctgccgagggggctgtcatgcggtttccaaggtgcacattttccacggaaacagaactcgatgcactgacctgctccgccaggaaagtgagcgtgtagcgtcctgaggaataaaatgttccgatgatgtggaaaaaaaaaaaaaaaaaaaaaaaaaaaaaaaaaaa

SEQ ID NO: 284869 - DNA, 790 bp, Homo Sapiens
gggggtcctcagcaagggcgcggtctggtactcgtgcgtcttttatcgcctcagtttccctccgccgactagcgcgcggggcccggttctccatcgcgcgcacggcagcctagcgcaatgaggcgggcagcactgcggctttgtgccttgggcaaagggcagcttactcctggaagaggactgactcaaggaccccagaaccccaagaaacagggaatcttccacattcatgaagttcgagataagttgcgggagatagtaggagcatccacaaactggagagaccatgtgaaggcaatggaagaaaggaaattacttcatagtttcttggctaaatcacaggatggactgcctcctaggagaatgaaggacagttatattgaagttctcttgcctttgggcagtgagcctgaattacgagagaaatatttgactgttcaaaacaccgtaagatttggcaggattcttgaggatcttgacagcttgggagttcttatttgttacatgcacaacaaaatccactccgccaagatgtctcctttatcgatagttacagccctggtggataagattgatatgtgtaagaagagcttgagcccagaacaggacattaagttcagtggccatgttagctgggtcgggaagacatccatggaagtgaagatgcaaatgttccagttacatggtgatgaattttgtcctgttttggatgcaacatttgtaatggtggctcgtgattctgaaaataaagggtaattgccaaaaaaaaaaaaaaaaaaaaaaaaaaaaa

SEQ ID NO: 284870 - DNA, 1000 bp, Homo Sapiens
ccttgaggaagaacacagaggagcagctggagattgcattggctccttatcagcacttggaagaagacatgaagagtctgaagcaggtattagaaatgaagaatcagcaaatacacgagcaagaaaagaagattcttgagctggaaaagctggcagaaaagaacattatcctagaagaaaagatccaggttctccaacagcagaacgaagacctcaaagcaaggattgaccaaaacacagttgtcaccagacagctgtcggaggaaaatgctaacctccaggaatatgttgagaaggaaacccaggagaagaagagattgagccgaaccaatgaagagctgctttggaagctccaaactggggacccgaccagtccgattaaactctcgcccacatctcccgtttaccgcggctcctcctcggggccctcctctccggccagagtcagcacaacacccagatgacgccactacacggcctgcgggagctccggcttctcgtcctccggtctccaccctgagggagcaccgacccggtgccgccggagctggccctgtgcgcatgctcagtagctgcgaatgcatcctaggcgcgtcctcctctgatccccgtgtaagactgccctggtgtcggcacttaggaatgtgtaaatggtaaagtctgatgtgcaaacgttttaccatagttagagccaaaagaaagacacttgcaattgttcttgagcaatgaactttcactgcagaatttcaggttagttacaaaaagctcagttttcaatatacattgaataatcattgtgtactgcaccgatatgtgtgtatatttagatatacgtatatacacatgctgcggttctgaatttcattttttataacatgaagtgctgacatattttagtgaaggtcagcagttttctaacttgtgcctaagaattattgggaaatgaaaatgcatttctatctagcttcccaggaatatttctacccaaaatagaaaaagg

SEQ ID NO: 284871 - DNA, 1000 bp, Homo Sapiens; identical to SEQ ID NO: 220934

SEQ ID NO: 284872 - DNA, 1000 bp, Homo Sapiens
ggaacagagcaagatcttgtctcaaaaaaaaaaaaaaaaagaaaaaaaaagaaaaaggaaagggaaaatagtcccactcaatcattttaaaagtaattttcgtaatttaaatggttcctcttgaagctcaaattggcagtggagctaatcctcaactgaaagaattttttaaaaagcaaaaatcattttgagtattatttatggagaaagtctcatttctttgtcacatttgttttccagcttgatgagcaagctgtgcttacataagatggtaacttaatagggaattactatctttccttttttttttttttttttttgaggcgggtctcactttgtcacccaggctagagtgcagtggcatgatctatgctcactgtagccttgaccttctgggttcaagagatcctcctgcctaagcccccaaatagctgggactacagatgcacgctaccacacatatctaatttttgtattttttatagagacagggtttcgccatgttgcacaggttggtctcaaactcctgagctcaagcaatccacctgcctcagcctaccaaagtgctgggtgtgagccaccaccagtcaacaaaatacttttgttttggcgaagtaggatatgacttcaagtcaaatgttgtaaagaatcctcgttaagtcattttgtaatttaatgattattcctattctttataatttcagaattttctaagcaacttagggtaggtaaacttttccttttttgaccttcctctcttaaaaacttagttttccaaataaaatttgataaagattcttcctgggaaaaaaaaatgcagcaaaacggattacctcttttattgaataaaaccattttaggaattagaaaaatcaacatgggtcaaatttgtaaatctgtacaatgggatttatccatggtacattcagagcctaacatatgaggtacagccagatgttaataaaaacttcaatcttttattataaaaaaaaaaaaaaaa

SEQ ID NO: 284873 - DNA, 848 bp, Homo Sapiens
acaagaaaaggagattagggtacagatacacacacagggaagaatgcatgaagtccctgggataaggcagccatttacaagccaagggaaaggcctcagaagaaaccagtcttgccgacagcatgatctctcatcctcagaactgggaggaaatacatctgtgttgtttcagccactcagttggtgatctctattacagcagtccttagcaaaccgatttagacagggctttggatgccaaccagaagaagctgtaggaattggcacagatccagagcatggacaaggacttacacttctgctgaaggcaaaggagaaacagcattatctaaaaagcaaccaagacttcaggggatgagaacccactaactattacagtccacgtgtcagtcgcgtttctcatcgtgattaacaccccagccattgatttgctcttcagtgtctagtgagcaaggctactgtgaatctttcctcaggaggactgatggagtcacatttctgagcctacagagctgagggcaagacctgagaatggtgatgtcaaaatgccaaccagcgagacctcttggtggccaggtgcttgcttgtgctcctcctgtgcttggacatcagactccaggttcttcaacctttggactctgggacttgcaccagcggcttcccaagggttctcaggccttaagccacagactgacgactgtactgtcagcttccctggttttgaggcttttggacttggactgagccactactggcatctctctttcccagcttgcagacagtctatcatgggactttgccttgtaattgtgctagccaattcttcctaataaacttccttttatata

SEQ ID NO: 284874 - DNA, 1000 bp, Homo Sapiens
ccggggccgcggggactccgttccagccgccgcgtccgaggcggacccgttcctccaccggctgcgccccatgctcagctccgcctttggccaggatagatcactgcgaccagaggaaattgaagagctccgagaggccttcagagaattcgacaaggacaaggatggctacatcaactgccgggatctgggcaactgcatgcgcaccatgggctacatgcccaccgagatggagctcatcgaactgtcccagcagatcaacatgaacctgggtggccatgtagattttgatgacttcgtggagctaatggggcctaaactcctggcagagacagcagatatgattggtgtaaaggaactgcgagatgctttccgagagtttgacaccaatggtgatggggaaataagcaccagtgagctgcgagaggctatgaggaagctcctgggtcatcaggtgggacaccgagacatagaggaaattatccgagatgtggacctcaatggggatggacgagtggactttgaagagtttgtccggatgatgtcccgctgaggccgcgagggcccctccaggactgccaagctcccaaaggcggggctaagaggagctagagcttgcctcacccgctgtagccgccgagagcccaggatgtactggcggatggggcctgcctgcaccccggggaggcgcccaccccggacccccacccctccgcactgtgaaagactaactcctgcaactggaaagcgggggcgcccgccgacgaggaggccaccgtgccaagccggcagaggtcatgccaggcgccaagggccatgtgcccagctgctgctggctgggtgggccagggagcccgccagcagaccccacacagcatgtccgccccagggcaaagcctcccaccttcgctctgcgcccgtcccagctcgcctcagccctgttatctcagaaccaataaaaatatttccaagagcaaaaaaaaaaaaaaaaaaaaaaaaa

SEQ ID NO: 284875 - DNA, 1000 bp, Homo Sapiens; identical to SEQ ID NO: 115514

SEQ ID NO: 284876 - DNA, 1000 bp, Homo Sapiens; identical to SEQ ID NO: 115515

SEQ ID NO: 284877 - DNA, 1000 bp, Homo Sapiens
ggcaagattgaaggatgtgcagggcttcctctcagagccgcccaaactgccgttgatgtgtggaggggaagcaagatgggtaagggctcaggaagttgctccaagaacagtagctgatgaagctgcccagaagtgccttggctccagccctgtaccccttggtactgcctctgaacactctggtttccccacccaactgcggctaagtctctttttcccttggatcagccaagcgaaacttggagctttgacaaggaactttcctaagaaaccgctgataaccaggacaaaacacaaccaagggtacacgcaggcatgcacgggtttcctgcccagcgacggcttaagccagcccccgactggcctggccacactgctctccagtagcacagatgtctgctcctcctcttgaacttgggtgggaaaccccacccaaaagccccctttgttacttaggcaattccccttccctgactcccgagggctagggctagagcagacccgggtaagtaaaggcagacccagggctcctctagcctcatacccgtgccctcacagagccatgccccggcacctctgccctgtgtctttcatacctctacatgtctgcttgagatatttcctcagcctgaaagtttccccaaccatctgccagagaactcctatgcatcccttagaaccctgctcagacaccattacttttgtgaacgcttctgccacatcttgtcttccccaaaattgatcactccgccttctcctgggctcccgtagcacactataacatctgctggagtgttgctgttgcaccatactttcttgtacatttgtgtctcccttcccaactagactgtaagtgccttgcggtcagggactgaatcttgcccgtttatgtatgctccatgtctagcccatcatcctgcttggagcaagtaggcaggagctcaataaatgtttgttgcatgaaaaaaaaaaaaaaaaaaaaaaaaaaaaaaaaaaaaaa

SEQ ID NO: 284878 - DNA, 1000 bp, Homo Sapiens; identical to SEQ ID NO: 115516

SEQ ID NO: 284879 - DNA, 1000 bp, Homo Sapiens
ctcctcctttgaggttcgaacctgggacccagagggagtgattttttatggggataccaaccctaaggatgactggtttatgctgggacttcgagacggcaggcctgagatccaactgcacaatcactgggcccagcttacggtgggtgctggaccacggctggatgatgggagatggcaccaggtggaagtcaagatggagggggactctgtgctgctggaggtggatggggaggaggtgctgcgcctgagacaggtctctgggcccctgaccagcaaacgccatcccatcatgaggattgcgcttggggggctgctcttccccgcttccaaccttcggttgccgctggttcctgccctggatggctgcctgcgccgggattcctggctggacaaacaggccgagatctcagcatctgcccccactagcctcagaagctgtgatgtagaatcaaatcccgggatatttctccctccagggactcaggcagaattcaatctccgagacattccccagcctcatgcagagccctgggccttctctttggacctgggactcaagcaggcagcaggctcaggccacctccttgctcttgggacaccagagaacccatcttggctcagtctccacctccaagatcaaaaggtggtgttgtcttctgggtcggggccagggctggatctgcccctggtcttgggactccctcttcagctgaagctgagtatgtccagggtggtcttgagccaagggtcgaagatgaaggcccttgccctgcctcccttaggcctggctcccctccttaacctctgggccaagcctcaagggcgtctcttcctgggggctttaccaggagaagactcttccacctctttttgcctgaatggcctttgggcacaaggtcagaggctggatgtggaccaggccctgaacagaagccatgagatctggactcacagctgcccccagagcccaggcaatggcactgacgcttcccattaa

SEQ ID NO: 284880 - DNA, 1000 bp, Homo Sapiens
gctcggtggtttgactaccatacaggcaaagatattggcgtcagaggacaatttcaaacatttaatgcttcttatgacacaataaacctacatgtccgtggtggtcacatcctaccatgtcaagagccagctcaaaacacattttacagtcgacaaaaacacatgaagctcattgttgctgcagatgataatcagatggcacagggttctctgttttgggatgatggagagagtatagacacctatgaaagagacctatatttatctgtacaatttaatttaaaccagaccaccttaacaagcactatattgaagagaggttacataaataaaagtgaaacgaggcttggatcccttcatgtatgggggaaaggaactactcctgtcaatgcagttactctaacgtataacggaaataaaaattcgcttccttttaatgaagacactaccaacatgatattacgtattgatctgaccacacacaatgttactctagaagaaccaatagaaatcaactggtcatgaagatcaccatcaattttagttgtcaatgggaaaaaacaccaggatttaagtttcacagcacttacaattttccctcttcacttggttcttgtactctacaaaatatagctttcataacatcgaaaagttattttgtagcgtacatcaatgataatgctaattttattatagtaatgtgacttggattcaattttaaggcatatttaacaaaatttgaatagccctatttatccttgttaagtatcagctacaattgtaaactagttactaaacatgtatgtaaatagctaagatataatttaaacgtgatttttaaattaaataaaatttttatgtaattatatatactatatttttctcaatgtttagcagatttaagatatgtaacaacaattatttgaagatttaattacttcttagtatgtgcatttaattagaaaaagagaataaaaaatgtaagtgtaaaaaaaaaaaa

SEQ ID NO: 284881 - DNA, 1000 bp, Homo Sapiens; identical to SEQ ID NO: 115517

SEQ ID NO: 284882 - DNA, 1000 bp, Homo Sapiens
atctggctgagtttagtggggtggttggggaaggtacatagaccctcctcttgcccaccctagacagccctctcatgtctgaacctcagcctgggagttagatttatttgtctctaaaatgaagtcagtggatagatgctttgagggattttgagtagaaacattcatagttaattttcactctggccaatctgagtttgatgtgtgtgttctggaacattcctccagcttttggtggtcagatggcccagagatatgggggacaggaggaagagggtaaatgaaccacagtgagcaggttctaggaggtacctgcatcagacaagctggtggaggccacgtggcaagccacatctactgaggcctcatgctgctcttgctctgtaagacacggagcccagaaacccatctgcacttcctgagacctgcctggggaaacgggggcagggaccaagtgaggcctcatgtgtgtcttcaccgtgctgtcctcacaaggccaggtgggtgcccaaagggagcctgacaggctgttgtgttaatttattgttcttgcacacctgcacagcctccctctggggatcccacctggagtggaccaggggtcttgagaaatggagagttggctgcaaaaactctcatgcactagatgtggcaccttggagggcagggtgagacaagcagcccagaaatactctctcaagtggaggggagaattttgagagtggatggaacagtttggtggtttcagagaatttctaggtttctacttggatctacttctgatacaaacttgcacttggtgccctctggtggtgtttagttttagttccgtaagagaaatgattcctagtttgctaaattggtggcatctttgggaggggtttctgtttatggttagagtctcttacacccttgttggagggattcttattctgactgtgggagctcctgttgcgggatcttgggaaaaaataaagaagccgctgcattcgcacgtcaa

SEQ ID NO: 284883 - DNA, 1000 bp, Homo Sapiens
gtggtgaagctgctggaggagtatgccacggggcccgcagtgctcactgtcgcgctgatcgaagcagtcgctgtgtcttggttctatggcatcactcagttctgcagggacgtgaaggaaatgctcggcttcagcccggggtggttctggaggatctgctgggtggccatcagccctctgtttctcctgttcatcatttgcagttttctgatgagcccgccacaactacgacttttccaatataattatccttactggagtatcatcttgggttactgcataggaacctcatctttcatttgcatccccacatatatagcttatcggttgatcatcactccagggacatttaaagagcgtattattaaaagtattaccccagaaacaccaacagaaattccttgtggggacatccgcttgaatgctgtgtaacacactcaccgagaggaaaaaggcttctccacaacctcctcctccagttctgatgaggcacgcctgccttctcccctccaagtgaatgagtttccagctaagcctgatgatggaagggccttctccacagggacacagtctggtgcccagactcaaggcctccagccacttatttccatggattcccctggacatattcccatggtagactgtgacacagctgagctggcctattttggacgtgtgaggatgtggatggaggtgatgaaaaccaccctatcatcagttaggattaggtttagaatcaagtctgtgaaagtctcctgtatcatttcttggtatgatcattggtatctgatatctgtttgcttctaaaggtttcactgttcatgaatacgtaaactgcgtaggagagaacagggatgctatctcgctagccatatattttctgagtagcatatataattttattgctggaatctactagaaccttctaatccatgtgctgctgtggcatcaggaaaggaagatgtaagaagctaaaatgaaaaatagtgtgtccatgcaa

SEQ ID NO: 284884 - DNA, 1000 bp, Homo Sapiens
agtaactgattttctaaaaaaaaaaaaaaaaaaaatttctacattataactcacagcattgttccattgcaggttttgcaatgtttgggggtaaagacagtagaaatattattcagtaaacaataatgtgtgaacttttaagatggataatagggcatggactgagtgctgctatcttgaaatgtgcacaggtacacttaccttttttttttttttttttaagtttttcccattcaggaaaacaacattgtgatctgtactacaggaaccaaatgtcatgcgtcatacatgtgggtataaagtacataaaatatatctaactattcataatgtggggtgggtaatactgtctgtgaaataatgtaagaagcttttcacttaaaaaaaatgcattactttcacttaacactagacaccaggtcgaaaattttcaaggttatagtacttatttcaacaattcttagagatgctagctagtgttgaagctaaaaatagctttatttatgctgaattgtgatttttttatgccaaattttttttagttctaatcattgatgatagcttggaaataaataattatgccatggcatttgacagttcattattcctataagaattaaattgagtttagagagaatggtggtgttgagctgattattaacagttactgaaatcaaatatttatttgttacattattccatttgtattttaggtttccttttacattctttttatatgcattctgacattacatattttttaagactatggaaataatttaaagatttaagctctggtggatgattatctgctaagtaagtctgaaaatgtaatattttgataatactgtaatatacctgtcacacaaatgcttttctaatgttttaaccttgagtattgcagttgctgctttgtacagaggttactgcaataaaggaagtggattcattaaacctatttaatgtccaaaaaaaaaaaaaaaaaaaaaaaaaaaaaaaa

SEQ ID NO: 284885 - DNA, 1000 bp, Homo Sapiens; identical to SEQ ID NO: 220937

SEQ ID NO: 284886 - DNA, 1000 bp, Homo Sapiens
ttcaatgggaactactcaaccgccgaagttgtcaaccacttcactcctgaaaataaaaactattattttggtagccagttctcagtagatactggtgcaatggctgtcctggctctgacctgtgtgaagaagagtctaataaatgggcagatcaaagcagatgaaggcagtttaaagaacatcagtatttatacaaagtcactggtagaaaagattctgtctgagaaaaaagaaaatggtctcattggaaacacatttagcacaggagaagccatgcaggccctctttgtatcatcagactattataatgaaaatgactggaattgccaacaaactctgaatacagtgctcacggaaatttctcaaggagcattcagcaatccaaacgctgcagcccaggtcttacctgccctgatgggaaagaccttcttggatattaacaaagactcttcttgcgtctctgcttcaggtaacttcaacatctccgctgatgagcctataactgtgacacctcctgactcacaatcatatatctccgtcaattactctgtgagaatcaatgaaacatatttcaccaatgtcactgtgctaaatggttctgtcttcctcagtgtgatggagaaagcccagaaaatgaatgatactatatttggtttcacaatggaggagcgctcatgggggccctatatcacctgtattcagggcctatgtgccaacaataatgacagaacctactgggaacttctgagtggaggcgaaccactgagccaaggagctggtagttacgttgtccgcaatggagaaaacttggaggttcgctggagcaaatactaataagcccaaactttcctcagctgcataaaatccatttgcagtggagttccatgtttattgtccttatgccttcttcttcatttatcccagtacgagcaggagagttaataacctccccttctctctctacatgttcaataaaagttgttgaaagattaacaactgt

SEQ ID NO: 284887 - DNA, 1000 bp, Homo Sapiens; identical to SEQ ID NO: 115518

SEQ ID NO: 284888 - DNA, 1000 bp, Homo Sapiens; identical to SEQ ID NO: 115519

SEQ ID NO: 284889 - DNA, 1000 bp, Homo Sapiens; identical to SEQ ID NO: 220939

SEQ ID NO: 284890 - DNA, 1000 bp, Homo Sapiens
tcagatgaagatgatctgttttaaaatgtgaggcgattattttaagtaattatcttaccaagcccaagactggttttaaagttacctgaagctcttaacttcctcccctctgaatttagtttggggaaggtgtttttagtacaagacatcaaagtgaagtaaagcccaagtgttctttagctttttataatactgtctaaatagtgaccatctcatgggcattgttttcttctctgctttgtctgtgttttgagtctgctttcttttgtctttaaaacctgatttttaagttcttctgaactgtagaaatagctatctgatcacttcagcgtaaagcagtgtgtttattaaccatccactaagctaaaactagagcagtttgatttaaaagtgtcactcttcctccttttctactttcagtagatatgagatagagcataattatctgttttatcttagttttatacataatttaccatcagatagaactttatggttctagtacagatactctactacactcagcctcttatgtgccaagtttttctttaagcaatgagaaattgctcatgttcttcatcttctcaaatcatcagaggccaaagaaaaacactttggctgtgtctataacttgacacagtcaatagaatgaagaaaattagagtagttatgtgattatttcagctcttgacctgtcccctctggctgcctctgagtctgaatctcccaaagagagaaaccaatttctaagaggactggattgcagaagactcggggacaacatttgatccaagatcttaaatgttatattgataaccatgctcagcaatgagctattagattcattttgggaaatctccataatttcaatttgtaaactttgttaagacctgtctacattgttatatgtgtgtgacttgagtaatgttatcaacgtttttgtaaatatttactatgtttttctattagctaaattccaacaattttgtactttaataaa

SEQ ID NO: 284891 - DNA, 1000 bp, Homo Sapiens
taacaaatgatggggaagatgaatttgttccttcagatgggttagataaagatgaatatacattttcaccaggcaaatcaaaagccactccagaaaaatctttgcatgacaaaaaaagtcaggattttggaaatctcttctcatttccttcatattctcagaagtcagaagatgattcagctaaatttgacagtaatgaagaagattctgcttctgttttttcaccatcatttggtctgaaacagacagataaagttccaagtaaaacggtagctgctaaaaagggaaaaccgtcttcagatacagtccctaagcccaagagagccccaaaacagaagaaagtagtagaggctgtaaactctgactcggattcagaatttggcattccaaagaagactacaacaccaaaaggtaaaggccgaggggcaaagaaaaggaaagcatctggctctgaaaatgaaggcgattataaccctggcaggaaaacatccaaaacaacaagcaagaaaccgaagaagacatcttttgatcaggattcagatgtggacatcttcccctcagacttccctactgagccaccttctctgccacgaaccggtcgggctaggaaagaagtaaaatattttgcagagtctgatgaagaagaagatgatgttgattttgcaatgtttaattaagtgcccaaagagcacaaacatttttcaacaaatatcttgtgttgtccttttgtcttctctgtctcagacttttgtacatctggcttattttaatgtgatgatgtaattgacggttttttattattgtggtaggccttttaacattttgttcttacacatacagttttatgctcttttttactcattgaaatgtcacgtactgtctgattggcttgtagaattgttatagactgccgtgcattagcacagattttaattgtcatggttacaaactacagacctgctttttgaaatgaaatttaaacattaaaaatggaactgtg

SEQ ID NO: 284892 - DNA, 1000 bp, Homo Sapiens
tggtggagccctacaacgccaccctctctgtccaccagctggtggaaaacacagatgaaacctactccattgataacgaggccctgtatgacatctgcttccgcaccctgaagctgaccacccccacctacggggacctcaaccacctggtgtcggccaccatgagcggggtcaccacctgcctgcgcttcccgggccagctgaacgcagacctgcgcaagctggcggtgaacatggtgcccttccctcgcctgcacttcttcatgcccggcttcgcgcccctgaccagccggggcagccagcagtaccgggcgctcacggtgcccgagctcacccagcagatgttcgactccaagaacatgatggccgcctgcgacccgcgccacggccgctacctgacggtggctgccatcttccggggccgcatgtccatgaaggaggtggacgagcagatgctcaacgtgcagaacaagaacagcagctacttcgtggagtggatccccaacaacgtgaagacggccgtgtgcgacatcccgccccgcggcctgaagatgtcggccaccttcatcggcaacagcacggccatccaggagctgttcaagcgcatctccgagcagttcacggccatgttccggcgcaaggccttcctgcactggtacacgggcgagggcatggacgagatggagttcaccgaggccgagagcaacatgaacgacctggtgtccgagtaccagcagtaccaggacgccacggccgacgaacaaggggagttcgaggaggaggagggcgaggacgaggcttaaaaacttctcagatcaatcgtgcatccttagtgaacttctgttgtcctcaagcatggtctttctacttgtaaactatggtgctcagttttgcctctgttagaaattcacactgttgatgtaatgatgtggaactcctctaaaaattacagtattgtctgtgaaggtatctatactaataaaaaagcatgtgtagaaaa

SEQ ID NO: 284893 - DNA, 1000 bp, Homo Sapiens; identical to SEQ ID NO: 220940

SEQ ID NO: 284894 - DNA, 1000 bp, Homo Sapiens
aatgtgaatctaaaaacaaagttggctcacaattaagaagtttaacacttgatgttcaaggaagagaaaacaacaaagactatttttctcctgagcttctcgtgctctattttgcatcctccttaataatacctgccattggaatgataatttactttgcaagaaaagccaacatgaaggggtcatatagtcttgtagaagcacagaaatcaaaagtgtagctaatgcttgatatgttcaactggagacactatttatctgtgcaaatccttgatactgctcatcattccttgagaaaaacaatgagctgagaggcagacttccctgaatgtattgaacttggaaagaaatgcccatctatgtcccttgctgtgagcaagaagtcaaagtaaaacttgctgcctgaagaacagtaactgccatcaagatgagagaactggaggagttccttgatctgtatatacaataacataatttgtacatatgtaaaataaaattatgccatagcaagattgcttaaaatagcaacactctatatttagattgttaaaataactagtgttgcttggactattataatttaatgcatgttaggaaaatttcacattaatatttgctgacagctgacctttgtcatctttcttctattttattccctttcacaaaattttattcctatatagtttattgacaataatttcaggttttgtaaagatgccgggttttatatttttatagacaaataataagcaaagggagcactgggttgactttcaggtactaaatacctcaacctatggtataatggttgactgggtttctctgtatagtactggcatggtacggagatgtttcacgaagtttgttcatcagactcctgtgcaactttcccaatgtggcctaaaaatgcaacttctttttattttcttttgtaaatgtttaggtttttttgtatagtaaagtgataatttctggaattagaaaaaaaaaaaaaaaaaaa

SEQ ID NO: 284895 - DNA, 1000 bp, Homo Sapiens; identical to SEQ ID NO: 220943

SEQ ID NO: 284896 - DNA, 1000 bp, Homo Sapiens; identical to SEQ ID NO: 115522

SEQ ID NO: 284897 - DNA, 1000 bp, Homo Sapiens; identical to SEQ ID NO: 220946

SEQ ID NO: 284898 - DNA, 1000 bp, Homo Sapiens
tggtgctgcggacaacttcaactgtctacaattatgattacatttgggactttatcttctaccccaacggggtgatggaggccaagatgcatgccactggctacgtccacgccaccttctacacccccgaggggctgcgccacggcactcgcctgcacacccacctgattggcaacatacacactcacttggtgcactaccgcgtagacctggatgtggcaggcaccaagaacagcttccagacactgcagatgaagctagaaaacatcaccaacccctggagcccaagacaccgcgtggtccagccaactctggagcagacgcagtactcctgggagcgccaggcggccttccgcttcaaaaggaagctgcctaagtacctgctctttaccagcccccaggagaacccctggggccacaagcgcacgtaccgcctgcagatccactccatggccgaccaggtgctgcccccaggctggcaggaggagcaggccatcacctgggcaaggtaccccctggcagtgaccaagtaccgggagtcggagctgtgcagcagcagcatctaccaccagaacgacccctggcacccgcccgtggtctttgagcagtttcttcacaacaacgagaacattgaaaatgaggacctggtggcctgggtgacggtgggcttcctgcacatcccccactcagaggacattcccaacacagccacacctgggaactccgtgggcttcctgctccggccattcaacttcttcccagaggacccctccctggcatccagagacactgtgatcgtgtggcctcgggacaacggccccaactacgtccagcgctggatccctgaggacagggactgctcgatgcctcccccttttagctacaatgggacctatagacctgtgtgaccagcccccagttcctcccccagttcctcccaggaagcccaggagcctcactggggcagacaataaaccctcagagcctcgcaaaaaaaaaa

SEQ ID NO: 284899 - DNA, 1000 bp, Homo Sapiens
tgaatcactaggagggtcccactgataggccatgtttagcactggttgccagggattctctttttgagagagggaaagcaaaatgaatggaagtacccagctggaggtttcagggcttctggaggatgctctcgcatagctcgaggtcctctgcccacctcttctctccaaggaaaatgaggactgccccttccccctgcaggattggcccccagcctgcgcatgcaccctcctcttgcccaagtggggagcacagaggcggagaggaatcccttaccacacccacggcccagcttgctcacgagtgtcacctctgtgacggtcaccactgctcccttggagggccacttgagttactgttgcttcctcgcctgctggcttgatgagcaccgatggtgggatctgaccccgaggggcagagctgtcggtgactgaggactggactgtggtgaccatgccgatttgctcagggagaacgttgcaatgcacccagcagctcctggctctgcaggcggcacagcctggggccctgtgatcctctggtttcttccattggggcggagtcgggggtggagggagctggccacaacccactgctctgatgggtggtttgtccaaggatgctgaatgtaatgcctggtcaatgtggaagcccatgaggttgcccagggaagcctccaaaagctgggatgcttgagggtatccaagttgaaaaagacaaaatctgaccatcagccagtgacagtcctggcaaatgaaggtggggcggggcagtgaggggtgggagaaggtgaatgattcattattccaccccgaggtttgctggggtgaggggaagaatcgatgctgctttgggaactgaaggtttttctgttgggaaggccctcttggttttggagagaaagacaagttatgagtagctgctaccctggaacggtgggcagagagcctactaggaaatgtgcagaataaactattttttgaaggaaaaaaaaaaaaa

SEQ ID NO: 284900 - DNA, 1000 bp, Homo Sapiens; identical to SEQ ID NO: 119027

SEQ ID NO: 284901 - DNA, 1000 bp, Homo Sapiens
tggtttacgcctataatcccagcattttgggactccgaggtgggcagatcacttgagctcaggagctcaagatcagcctgggcaacatggtgaaaccttgtctctacataaaatacaaaaacttagatgggcatggtgctgtgtgcctatagtccactacttgtggggctaaggcaggaggatcacttgagccccggaggtcgaggctacagtgacccaagagtgcactactgtactccagccagggcaagagagcgagaccctgtctcaataaataaataaataaataaataaataaataaataaaaacaaagttgattaagaaaggaagtataggccaggcacagtggctcacacctgtaatccttgcattttggaaggctgaggcaggaggatcactttaggcctggtgtgttcaagaccagcctggtcaacatagtgagacactgtctctaccaaaaaaaggaaggaagggacacatatcaaactgaaacaaaattagaaatgtaattatgttatgttctaagtgcctccaagttcaaaacttattggaatgttgagagtgtggttacgaaatacgttaggaggacaaaaggaatgtgtaagtctttaatgccgatatcttcagaaaacctaagcaaacttacaggtcctgctgaaactgcccactctgcaagaagaaatcatgatatagctttccatgtggcagatctacatgtctagagaacactgtgctctattaccattatggataaagatgagatggtttctagagatggtttctactggctgccagaatctagagcaaagccatcccccctcctggttggtcacagaatgactgacaaagacatcgattgatatgcttctttgtgttatttccctcccaagtaaatgtttgtccttgggtccattttctatgcttgtaactgtcttctagcagtgagccaaatgtaaaatagtgaataaagtcattattaggaagttcaaaaaaaaaaaa

SEQ ID NO: 284902 - DNA, 1000 bp, Homo Sapiens
gagctgcctgacggccaggtcatcaccattggcaatgagcggttccgctgccctgaggcactcttccagccttccttcctgggcatggagtcctgtggcatccacgaaactaccttcaactccatcatgaagtgtgacgtggacatccgcaaagacctgtacgccaacacagtgctgtctggcggcaccaccatgtaccctggcattgccgacaggatgcagaaggagatcactgccctggcacccagcacaatgaagatcaagatcattgctcctcctgagcgcaagtactccgtgtggatcggcggctccatcctggcctcgctgtccaccttccagcagatgtggatcagcaagcaggagtatgacgagtccggcccctccatcgtccaccgcaaatgcttctaggcggactatgacttagttgcgttacaccctttcttgacaaaacctaacttgcgcagaaaacaagatgagattggcatggctttatttgttttttttgttttgttttggttttttttttttttttggcttgactcaggatttaaaaactggaacggtgaaggtgacagcagtcggttggagcgagcatcccccaaagttcacaatgtggccgaggactttgattgcacattgttgtttttttaatagtcattccaaatatgagatgcattgttacaggaagtcccttgccatcctaaaagccaccccacttctctctaaggagaatggcccagtcctctcccaagtccacacaggggaggtgatagcattgctttcgtgtaaattatgtaatgcaaaatttttttaatcttcgccttaatacttttttattttgttttattttgaatgatgagccttcgtgcccccccttccccctttttgtcccccaacttgagatgtatgaaggcttttggtctccctgggagtgggtggaggcagccagggcttacctgtacactgacttgagaccagttgaataaaagtgcacacctta

SEQ ID NO: 284903 - DNA, 1000 bp, Homo Sapiens
gaatggaatccatctgtctccctccccaaatggctgctttgacaaggcagacgtcgtacccagccatgtgttggggagacatcaaaaccaccctaacctcgctcgatgactgtgaactgggcatttcacgaactgttcacactgcagagactaatgttggacagacactgttgcaaaggtagggactggaggaacacagagaaatcctaaaagagatctgggcattaagtcagtggctttgcatagctttcacaagtctcctagacactccccacgggaaactcaaggaggtggtgaatttttaatcagcaatattgcctgtgcttctcttctttattgcactaggaattctttgcattccttacttgcactgttactcttaattttaaagacccaacttgccaaaatgttggctgcgtactccactggtctgtctttggataataggaattcaatttggcaaaacaaaatgtaatgtcagactttgctgcattttacacatgtgctgatgtttacaatgatgccgaacattaggaattgtttatacacaactttgcaaattatttattacttgtgcacttagtagtttttacaaaactgctttgtgcatatgttaaagcttatttttatgtggtcttatgattttattacagaaatgtttttaacactatactctaaaatggacattttcttttattatcagttaaaatcacattttaagtgcttcacatttgtatgtgtgtagactgtaactttttttcagttcatatgcagaacgtatttagccattacccacgtgacaccaccgaatatattatcgatttagaagcaaagatttcagtagaattttagtcctgaacgctacggggaaaatgcattttcttcagaattatccattacgtgcatttaaactctgccagaaaaaaataactattttgttttaatctactttttgtatttagtagttatttgtataaattaaataaactgttttcaagtc

SEQ ID NO: 284904 - DNA, 1000 bp, Homo Sapiens
agatcaaggctcgggggcgctttggctgtgtctggaaggcccagctcatgaatgactttgtagctgtcaagatcttcccactccaggacaagcagtcgtggcagagtgaacgggagatcttcagcacacctggcatgaagcacgagaacctgctacagttcattgctgccgagaagcgaggctccaacctcgaagtagagctgtggctcatcacggccttccatgacaagggctccctcacggattacctcaaggggaacatcatcacatggaacgaactgtgtcatgtagcagagacgatgtcacgaggcctctcatacctgcatgaggatgtgccctggtgccgtggcgagggccacaagccgtctattgcccacagggactttaaaagtaagaatgtattgctgaagagcgacctcacagccgtgctggctgactttggcttggctgttcgatttgagccagggaaacctccaggggacacccacggacaggtaggcacgagacggtacatggctcctgaggtgctcgagggagccatcaacttccagagagatgccttcctgcgcattgacatgtatgccatggggttggtgctgtgggagcttgtgtctcgctgcaaggctgcagacggacccgtggatgagtacatgctgccctttgaggaagagattggccagcacccttcgttggaggagctgcaggaggtggtggtgcacaagaagatgaggcccaccattaaagatcactggttgaaacacccgggcctggcccagctttgtgtgaccatcgaggagtgctgggaccatgatgcagaggctcgcttgtccgcgggctgtgtggaggagcgggtgtccctgattcggaggtcggtcaacggcactacctcggactgtctcgtttccctggtgacctctgtcaccaatgtggacctgccccctaaagagtcaagcatctaagcccaggacatgagtgtctctccagactcagtggatctgaa

SEQ ID NO: 284905 - DNA, 1000 bp, Homo Sapiens
cggtggctctgaagaggccgccccctgctcctccggtcactgtgtccagcccacccttcccagttcctgtctacacccggcaggcaccaaagcaggtcatcaagccaacgttcgcacccccagtgcccccagtcaaacccggggctggtgcggccaaccctggtccagctgagggtgctgttggcccaaaggttgccctgaagccccccatccagaggaagcaaggagccgagctcccacagcaccctaggggggcacctgcgcctgtgtggaaatttggagaagttgcggcagagaagccatgcgttccagcattccacggtccagctagtgccgctcagccctagaccctgactttgcaggctcagctgctgttctaacctcaggaatgcatctacctgagaggctcctgctgtccacgccctcagccaattccttctccccgccttggccacgtgtagccccagctgtctgcaggcaccaggctgggatgagctgtgtgcttgcgggtgcgtgtgtgtgtacgtgtctccaggtggccgctggtctcccgctgtgttcaggaggccacatatacagcccctcccagccacacctgcccctgctctggggcctgctgagccggctgccctgggcacccggttccaggcagcacagacgtggggcatccccagaaagactccatcccaggaccaggttcccctgcgtgctcttcgagagggtgtcagtgagcagactgcaccccaagctcccgactccaggtcccctgatcttggggcctgtttcccatgggattcaagagggacagccccagctttgtgtgtgtttaagcttaggaatcgcctttatggaaagggctatgtgggagagtcagctatcttgtctggttttcttgagacctcagatgtgtgttcagcagggctgaaagcttttattctttaataatgagaaatgtatattttactaataaattattgaccgagttctgtaaaaaaaaaaa

SEQ ID NO: 284906 - DNA, 1000 bp, Homo Sapiens
taacttaatggcacaaagtcttagaatattattatgtgccccgtgttccctgttcttcgttgctgcattttcttcacttgcaggcaaacttggctctcaataaacttttaccacaaattgaaataaatatatttttttcaactgccaatcaaggctaggaggctcgaccacctcaacattggagacatcacttgccaatgtacataccttgttatatgcagacatgtatttcttacgtacactgtacttctgtgtgcaattgtaaacagaaattgcaatatggatgtttctttgtattataaaatttttccgctcttaattaaaaattactgtttaattgacatactcaggataacagagaatggtggtattcagtggtccaggattctgtaatgctttacacaggcagttttgaaatgaaaatcaatttacctttctgttacgatggagttggttttgatactcattttttctttatcacatggctgctacgggcacaagtgactatactgaagaacacagttaagtgttgtgcaaactggacatagcagcacatactacttcagagttcatgatgtagatgtctggtttctgcttacgtcttttaaactttctaattcaattccatttttcaattaataggtgaaattttattcatgctttgatagaaattatgtcaatgaaatgattctttttatttgtagcctacttatttgtgtttttcatatatctgaaatatgctaattatgttttctgtctgatatggaaaagaaaagctgtgtctttatcaaaatatttaaacggttttttcagcatatcatcactgatcattggtaaccactaaagatgagtaatttgcttaagtagtagttaaaattgtagataggccttctgacattttttttcctaaaatttttaacagcattgaaggtgaaacagcacaatgtcccattccaaatttatttttgaaacagatgtaaataattggcattttaaagag

SEQ ID NO: 284907 - DNA, 1000 bp, Homo Sapiens
cacaaaggtgctgggtagactagtggcagctctcatgtgctgcacataagtggaatcagtatgaatagaagaacttgctgtataaaggaatttcatggcaacaatgctggtaagggcaattagcctcgcttaagttgccttttttacacaccaaaactttttacatgaagggctggtttcacatgaatactatactgaaatctgtgctctcaagatctagcagtgaccagggctgcccggcgggggctctcctggcaagtcaggaaggtttctgttgctaatataacatagaaacacattagtgcactgggcctctctgaggtcagcatatttgtactcttggaatatttgtttttttcttcagtaacaacagaaaccccagttgggagtttaacaaataactgactaccactcactcatgcatttttatttccaattaaagcaaagcactgtgctgtgctcagataataatagtttgtaagtaaaagtttttagttttcagtgttcaggttatagaatataactgaccataaaaattacctgcaggtattttctttttatgaacttgtttttaaattaccaagtaattactggtgtcattttgttttatgacagacacacgtatctaacaaacaaacaaacagtgaccttctccatgggtcaaggacttccttacaatttctcctgagttaacttttgtgaaaataatacctaaggttttctggcttattgaggaaatttcctaacaaacaaacaaacaaacaaacagaagagaagatcattaaccactgtatactttgtgtatataataggtcagtgtaaagaaatatgatttgaggtggtgcatgcaagtaactagggtttattctatataatgaatatttatagatctgtaacatttgtttcaaaatgctgtttcatttttataaagtaccagtgtttagctgctttttatacattaaattagcaatttgaaaaactcaaaaaaaaaaaaaaaaaa

SEQ ID NO: 284908 - DNA, 1000 bp, Homo Sapiens; identical to SEQ ID NO: 115524

SEQ ID NO: 284909 - DNA, 1000 bp, Homo Sapiens; identical to SEQ ID NO: 115525

SEQ ID NO: 284910 - DNA, 1000 bp, Homo Sapiens; identical to SEQ ID NO: 220947

SEQ ID NO: 284911 - DNA, 1000 bp, Homo Sapiens
tctgagactggggaccaggattattactacctgtcagtgaaggccctctacacggttggctacagcacatccctcgtcaccctcaccactgccatggtcatcctttgtcgcttccggaagctgcactgcacacgcaacttcatccacatgaacctgtttgtgtcgttcatgctgagggcgatctccgtcttcatcaaagactggattctgtatgcggagcaggacagcaaccactgcttcatctccactgtggaatgtaaggccgtcatggttttcttccactactgtgttgtgtccaactacttctggctgttcatcgagggcctgtacctcttcactctgctggtggagaccttcttccctgaaaggagatacttctactggtacaccatcattggctgggggaccccaactgtgtgtgtgacagtgtgggctacgctgagactctactttgatgacacaggctgctgggatatgaatgacagcacagctctgtggtgggtgatcaaaggccctgtggttggctctatcatggttaactttgtgctttttattggcattatcgtcatccttgtgcagaaacttcagtctccagacatgggaggcaatgagtccagcatctacttgcgactggcccggtccaccctgctgctcatcccactattcggaatccactacacagtatttgccttctccccagagaatgtcagcaaaagggaaagactcgtgtttgagctggggctgggctccttccagggctttgtggtggctgttctctactgttttctgaatggtgaggtacaagcggagatcaagcgaaaatggcgaagctggaaggtgaaccgttacttcgctgtggacttcaagcaccgacacccgtctctggccagcagtggggtgaatgggggcacccagctctccatcctgagcaagagcagctcccaaatccgcatgtctggcctccctgctgacaatctggccacctgagccatgctcccct

SEQ ID NO: 284912 - DNA, 1000 bp, Homo Sapiens; identical to SEQ ID NO: 115526

SEQ ID NO: 284913 - DNA, 1000 bp, Homo Sapiens; identical to SEQ ID NO: 115527

SEQ ID NO: 284914 - DNA, 1000 bp, Homo Sapiens; identical to SEQ ID NO: 115528

SEQ ID NO: 284915 - DNA, 1000 bp, Homo Sapiens
gattactggcgaatcttgaacccgggtgagtaccgcgtgacagcccacgcggagggctacaccccgagcgccaagacctgcaatgttgactatgacatcggggccactcagtgcaacttcatcctggctcgctccaactggaagcgcatccgggagatcatggccatgaacgggaaccggcctatcccacacatagacccatcgcgccctatgaccccccaacagcgacgcctgcagcagcgacgcctacaacaccgcctgcggcttcgggcacagatgcggctgcggcgcctcaacgccaccaccaccctaggcccccacactgtgcctcccacgctgccccctgcccctgccaccaccctgagcactaccatagagccctggggcctcataccgccaaccaccgctggctgggaggagtcggagactgagacctacacagaggtggtgacagagtttgggaccgaggtggagcccgagtttgggaccaaggtggagcccgagtttgagacccagttggagcctgagtttgagacccagctggaacccgagtttgaggaagaggaggaggaggagaaagaggaggagatagccactggccaggcattccccttcacaacagtagagacctacacagtgaactttggggacttctgagatcagcgtcctaccaagaccccagcccaactcaagctacagcagcagcacttcccaagcctgctgaccacagtcacatcacccatcagcacatggaaggcccctggtatggacactgaaaggaagggctggtcctgcccctttgagggggtgcaaacatgactgggacctaagagccagaggctgtgtagaggctcctgctccacctgccagtctcgtaagagatggggttgctgcagtgttggagtaggggcagagggagggagccaaggtcactccaataaaacaagctcatggcaaaaaaaaaaaaaaaaaaaaaaaaaaaaaaaaaaaaaaaaaaaaa

SEQ ID NO: 284916 - DNA, 1000 bp, Homo Sapiens; identical to SEQ ID NO: 220948

SEQ ID NO: 284917 - DNA, 1000 bp, Homo Sapiens; identical to SEQ ID NO: 220949

SEQ ID NO: 284918 - DNA, 783 bp, Homo Sapiens
agctcctaggtccctgtcctgtggaaatttgtggaccctgggcaccctctcttgctcccaaattttaatcggctcctggaaacctcaccccaaattggagataggcactcctcttgtagaacaaaaggctcaggttcagggagtgagggcctgaactgtgcccccaccctccaggaagggtccttcacggcctggctgcagggatcagtcacgtgtggcccttcattaggccctgccatataagccaagggcacggggtggccgggaactctctaggcaagaatcccggaggcagaggccatgctgaccgcagcggtgctgagctgtgccctgctgctggcactgcctgccacgcgaggagcccagatgggcttggcccccatggagggcatcagaaggcctgaccaggccctgctcccagagctcccaggcctgggcctgcgggccccactgaagaagacaactgcagaacaggcagaagaggatctgttgcaggaggctcaggccttggcagaggtactagacctgcaggaccgcgagccccgctcctcacgtcgctgcgtaaggctgcatgagtcctgcctgggacagcaggtgccttgctgtgacccatgtgccacgtgctactgccgcttcttcaatgccttctgctactgccgcaagctgggtactgccatgaatccctgcagccgcacctagctggccaacgtcagggtcggggctagggtaggggcaaggaaactcgaataaaggatgggaccaacaaaaaaaaaaaaaaaaaaa

SEQ ID NO: 284919 - DNA, 1000 bp, Homo Sapiens; identical to SEQ ID NO: 220950

SEQ ID NO: 284920 - DNA, 1000 bp, Homo Sapiens; identical to SEQ ID NO: 220951

SEQ ID NO: 284921 - DNA, 805 bp, Homo Sapiens
ccccacctagatgcaaagcaggattcaaaagaacatctttgcgttttctaccggctccccatcatcgtactagggaggaagaagcgggtgagaaacaaaacttctttccattgtcctgcccgtttctgcggacttgttctgaggccgaggagcctgtgttggaagagatggtgatgggcctgggcgttttgttgttggtcttcgtgctgggtctgggtctgaccccaccgaccctggctcaggataactccaggtacacacacttcctgacccagcactatgatgccaaaccacagggccgggatgacagatactgtgaaagcatcatgaggagacggggcctgacctcaccctgcaaagacatcaacacatttattcatggcaacaagcgcagcatcaaggccatctgtgaaaacaagaatggaaaccctcacagagaaaacctaagaataagcaagtcttctttccaggtcaccacttgcaagctacatggaggttccccctggcctccatgccagtaccgagccacagcggggttcagaaacgttgttgttgcttgtgaaaatggcttacctgtccacttggatcagtcaattttccgtcgtccgtaaccagcgggcccctggtcaagtgctggctctgctgtccttgccttccatttcccctctgcacccagaacagtggtggcaacattcattgccaagggcccaaagaaagagctacctggaccttttgttttctgtttgacaacatgtttaataaataaaaatgtcttgatatcagtaagaaaaaaaaaaaaaaaaaa

SEQ ID NO: 284922 - DNA, 1000 bp, Homo Sapiens; identical to SEQ ID NO: 115531

SEQ ID NO: 284923 - DNA, 1000 bp, Homo Sapiens; identical to SEQ ID NO: 115532

SEQ ID NO: 284924 - DNA, 1000 bp, Homo Sapiens; identical to SEQ ID NO: 117815

SEQ ID NO: 284925 - DNA, 1000 bp, Homo Sapiens; identical to SEQ ID NO: 115533

SEQ ID NO: 284926 - DNA, 1000 bp, Homo Sapiens
gacacatctggagactacaggaaagtactgcttgttctctgtggaggagatgattaaaataaaaatcccagaaggacaggaggattctcaacactttgaatttttttaacttcatttttctacactgctattatcattatctcagaatgcttatttccaattaaaacgcctacagctgcctcctagaatatagactgtctgtattattattcacctataattagtcattatgatgctttaaagctgtacttgcatttcaaagcttataagatataaatggagattttaaagtagaaataaatatgtattccatgtttttaaaagattactttctactttgtgtttcacagacattgaatatattaaattattccatattttcttttcagtgaaaaattttttaaatggaagactgttctaaaatcacttttttccctaatccaatttttagagtggctagtagtttcttcatttgaaattgtaagcatccggtcagtaagaatgcccatccagttttctatatttcatagtcaaagccttgaaagcatctacaaatctctttttttaggttttgtccatagcatcagttgatccttactaagtttttcatgggagacttccttcatcacatcttatgttgaaatcactttctgtagtcaaagtataccaaaaccaatttatctgaactaaattctaaagtatggttatacaaaccatatacatctggttaccaaacataaatgctgaacattccatattattatagttaatgtcttaatccagcttgcaagtgaatggaaaaaaaaataagcttcaaactaggtattctgggaatgatgtaatgctctgaatttagtatgatataaagaaaacttttttgtgctaaaaatactttttaaaatcaattttgttgattgtagtaatttctatttgcactgtgcctttcaactccagaaacattctaagatgtacttggatttaattaaaaagttcactttgt

SEQ ID NO: 284927 - DNA, 1000 bp, Homo Sapiens; identical to SEQ ID NO: 115535

SEQ ID NO: 284928 - DNA, 1000 bp, Homo Sapiens; identical to SEQ ID NO: 220955

SEQ ID NO: 284929 - DNA, 1000 bp, Homo Sapiens
aaattcaaagattttttttgtttctgtaactggaactaaatcaaatgattactagtgttaatagtagataacttgtttttattgttggtgcatattagtataactgtggggtaggtcggggagagggtaagggaatagatcactcagatgtattttagataagctatttagcctttgatggaatcataaatacagtgaatacaatcctttgcattgttaaggaggttttttgtttttaaatggtgggtcaaggagctagtttacaggcttactgtgatttaagcaaatgtgaaaagtgaaaccttaattttatcaaaagaaatttctgtaaatggtatgtctccttagaatacccaaatcataattttatttgtacacactgttaggggctcatctcatgtaggcagagtataaagtattaccttttggaattaaaagccactgactgttataaagtataacaacacacatcaggttttaaaaagccttgaatggcccttgtcttaaaaagaaattaggagccaggtgcggtggcacgtgcctgtaatcccagctccttgggaggctaagacaggaggattccttgagccctggagtttgagtccagcctgggtgacatagcaagaccctgtcttaaaagaaaaatgggaagaaagacaaggtaacatgaagaaagaagagatacctagtatgatggagctgcaaatttcatggcagttcatgcagtcggtcaagaggaggattttgttttgtagtttgcagatgagcatttctaaagcattttcccttgctgtatttttttgtattataaattacattggacttcatatatataatttttttttacattatatgtctcttgtatgttttgaaactcttgtatttatgatatagcttatatgatttttttgccttggtatacattttaaaatatgaatttaaaaaatttttgtaaaaataaaattcacaaaattgttttgaaaaacaaaaaaaaaaaaaa

SEQ ID NO: 284930 - DNA, 1000 bp, Homo Sapiens
tccaaggtccgcctcctacctccttctgcttcggggagggcatgggatcagctacctgtttctgcctcaaccacggaccaataatatgagatctttgttcaccagttctacagtgatggggtgcttccttttggcttctggaatgggtgcgtttgcttctgaggatctccagtgtcacaacaaacacatgccagccctgttttacagggagccctggaggagttgggatagaggccacattgactgagggtagttgccagggtcctgcagttatacacaaagtccttaggataagaccatggccttgagagcatgtggcttgatcatcttccgaagatgcctcattcccaaagtggacaacaatgcaattgagtttttactgctgcaggcatcagatggcattcatcactggactcctcccaaaggccatgtggaaccaggagaggatgacttggaaacagccctgagggagacccaagaggaagcaggcatagaagcaggccagctgaccattattgaggggttcaaaagggaactcaattatgtggccaggaacaagcctaaaacagtcatttactggctggcggaggtgaaggactatgacgtggagatccgcctctcccatgagcaccaagcctaccgctggctggggctggaggaggcctgccagttggctcagttcaaggagatgaaggcagcgctccaagaaggacaccagtttctttgctccatagaggcctgagctgactggagcagagtcatttgcttcagcaggatccttgtgggccttctaagatgaagccaccctcaggtccagggaaggttgtgctggtatttggctcatgacagccaagagcagatttgtgaaatcggctcaactcccaggtgagagcaagcaaaaatcttggctgggtggaaaggaaggcaaaagagtaaaaattaaaaaggccaggcccagtaagtgtaccttgtactttataaataaacctcaagcagctca

SEQ ID NO: 284931 - DNA, 1000 bp, Homo Sapiens
tcgtggttgtgtttctcgtgctgcatccctgtgtccactgagactttcccctctcgcgcccagcatttggttttacacaggaagagaagaatccacaaggacctctttactctctccgatttgcttttttttttttttttttttcaataccagggaagtttcgtatgcactcccttgaggatggagagcagccagcacccacctggtactgacccaggaccatcctggagggctttctgggtgtgtccagggggtgggctgtcactgcttgagggagaatcctcccttcccaggaggtgcagacttcttaaaaggagctcgcggggcagcaaagcagctgattcagcagtgcctaaaacccagttgctgatccctgctctctgagtttatctgtgggaatgtggtagtacccagggccagcccacgtcattaaggttatgcactgcctgccatgtagttggggcaccatacattatttcttcccagaatctctgagccaaccttaaacctcttctattgctagttctaatttcaacgtatgtgtgttttctaatacgagccttctcaccccaggataaaaggggaaataactgccttgggcaaggacaccatagtgtcacagagagcttggcaattcatggggcatctgaagctttaccaggttgtcctcaagttatcaaccattagataaacacaggcaggtactgtctgcttctctctctctcacacacacacacacacacacagtcccatttgcatatcacccttccctgctcccaccaccagtgagacaagctgaagattaggcacacagatcccctggaaacccacctctctggaaggccccttccctggcaggtggccaggcaggcgggggctgctcagcctcatcctgagagacctgccctctctgcgctgaggcccagcccctccagcaccactttggcttaaagcatcctcctcctggactcccctccctgccgaacacacatcccaggag

SEQ ID NO: 284932 - DNA, 1000 bp, Homo Sapiens; identical to SEQ ID NO: 220957

SEQ ID NO: 284933 - DNA, 1000 bp, Homo Sapiens; identical to SEQ ID NO: 220958

SEQ ID NO: 284934 - DNA, 1000 bp, Homo Sapiens
tgcggccaatgtggagctcctggggaatggcctggtgtttgcagctgccacgtgtgctgtgctgagcaaagcccacctcagtgctggcctcgtgggcttctctgtctctgctgccctccaggtgacccagacactgcagtgggttgttcgcaactggacagacctagagaacagcatcgtgtcagtggagcggatgcaggactatgcctggacgcccaaggaggctccctggaggctgcccacatgtgcagctcagcccccctggcctcagggcgggcagatcgagttccgggactttgggctaagataccgacctgagctcccgctggctgtgcagggcgtgtccttcaagatccacgcaggagagaaggtgggcatcgttggcaggaccggggcagggaagtcctccctggccagtgggctgctgcggctccaggaggcagctgagggtgggatctggatcgacggggtccccattgcccacgtggggctgcacacactgcgctccaggatcagcatcatcccccaggaccccatcctgttccctggctctctgcggatgaacctcgacctgctgcaggagcactcggacgaggctatctgggcagccctggagacggtgcagctcaaagccttggtggccagcctgcccggccagctgcagtacaagtgtgctgaccgaggcgaggacctgagcgtgggccagaaacagctcctgtgtctggcacgtgcccttctccggaagacccagatcctcatcctggacgaggctactgctgccgtggaccctggcacggagctgcagatgcaggccatgctcgggagctggtttgcacagtgcactgtgctgctcattgcccaccgcctgcgctccgtgatggactgtgcccgggttctggtcatggacaaggggcaggtggcagagagcggcagcccggcccagctgctggcccagaagggcctgttttacagactggcccaggagtcaggcctggtctga

SEQ ID NO: 284935 - DNA, 1000 bp, Homo Sapiens; identical to SEQ ID NO: 222146

SEQ ID NO: 284936 - DNA, 1000 bp, Homo Sapiens; identical to SEQ ID NO: 115540

SEQ ID NO: 284937 - DNA, 1000 bp, Homo Sapiens; identical to SEQ ID NO: 115541

SEQ ID NO: 284938 - DNA, 1000 bp, Homo Sapiens; identical to SEQ ID NO: 220901

SEQ ID NO: 284939 - DNA, 1000 bp, Homo Sapiens; identical to SEQ ID NO: 220961

SEQ ID NO: 284940 - DNA, 1000 bp, Homo Sapiens
ggcctgatggtgcaggagaggtttgggagaagtctgttggaacttggaggaaacaatgccattattgcctttgaagatgcagacctcagcttagttgttccatcagctctcttcgctgctgtgggaacagctggccagaggtgtaccactgcgaggcgactgtttatacatgaaagcatccatgatgaggttgtaaacagacttaaaaaggcctatgcacagatccgagttgggaacccatgggaccctaatgttctctatgggccactccacaccaagcaggcagtgagcatgtttcttggagcagtggaagaagcaaagaaagaaggtggcacagtggtctatgggggcaaggttatggatcgccctggaaattatgtagaaccgacaattgtgacaggtcttggccacgatgcgtccattgcacacacagagacttttgctccgattctctatgtctttaaattcaagaatgaagaagaggtctttgcatggaataatgaagtaaaacagggactttcaagtagcatctttaccaaagatctgggcagaatctttcgctggcttggacctaaaggatcagactgtggcattgtaaatgtcaacattccaacaagtggggctgagattggaggtgcctttggaggagaaaagcacactggtggtggcagggagtctggcagtgatgcctggaaacagtacatgagaaggtctacttgtactatcaactacagtaaagaccttcctctggcccaaggaatcaagtttcagtaaaggtgttttagatgaacatcccttaatttgaggtgttccagcagctgtttttggagaagacaaagaaaattaaagttttccctgaataaatgcattattatgactgtgacagtgactaatccccctatgaccccaaagccctgattaaatcaagagattccttttttaaaaatcaaaataaaattgttacaacatagccatagttactaaaaaaaaaaaaaaaaaa

SEQ ID NO: 284941 - DNA, 1000 bp, Homo Sapiens; identical to SEQ ID NO: 115542

SEQ ID NO: 284942 - DNA, 1000 bp, Homo Sapiens
acctattctgaccaaactatataaagaaaagggagtgtatatgacaggaaaagaacttcgccagtgtatgctaccaaagtcagcagctttatctgaaaaactcaaagtattccgagaatttctcctgcccaggcatcctcctatttttcatgagtggtttctgagaacattccctgatcctacatcatggtacagtagtagatcagcttactgccgttccactgcagtaatgtcaatggttggttatattctggggcttggagaccgtcatggtgaaaatattctctttgattctttgactggtgaatgcgtacatgtagatttcaattgtcttttcaataagggagaaacctttgaagttccagaaattgtgccatttcgcctgactcataatatggttaatggaatgggtcctatgggaacagagggtctttttcgaagagcatgtgaagttacaatgaggctgatgcgtgatcagcgagagcctttaatgagtgtcttaaagacttttctacatgatcctcttgtggaatggagtaaaccagtgaaagggcattccaaagcgccactgaatgaaactggagaagttgtcaatgaaaaggccaagacccatgttcttgacattgagcagcgactacaaggtgtaatcaagactcgaaatagagtgacaggactgccgttatctattgaaggacatgtgcattaccttatacaagaagctactgatgaaaacttactatgccagatgtatcttggttggactccatatatgtgaaatgaaattatgtaaaagaatatgttaataatctaaaagtaatgcatttggtatgaatctgtggttgtatctgttcaattctaaagtacaacataaatttacgttctcagcaactgttatttctctctgatcattaattatatgtaaaataatatacattcagttattaagaaataaactgctttcttaataaaaaaaaaaaaaaaaaaaaaaaaaaaaaaaaaa

SEQ ID NO: 284943 - DNA, 1000 bp, Homo Sapiens
ccacttctccccagaaagtgtttaacggttttagctttttataatacccttgtgagagcccattcccaccattctacctgaggccaggacgtctggggtgtggggattggtgggtctatgttccccaggattcagctattctggaagatcagcaccctaagagatgggactaggacctgagcctggtcctggccgtccctaagcatgtgtcccaggagcaggacctactaggagaggggggccaaggtcctgctcaactctacccctgctcccattcctccctccggccatactgcctttgcagttggactctcagggattctgggcttggggtgtggggtggggtggagtcgcagaccagagctgtctgaactcacgtgtcagaagcctccaagcctgcctcccaaggtcctctcagttctctcccttcctctctccttatagacacttgctcccaacccattcactacaggtgaaggctctcacccccatccctgggggccttgggtgagtggcctgctaaggctcctccttgcccagactacagggcttaggacttggtttgttatttcagggaaaaggagtagggagttcatctggagggttctaagtgggagaaggactatcaacaccactaggaatcccagaggtgggatcctccctcatggctctggcacagtgtaatccaggggtgtagatgggggaactgtgaatacttgaactctgttcccccaccctccatgctcctcacctgtctaggtctcctcagggtggggggtgacagtgccttctctattgggcacagcctagggtcttgggggtcaggggggagaagttcttgattcagccaaatgcagggaggggaggcagatggagcccataggccaccccctatcctctgagtgtttggaaataaactgtgcaatcccctcaaaaaaaaaaaaaaaaaaaaaaaaaaaaaaaaaaaaaaaaaaaaaaaaaaaaaaaaaaaaacctcggg

SEQ ID NO: 284944 - DNA, 1000 bp, Homo Sapiens
cgcgcgctcctgttcgtcattctctgcccagtgggtgcctacttccctggaggctccgtgaccccggtctccctcctggccgacccagccttcatccgggcctgggtgggcggggtcggcaactacaagttaggtgggaattatgggcccaccgtgttagtgcaacaggaggcactcaagcggggctgtgaacaggtcctctggctgtatgggcccgaccaccagctcaccgaggtgggaaccatgaacatctttgtctactggacccacgaagatggggtgctggagctggtgacgcccccgctgaatggtgttatcctgcctggagtggtcagacagagtctactggacatggctcagacctggggtgagttccgggtggtggagcgcacgatcaccatgaagcagttgctgcgggccctggaggagggccgcgtgcgggaagtctttggctcgggcaccgcttgccaggtctgcccagtgcaccgaatcctgtacaaagacaggaacctccacattcccaccatggaaaatgggcctgagctgatcctccgcttccagaaggagctgaaggagatccagtacggaatcagagcccacgagtggatgttcccggtgtgaagctgcaggctgtgctccagatccaccgacccgtagcatctcgtcacgccagcactcgcctccctaccaatgactcacctgaagtgcaatacgaaataaaaggccagcgggcggcgtctgggtctctggcgcccccatgtggttgcgacactcccaaagccgtaagggccgacccaggcatcttggcccccagcccctcgtcgcgggttcaggtccgcccattactccttgtcgtgcggtcaaggatacaccttggccccgattccggatctctccgttctcaggccagacccctggtgctgccgttgatttttttttctctgtctttgctgcaattttgaaataaaatgccaaagaacacacaaaaaaaaaaaaaaaa

SEQ ID NO: 284945 - DNA, 994 bp, Homo Sapiens; identical to SEQ ID NO: 56552

SEQ ID NO: 284946 - DNA, 1000 bp, Homo Sapiens; identical to SEQ ID NO: 220963

SEQ ID NO: 284947 - DNA, 963 bp, Homo Sapiens; identical to SEQ ID NO: 56467

SEQ ID NO: 284948 - DNA, 1000 bp, Homo Sapiens; identical to SEQ ID NO: 115544

SEQ ID NO: 284949 - DNA, 1000 bp, Homo Sapiens; identical to SEQ ID NO: 115545

SEQ ID NO: 284950 - DNA, 1000 bp, Homo Sapiens; identical to SEQ ID NO: 115546

SEQ ID NO: 284951 - DNA, 1000 bp, Homo Sapiens
cgtgattgttcaggacccttaagtgctcttactgaactgaatactaaagtaaaagagaaatttcaacagttgcgtcacagaatacaggacctggagcagttggctaaagagcaagacaaagaatcagagaaacaacttctactccaggaagtggagaatcacaaaaagcagatgctcagcaatcaggcctcatggaggaaagctaatctcacctgcaaaattgcaatcgacaatctagagaaagcagaacttcttcagggaggagatctcttaaggcaaaggaaaaccaccaaagagagcctggcccagacatccagtaccatcactgagagcctcatggggatcagcaggatgatggcccagcaggtccagcagagcgaggaggccatgcagtctctagtcacttcttcacgaacgatcctggatgcaaatgaagaatttaagtccatgtcgggcaccatccagctgggccggaagcttatcacaaaatacaatcgccgggagctgacggacaagcttctcatcttccttgcgctacgcctgtttcttgctacggtcctctatattgtgaaaaagcggctctttccatttttgtgagatcccaaaggtgccagttctggccctttcagctcctgtttcaggatctgtcctggttcctgagctctaggctgctaagctgagccacacacccctccgttttgcaccagttgcctgcaggttggatggaacacagtgccccacttttctgcaagtagctggcttgtaaagggtgaacagagccatgggaggaaggtctggcattgggatgccgccctggggacatacgaaccgcctccttccaccattgtgcactatgggaggccgctgctgcgtggagcacttaaagtccagcctccaggaccggatgcccctcctgtctcccgctcccatcgtgcccttaaatgccagatctggtggagggaagagagaagaggtaggaagaaaggtgatgaaaactcct

SEQ ID NO: 284952 - DNA, 895 bp, Homo Sapiens
gccatcttgcgtccccgcgtgtgtgcgcctaatctcaggtggtccacccgagaccccttgagcaccaaccctagtcccccgcgcggccccttattcgctccgacaagatgaaagaaacaatcatgaaccaggaaaaactcgccaaactgcaggcacaagtgcgcattggtgggaaaggaactgctcgcagaaagaagaaggtggttcatagaacagccacagcagatgacaaaaaacttcagttctccttaaagaagttaggggtaaacaatatctctggtattgaagaggtgaatatgtttacaaaccaaggaacagtgatccactttaacaaccctaaagttcaggcatctctggcagcgaacactttcaccattacaggccatgctgagacaaagcagctgacagaaatgctacccagcatcttaaaccagcttggtgcggatagtctgactagtttaaggagactggccgaagctctgcccaaacaatctgtggatggaaaagcaccacttgctactggagaggatgatgatgatgaagttccagatcttgtggagaattttgatgaggcttccaagaatgaggcaaactgaattgagtcaacttctgaagataaaacctgaagaagttactgggagctgctattttatattatgactgctttttaagaaatttttgtttatggatctgataaaatctagatctctaatatttttaagcccaagccccttggacactgcagctcttttcagtttttgcttatacacaattcattctttgcagctaattaagccgaagaagcctgggaatcaagtttgaaacaaagattaataaagttctttgcctagtaaaaaaaaaaaaaaaaaaaaaaataaaaaaaaaaaaaaaaaaa

SEQ ID NO: 284953 - DNA, 1000 bp, Homo Sapiens
tcttctccaacacagtgaatatattacccatgaaataacagtgttgattatttataaccttttgacaatagtggagatgctacacaaagcagaaatagtccatggtgacttgagtccaaggtgtctgattctcagaaacagaatccacgatccctatgattgtaacaagaacaatcaagctttgaagatagtggacttttcctacagtgttgaccttagggtgcagctggatgtttttaccctcagcggctttcggactgtacagatcctggaaggacaaaagatcctggctaactgttcttctccctaccaggtagacctgtttggtatagcagatttagcacatttactattgttcaaggaacacctacaggtcttctgggatgggtccttctggaaacttagccaaaatatttctgagctaaaagatggtgaattgtggaataaattctttgtgcggattctgaatgccaatgatgaggccacagtgtctgttcttggggagcttgcagcagaaatgaatggggtttttgacactacattccaaagtcacctgaacaaagccttatggaaggtagggaagttaactagtcctggggctttgctctttcagtgagctaggcaatcaagtctcacagattgctgcctcagagcaatggttgtattgtggaacactgaaactgtatgtgctgtaatttaatttaggacacatttagatgcactaccattgctgttctactttttggtacaggtatattttgacgtcactgatattttttatacagtgatatacttactcatggccttgtctaacttttgtgaagaactattttattctaaacagactcattacaaatggttaccttgttatttaacccatttgtctctacttttccctgtacttttcccatttgtaatttgtaaaatgttctcttatgatcaccatgtattttgtaaataataaaatagtatctgttaaatttgtgcttctaaaaaaaaa

SEQ ID NO: 284954 - DNA, 1000 bp, Homo Sapiens
ggcagctcctgcagccggcaccccggctgtgcacccggcccttcgggctgctcagcgtgcgcgcaggttccgagcggcggccgggcctcctgcggcctcgcggaccctgcgcctgtggctgtggctgcggctcgctgcacaccgacggagacaaagcttttgttgatttcctgagtgatgaaattaaggaggaaagaaaaattcagaagcataaaaccctccctaagatgtctggaggttgggagctggaactgaatgggacagaagcgaaattagtgcggaaagttgccggggaaaaaatcacggtcactttcaacattaacaacagcatcccaccaacatttgatggtgaggaggaaccctcgcaagggcagaaggttgaagaacaggagcctgaactgacatcaactcccaatttcgtggttgaagttataaagaatgatgatggcaagaaggcccttgtgttggactgtcattatccagaggatgaggttggacaagaagacgaggctgagagtgacatcttctctatcagggaagttagctttcagtccactggcgagtctgaatggaaggatactaattatacactcaacacagattccttggactgggccttatatgaccacctaatggatttccttgccgaccgaggggtggacaacacttttgcagatgagctggtggagctcagcacagccctggagcaccaggagtacattacttttcttgaagacctcaagagttttgtcaagagccagtagagcagacagatgctgaaagccatagtttcatggcaggctttggccagtgaacaaatcctactctgaagctagacatgtgctttgaaatgattatcatcctaatatcatgggggaaaaaataccaaatttaaattatatgttttgtgttctcatttattatcatttttttctgtacaaatctattatttctagatttttgtataacatgatagacataaaattggtttatctcctcc

SEQ ID NO: 284955 - DNA, 1000 bp, Homo Sapiens
agcctgaagcagcaggatggtgtgaacccaggaggtggagcttgcagtgagccgaggtcgcgccaccgcactccagcctgggccacacagcgagattccgtcagaatcagttacttttcgggcacagccccaggccacttactgtgagcctttttctttctcaacaccacattccccacagggaaaacacatttctcacctcaaaagaagacaagacaacgagcaaacaagaaggagcagcaggaggggttctgagccgaggatgccgggcagacatgagggagacacgcacccccgaatccaaccagtgcctcggcacaacgacaaatgtcttcacgtcacagacctttagaagctcctgggcagacctgaaccaaggctcctgactggtctgtttggctcacatggtgttgagattttgccatcactcaatattcagatttcttataaatatccagatttccagcttctcttggaaaatcagaaaaaaacagcactgaactcctaggcccacaaggcactccccagtgaacagatgaaactgtcctctgctgcggggcaggagtctccaggtcacccccatccctccccacctgcctggaccctgaagaagccttctgagtctgtggctcaacgtgcgatgtgcagtgcaagggcctgccccgtagcctgccccgtaggctgccccgcagcctgccccgtaggctgccccatagcctgccccgtaagctgccccgtagcctgccccgtaggctgccccgtaggctccatggccactgccccacaaggcctgtctccacaggaatgggaagcggacagggagacgggcagcagctcacatgctgggacaacgcagtgttcaatccattctccatccagcagctccagacatctttccagaacacaaacctgaccccatcacctctctgcttagccactggcttaaactgccaatggtttgcctgcatgtaaaataaagccattctttaccattaaaaaa

SEQ ID NO: 284956 - DNA, 1000 bp, Homo Sapiens; identical to SEQ ID NO: 115547

SEQ ID NO: 284957 - DNA, 1000 bp, Homo Sapiens
acctacagagagggctctttggtttgaggaccatggcttacctttcctgcctttgacccatcacaccccatttcctcctctttccctctccccgctgccaaaaaaaaaaaaaaggaaacgtttatcatgaatcaacagggtttcagtccttatcaaagagagatgtggaaagagctaaagaaaccaccctttgttcccaactccactttacccatattttatgcaacacaaacactgtccttttgggtccctttcttacagatggacctcttgagaagaattatcgtattccacgtttttagccctcaggttaccaagataaatatatgtatatataacctttattattgctatatctttgtggataatacattcaggtggtgctgggtgatttattataatctgaacctaggtatatcctttggtcttccacagtcatgttgaggtgggctccctggtatggtaaaaagccaggtataatgtaacttcaccccagcctttgtactaagctcttgatagtggatatactcttttaagtttagccccaatatagggtaatggaaatttcctgccctctgggttccccatttttactattaagaagaccagtgataatttaataatgccaccaactctggcttagttaagtgagagtgtgaactgtgtggcaagagagcctcacacctcactaggtgcagagagcccaggccttatgttaaaatcatgcacttgaaaagcaaaccttaatctgcaaagacagcagcaagcattatacggtcatcttgaatgatccctttgaaattttttttttgtttgtttgtttaaatcaagcctgaggctggtgaacagtagctacacacccatattgtgtgttctgtgaatgctagctctcttgaatttggatattggttattttttatagagtgtaaaccaagttttatattctgcaatgcgaacaggtacctatctgtttctaaataaaactgtttacattcaaaaa

SEQ ID NO: 284958 - DNA, 1000 bp, Homo Sapiens; identical to SEQ ID NO: 115548

SEQ ID NO: 284959 - DNA, 1000 bp, Homo Sapiens; identical to SEQ ID NO: 115549

SEQ ID NO: 284960 - DNA, 1000 bp, Homo Sapiens
cctccgtttacacgctgcctgctggagctgacttcctcatgtgttactctgttgcagaaggatattattctcaccgggaaactgtgaacggctcatggtacattcaagatttgtgtgagatgttgggaaaatatggctcctccttagagttcacagaactcctcacactggtgaacaggaaagtttctcagcgccgagtggacttttgcaaagacccaagtgcaattggaaagaagcaggttccctgttttgcctcaatgctaactaaaaagctgcatttctttccaaaatctaattaattaatagaggctatctaattttacactctgtattgaaaatggctttctcagccaggcgtggttactcacacctgtaatcccagcactttgggagtccaaggtgggcggatcacctgaggtcgggagttcgagaccagcctgaccaacatggagaagccccgtctctactaaaaatgcaaaaaaaaatttagctaggcatggcggcgcatgcctgcaatcccagctacttggaaggctgaggcaggagaatcacttgaacccaggaggtggaggctgcggtgagccgagattgcgccattgcactccagcctgggcaacgagtgaaactccgtctcaaaaaaaagaaaatgtctttctcttccttttatataaatatcgttagggtgaagcattatggtctaatgattcaaatgttttaaagtttaatgcctagcagagaactgccttaaaaaaaaaaaaaaaaagttcatgttggccatggtgaaagggtttgatatggagaaacaaaatcctcaggaaattagataaataaaaatttataagcatttgtattattttttaataaactgcagggttacacaaaaatctagctgatttaacttgtattttgtcacttttttataaaagtttattgtttgatgtttttaaaggtttttgaaatccaggaattaaatcatcccttaataaaatattcgaaattc

SEQ ID NO: 284961 - DNA, 1000 bp, Homo Sapiens
acaaaacacagccaaggggatatttactgctctttattgcagaatgtgggtattgagtgtgatttgaatgatttttcattggcttagggcagattttcatgcaaaagttctcatatgagttagaggagaaaaagcttaatgattctgatatgtatccatcaggatccagtctggaaaacagaaaccattctaggtgtttcaacagagggagtttaatacaggaaattgacttacatagatgataaaagagaagccaaacagcaagaagctgttaccacacccagggctatgaggataatgggaagaggtttggtttcctgtgtccagtagtgggatcatccagaggagctggaaccatggtgggggctgcctagtgggagttaggaccaccaatggattgtggaaaatggagccatgacaagaacaaagccactgactgagatggagtgagctgagacagataagagaataccttggtctcacctatcctgccctcacatcttccaccagcaccttactgcccaggcctatctggaagccacctcaccaaggaccttggaagagcaagggacagtgaggcaggagaagaacaagaaatggatgtaagcctggcccataatgtgaacataagtaatcactaatgctcaacaatttatccattcaatcatttattcattgggttgtcagatagtctatgtatgtgtaaaacaatctgttttggctttatgtgcaaaatctgttatagctttaaaatatatctggaactttttagattattccaagccttattttgagtaaatatttgttacttttagttctataagtgaggaagagtttatggcaaagatttttggcactttgttttcaagatggtgttatcttttgaattcttgataaatgactgtttttttctgcctaatagtaactggttaaaaaacaaatgttcatatttattgattaaaaatgtggttgcttaattcctaaaaaaaaaaaaaaaaaa

SEQ ID NO: 284962 - DNA, 1000 bp, Homo Sapiens; identical to SEQ ID NO: 118347

SEQ ID NO: 284963 - DNA, 1000 bp, Homo Sapiens
aatagcgaagaggagattgtcaacttcgtggaggagcacaggagatcaaccctgaggaaactgaagccggagagtatgtatgagacctgggaggatgatatggatggaatccacattgtggccttcgcagaggaagctgatcctgatggtttcgagttcttagagactctcaaggctgtggcccaagataacactgaaaacccagatcttagcatcatctggattgaccctgatgacttccccctgctggtcccatactgggagaagacgtttgacatcgacttgtcagccccacaaataggagtcgtcaatgttactgatgcggatagcgtatggatggaaatggacgatgaggaggacctgccttctgctgaggagctggaggactggctggaggatgtcctggagggcgagatcaacacagaggacgatgacgatgatgatgatgactagttgctatggcaaccatctttcagccccactggtcttttcatgctctctcctgccttcccttgtccttccctgagttcctccagggagactaggttattctctgccatagagctaactggggtctatatgctgggtgctgagacactgatccccctcatttgatgagcaaatgagctacttttccctagacaccaggccagctctctcttatctgacttctgtttcttatcccataacttacttgtatctattatgtgtctcttccatcactctccatactctttcttgtgattctcctctagccatatatatgggccccatctctgttctgttccctccatctatgcacagctttcccccactctctctaatcctgtatctttctgactgtcctgtccttggccagaaggaagggagaatactgtgtttgggactgtatctcagcaatcacttgttaatgtatttgggtcaaatgagaggcctcaataaagacatctggggcagcatgaaaaaaaaaaaaaaaaaaaaaaaaaaaaaaaaggaattc

SEQ ID NO: 284964 - DNA, 1000 bp, Homo Sapiens; identical to SEQ ID NO: 220966

SEQ ID NO: 284965 - DNA, 1000 bp, Homo Sapiens
ctgaggccattgacaagaacaaggccgacttgtcacgcatgtcaggcaagaaggacctgtacctggccagcgtgttccacgccaccgcctttgagttggacacagatggcaacccctttgaccaggacatctacgggcgcgaggagctgcgcagccccaagctgttctacgccgaccaccccttcatcttcctagtgcgggacacccaaagcggctccctgctattcattgggcgcctggtccggcctaagggtgacaagatgcgagacgagttatagggcctcagggtgcacacaggatggcaggaggcatccaaaggctcctgagacacatgggtgctattggggttgggggggaggtgaggtaccagccttggatactccatggggtgggggtggaaaaacagaccggggttcccgtgtgcctgagcggaccttcccagctagaattcactccacttggacatgggccccagataccatgatgctgagcccggaaactccacatcctgtgggacctgggccatagtcattctgcctgccctgaaagtcccagatcaagcctgcctcaatcagtattcatatttatagccaggtaccttctcacctgtgagaccaaattgagctaggggggtcagccagccctcttctgacactaaaacacctcagctgcctccccagctctatcccaacctctcccaactataaaactaggtgctgcagcccctgggaccaggcacccccagaatgacctggccgcagtgaggcggattgagaaggagctcccaggaggggcttctgggcagactctggtcaagaagcatcgtgtctggcgttgtggggatgaactttttgttttgtttcttccttttttagttcttcaaagatagggagggaagggggaacatgagcctttgttgctatcaatccaagaacttatttgtacattttttttttcaataaaacttttccaatgacattttgttggagcgtggaaaaaa

SEQ ID NO: 284966 - DNA, 1000 bp, Homo Sapiens; identical to SEQ ID NO: 115550

SEQ ID NO: 284967 - DNA, 1000 bp, Homo Sapiens; identical to SEQ ID NO: 220968

SEQ ID NO: 284968 - DNA, 1000 bp, Homo Sapiens
agaccaagacaaactacacagggtattaaatagtatacttctccttctgtctcttggaaagatacagctccagggttaaaaagagagtttttagtgaagtatctttcagatagcaggcagggaagcaatgtagtgtggtgggcagagccccacacagaatcagaagggatgaatggatgtcccagcccaacctctaattcactgtatggtcttgatctatttcttctgttttgagagcctccagttaaaatggggcttcagtaccagagcagctagcaactctgccctaatgggaaatgaaggggagctgggtgtgagtgtttacactgtgcccttcacgggatacttcttttatctgcagatggcctaatacttagttgtccaagtcgcgatcaaggactctctcacacaggaaacttccctatactggcagatacacttgtgactgaaccatgcccagtttatgcctgtctgactgtcactctggcactaggaggctgatcttgtactccatatgaccccacccctaggaacccccagggaaaaccaggctgggacagccccctgttcctgagatggaaagcacaaatttaatacaccaccacaatggaaaacaagttcaaagacttttacttacagatcctggacagaaagggcataatgagtctgaagggcagtcctccttctctaggttacatgaggcaggaataagaagtcagacagagacagcaagacagttaacaatgtaggtaaagaaatagggtgtggtcactctcaattcactggcaaatgcctgaatggtctgtctgaaggaagcaacagagaagtggggaatccagtctgctaggcaggaaagatgcctctaagttcttgtctctggccagaggtgtggtatagaaccagaaacccatatcaagggtgactaagcccggcttctggtatgagaaattaaacttgtatacaaaatggttgccaaggcaacataaaattataagaattc

SEQ ID NO: 284969 - DNA, 1000 bp, Homo Sapiens
tcttgttggcttgtagatggctgtctcctccttgtgtcttcacatggtctttcctctgagtgtgtttgtgtcctaatcttctcttcttataaagacactagtcatattggattagggcctccccatgacctaatttaaataaattaactatttaaagaccctccaaatacagtaaccttctgagatattgagatttaggacttccaacatatgaattttagaagggaacaatttagcccataacactgtgtccaattcttttaaaattaatgtttttgttgtaaatggactatataaataccttcgtatatatggcagaccacaggacttctgtccaagagaactgagttcaactccatctatgccagcctgggcaacagagcgagactccaactcagaaaaagcaaaacaaaacaaacaaacaagcaaaaaaccacaattagactgacagctgacttttttaggagcaatattggaaggctaaatgcaatagaaagatgtctttgatggcttaagagaaataaatgttgttttagaaagcctactcaatgaaaacacattttaagactgaaagtgaaatatagatattttaaggaaaaccaaaatatgtgagtgttaataaagaaaagatttctcaaataaattctaaaacatataattcaggtattaggaaagtgatcccagattagatttttgagatccaaaaaaaatgaaaacctaggaaagtagcaaatatgtgagcaaaatgaaacaaatacttgttgtaaaaatgatggtttgtagaggggtcaaacatcaaatgtaatattgaaataccaatattatatagcccagaaactataataacataaagttcagaagagtgtaaatagaatttatattacataaagtctttatatttttccagagaaaattaaatgttatgatgaatgttaaaaaaaaaaaaaaaaaaaaaaaaaaaaaaaaaaaaaaaaaaaaaaaaaaaaaaaaaaaaaaaaaa

SEQ ID NO: 284970 - DNA, 1000 bp, Homo Sapiens; identical to SEQ ID NO: 115551

SEQ ID NO: 284971 - DNA, 1000 bp, Homo Sapiens
actagcaaccctgggagccctggagacagaagggactgatgggcacactttccggagtgcctgtttaccgagatggttggaagcagagtggatctttgggggtgtgaaataccagtatggtggcaaccaagaaggggaggtgggctttgagccctgctatgccgaagtgctgagggtggtacgaggaaaacttcaccagccagaggaggtccagagaggttccttctatgctttctcttactattatgaccgagctgttgacacagacatgattgattatgaaaaggggggtattttaaaagttgaagattttgaaagaaaagccagggaagtgtgtgataacttggaaaacttcacctcaggcagtcctttcctgtgcatggatctcagctacatcacagccctgttaaaggatggctttggctttgcagacagcacagtcttacagctcacaaagaaagtgaacaacatagagacgggctgggccttgggggccacctttcacctgttgcagtctctgggcatctcccattgaggccacgtacttccttggagacctgcatttgccaacacctttttaaggggaggagagagcacttagtttctgaactagtctgggacatcctggacttgagcctagagatttaggtttaattaattttacacatctaatgtgaactgctgcctaaccactcaagagtacacagctggcaccagagcatcacagagagccctgtgagccaaaaagtatagttttggaacttaaccttggagtgagagcccagggacaggtccctggaaaccaaagaaaaatcgcatttcaaccctttgagtgcctcattccactgaatatttaaattttcctcttaaatggtaaactgacttattgcaatcccaagacccatcaatatcagtatttttttcctccctatacagtgccctgcccacccttatctgcacccacctcccctgaaaaagagagaaaaaaaaaaaaaaaaaa

SEQ ID NO: 284972 - DNA, 1000 bp, Homo Sapiens; identical to SEQ ID NO: 115552

SEQ ID NO: 284973 - DNA, 1000 bp, Homo Sapiens; identical to SEQ ID NO: 115553

SEQ ID NO: 284974 - DNA, 1000 bp, Homo Sapiens; identical to SEQ ID NO: 220970

SEQ ID NO: 284975 - DNA, 1000 bp, Homo Sapiens; identical to SEQ ID NO: 115554

SEQ ID NO: 284976 - DNA, 1000 bp, Homo Sapiens; identical to SEQ ID NO: 220971

SEQ ID NO: 284977 - DNA, 1000 bp, Homo Sapiens
gcttctcttttctctgtacacagattgagagttaccacagtggcctgtcgggtccaccctgtgggtgcagcacagctctctgaaagcaagaaccttcctacctattctaacgtttttgccctctaagaaaaatggcctcaggtatggtatagacatagcaagaggggaagggctgtctcactctagcaaccatccctccattacacacagaaagccctcttgaagcaaaagaagaagaaagaaagaaagcttatctctaaggctactgtcttcagaatgctctgagctgaatgctcttgctcctttcccaagaggcagatgaaaatatagccagtttatctatacccttcctatctgaggaggagaatagaaaagtagggtaaatatgtaacgtaaaatatgtcattcaaggaccaccaaaactttaagtaccctatcattaaaaatctggttttaaaagtagctcaagtaagggatgctttgtgacccagggtttctgaagtcagatagccattcttacctgccccttactctgacttattgggaaagggagaactgcagtggtgtttctgttgcagtggcaaaggtaacatgtcagaaaattcagagggttgcataccaataatcctttggaaactggatgtcttactgggtgctagaatgaaaatgtaggtatttattgtcagatgatgaagttcattgtttttttcaaaattggtgttgaaatatcactgtccaatgtgttcacttatgtgaaagctaaattgaatgaggcaaaaagagcaaatagtttgtatatttgtaataccttttgtatttcttacaataaaaatattggtagcaaataaaaataataaaaacaataactttaaactgctttctggagatgaattactctcctggctattttcttttttactttaatgtaaaatgagtataactgtagtgagtaaaattcattaaattccaagttttagcagaaaaaaaaaaaaaaaaaaaa

SEQ ID NO: 284978 - DNA, 1000 bp, Homo Sapiens; identical to SEQ ID NO: 220972

SEQ ID NO: 284979 - DNA, 1000 bp, Homo Sapiens; identical to SEQ ID NO: 220974

SEQ ID NO: 284980 - DNA, 1000 bp, Homo Sapiens
tgttatccaaataccagtactttgtctgcccagtggaataccgaagtgatgtaaactccttcgtgacagaatgtgagccctcagaacttttccagcttcagacttactcacttccaccctttctaaaggcagtcttgagacaggaaagagtgagcttgtaccctttccagatccacagcattgcactgtcaacctttgcatctttaattggcccatttggaggcttctttgctagtggattcaaaagagccttcaaaatcaaggattttgcaaataccattcctggacatggtgggataatggacagatttgattgtcagtatttgatggcaacttttgtacatgtgtacatcacaagttttatccggggcccaaatcccagcaaagtgctacagcagttgttggtgcttcaacctgaacagcagttaaatatatataaaaccctgaagactcatctcattgagaaaggaatcctacaacccaccttgaaggtataactggatccagagagggaaggactgacaagaaggaattattcagaaaaacactgacagatgttttataaattgtacagaaaaatagttaaaaatgcaataggttgaagttttggagatatgtttctctctgaaattactgtgaatatttaacaaacacttacttgatctatgttatgaaataagtagcaaattgccagcaaaatgtcttgtaccttttctaaagtgtattttctgatgtgaacttccttccccttacttgctaggtttcataatttaaaagagtcaaacactataaaatgagtaagttgacgatgttttaagattgcacctggcagtgtgcctttttgcacaaatatttacttttgcacttggagctgcttttaattttagcaaaatgttttatgcaaggcacaataggaagtcagttctcctgcacttcctcctcatgtagtctggagtactttctaaagggcttagttggatttaaaaaaaaaaaaaaaaaa

SEQ ID NO: 284981 - DNA, 1000 bp, Homo Sapiens
cccagtgacccaccggggtctgcagcggcagagcaattccaggctgagccatgaggagcgtggactctgctagactcctcaggagagacccctcccctcccacccacagccatagacctacagacctggctctcagaggaaaaatgggagccaggagtaagacaagtgggatttggggcctcaagaaatatactctcccagatttttactttttcccatctggctttttctgccactgaggagacagaaagcctccgctgggcttcattccggactggcagaagcattgcctggactgaccacaccaaccaggccttcatcctcctccccagctcttctcttcctagatctgcaggctacacctctggctagagccgaggggagagagggactcaagggaaaggcaagcttgaggccaagatggctgctgcctgctcatggccctcggaggtccagctgggcctcctgcctccgggcaggcaaggtttacactgcggaagccaaaggcagctaagatagaaagctggactgaccaaagactgcagaacccccaggtggcctgcgtcttttttctcttcccttcccagaccaggaaaggcttggctggtgtatgcacagggtgtggtatgagggggtggttattggactccaggcctgaccagggggcccgaacagggacttgtttagagagcctgtcaccagagcttctctgggctgaatgtatgtcagtgctataaatgccagagccaacctggacttcctgtcattttcacaatcttggggctgatgaagaagggggtggggggagtttgtgttgttgttgctgctgtttgggttgttggtctgtgtaacatccaagccagagtttttaaagccttctggatccatggggggagaagtgatatggtgaagggaagtggggagtatttgaacacagttgaattttttctaaaaagaaaaagagataaatgagctttccagaaaaaaaaaaaaaaaaaaa

SEQ ID NO: 284982 - DNA, 1000 bp, Homo Sapiens
ccctgagcaagctacgggtggtggaggagctgaagctgtcccacaaccccctgaaaagcatcccggacaatgccttccagtcctttggcagatacctggagaccctctggctggacaacaccaacctggagaagttctcagatggtgccttcctgggtgtaaccacgctgaaacacgtccatttggagaacaaccgcttgaaccagctaccctcgaacttccccttcgacagcctggagaccctcgcccttaccaataacccctggaagtgtacctgccagctccggggccttcggcggtggctggaagccaaggcctcccgcccagatgccacctgtgcctcacctgccaagttcaagggccagcacatccgtgacacggacgccttccgcagctgcaagttccccaccaagaggtccaagaaagctggccgccattaaacaggttctgacccagccagtcctggtgactggcctctgccttccaccggagagactactgaccttctcacctccgacccataccttctccccacagcctctgctgatgcacagagctgcctacacctagacacgtcctggcagggggcctcgggcactccactaccaacccagctccacccagcagtgtcctggggagaaggaaggctgagcctctccccagccttcatgccttccccaccctccagctcctcttggagaagctgttgctgagaccccccccccccccccaagtcaatcagaaccacaacaggttggtcatcaggatggccaccctcccaggatcatccttcctctgttctctttccctgccacgtggaaacaatcatcagatccttgccccaccccttgcttccagaaagggttttaaagcccatgccccaactctgccagcccccacctgccaggacgttctagcaggtcatcggtgctttgctgtccatcttcccatgctgcaatttcttcctgagatttctataaatataaatgtatgtatgtat

SEQ ID NO: 284983 - DNA, 1000 bp, Homo Sapiens; identical to SEQ ID NO: 220976

SEQ ID NO: 284984 - DNA, 1000 bp, Homo Sapiens
tctgagggcctggcttctgtcctgcacaacctccctcacagaacagggaagcagtgacagctgcagatggcagcgggcctctccccagccctgagcactgtgtcagttcctgccttttctcatcagcagaacagaatccttttcctcttttccttcctcctctttggaattttcctgggacctacagaataaagggggggatggacagggggttttcaaaaggaacatggctcactcagagctatatggttagacgtttctccccttttccctaccttccatggtcctggttggccctggctttgcctactagaaaaccaaaacttcccccctggggttttgtgcccactctctgagaagttggggctccatcaagccccattctagtcatgtgcccctttcctgtccctaacagtccacaggcaaacaaatggtacagtcataagagccatctgtcacggacccacgcccagaggaacgtgcagaaaaaagcagagctacatggctgtgggcaactataagccaaatatttggctcagaacaggtgtccatgggacaaaaaagaacgatcctccacttgaccaagaaaaaagtgattctcccagaagcacaaagcatactcttgcccctcaggtgttgcttgtgtacatcgtacccatccattcggcttcacctgcagccaacggcctggaatcgcaaagagacaccactctgggcagagcagagcagggtatggggtggggagagagggtggagggttttataaacaaacttaacagcaatattgaaaggaggtgggggattgagggagggacagagtgttggagggccagagactagtcctgagatggaaacagcaacttgtacagtggctgagaaaataggatatagttttgatttttttaattgtaaaatattttggagggagaacaaaatcttttaacattttgaataaatttagagttttataaaatagaaaaaaaaaaaaaaaaaaaaaaaa

SEQ ID NO: 284985 - DNA, 1000 bp, Homo Sapiens
atttaaggattatgctgcactgtactacaaaattgtagtacttttttttgttttcttttttaaagaaatggaaaatgtttactattacagggacctcaacactgccctcccatacaggctggataaaactgtttttaagtcagtgattttagactgacctccatttaaattatgtttatatatgaactttactctgacctgtgatcatgtttcaggaaggaatgaaagagagttctttcttaataaagaaaaacactcaaggactttgttcatttccaaagctacttgtttacattgtacactgcgaccaccttgccgcttttcatcacaagcttgaatatttaaattctgtacttatatctgtaaaatagccaggaatttcctgtttgtgatctattatgcctttttacaaaaaaaatggctgtaaattattgtaaatattaaaggaactttccttacttccttccctttctcaggctttttttgactgttcctttccctaccaactcaggccttcttattaaaaaaaaaaaaatcagtgtaataacactttttaatgatttgtcttgatggaatcattgtttagaatgtaaaaatggggaaaggggccacttaattccattagtcctctttttatactgaatattttattagatacatgttattcccttttttttccttttttagtcaatattgtgtttgtagttttaaaaaatggcgagatatgtaaaatctaaactgcatgctctggaaacacttttttcagatgcatctggtttaaaagggtaggtgtataaacacttttcagaatccaaaacggccaaaagttattgtaaatccgtttgttttcccgttttatgtgggcaataatgtcaaatgtgctatgcagccaggttaacattttagataaacttgattgacttttaatataaactgttacaatgcacactgattgtatataaaaacgttatatatgacaaattaaatttaagaaaaagga

SEQ ID NO: 284986 - DNA, 1000 bp, Homo Sapiens; identical to SEQ ID NO: 115556

SEQ ID NO: 284987 - DNA, 1000 bp, Homo Sapiens; identical to SEQ ID NO: 220979

SEQ ID NO: 284988 - DNA, 1000 bp, Homo Sapiens
gtattaaaatggagcgacgtttatttcatctcttgtttacgatttcactaggactcagaaacgagatcgggaagcagaaatatagtgcaatagtgcaacatctctgaatccttttaatctagagaaggcatttcatatttgggggctaaggtttccagtcagatgaggcaaacagcaagagtaagcagtgttacttgcaggtactttggttaatgttgatttaaattttcatgaatgtgctggtgaacactgtgaccaggcttttgtagatggcgatgtgttatagacggtgctcactcccaagggacagcaagtgagcagagatgtactgcaaagtcgccagtcactgctgcaaggtggcctctgcctggggcctccagaagctgctcctttaccctcttggtcccatggctgaagctggagcagcggattgctctggagcagccaaggccgccagcgtgtggagcagagctctcccctcctgctgggcgtgtgtgacactgatgagtttcactgtactgcatgtgacttctcccctgcccttcctcctgatggagtgtgcagacagccatgcgtggccacgggggcagtgtgaggacctccctgtctcccggctcccctcccaggggagccagctgcttgacctagctctttgggcctctcctgccctctgctctgcctggagtgtcggatcctgtgagtaggctgggcctcccctgggcagggttctccaagggcccggtttcccggcccttacctttcctgatgcccctgacatcatcattcttgtgggagacagcagcctgtatgtggtgtggggcgtggatcgagtgtagctgtgaaatccatatatatgaaatgtcctgcgggatacagtcttagctgacttttttttactctgaactcttatttgaattgttttttgtgcatatatttctgctaccacagagattgtactatacaaataaaaaaataaaaacccaaaaaaaaaaaaaaaaaa

SEQ ID NO: 284989 - DNA, 1000 bp, Homo Sapiens
aataccacagctatttagaagcatcatcacgacacatttgccttcagtcttggtaaaacattacttatttaactgattaaaaataccttctatgtattagtgtcaacttttaacttttgggcgtaagaccaaatgtagttttgtatacagagaagaaaacctcaagtaataggcattttaagtaaaagtctacctgtgtttttttctaaaaaggctgctcacaagttctatttcttgaagaataaattctacctccttgtgttgcactgaacaggttctcttcctggcatcataaggagttggtgtaatcattttaaattccactgaaaatttaacagtatccccttctcatcgaagggattgtgtatctgtgcttctaatattagttggctttcataaatcatgttgttgtgtgtatatgtatttaagatgtacatttaataatatcaaagagaagatgcctgttaatttataatgtatttgaaaattacatgttttttcatttgtaaaaatgagtcatttgtttaaacaatctttcatgtcttgtcatacaaatttataaaggtctgcactcctttatctgtaattgtaattccaaaatccaaaaagctctgaaaacaaggtttccataagcttggtgacaaaattcatttgcttgcaatctaatctgaactgaccttgaatctttttatcccatttagtgtgaatattcctttattttgctgcttgatgatgagagggagggctgctgccacagactgtggtgagggctggttaatgtagtatggtatatgcacaaaactacttttctaaaatctaaaatttcataattctgaaacaacttgccccaagggtttcagagaaaggactgtggacctctatcatctgctaagtaatttagaagatattatttgtcttaaaaaatgtgaaatgcttttatattctaatagtttttcactttgtgtattaaatggtttttaaattaaaaaaaaaaaaaaaa

SEQ ID NO: 284990 - DNA, 1000 bp, Homo Sapiens
aggcggggctgatagcccagcagcagcagcggcggcggcggctgcggagcgggtgtgaggcggctggaccgcgctgcaggcatccgcagggcgcggcaagatggaggtgacgggggtgtcggcacccacggtgaccgttttcatcagcagctccctcaacaccttccgctccgagaagcgatacagccgcagcctcaccatcgctgagttcaagtgtaaactggagttgctggtgggcagccctgcttcctgcatggaactggagctgtatggagttgacgacaagttctacagcaagctggatcaagaggatgcgctcctgggctcctaccctgtagatgacggctgccgcatccacgtcattgaccacagtggcgcccgccttggtgagtatgaggacgtgtcccgggtggagaagtacacgatctcacaagaagcctacgaccagaggcaagacacggtccgctctttcctgaagcgcagcaagctcggccggtacaacgaggaggagcgggctcagcaggaggccgaggccgcccagcgcctggccgaggagaaggcccaggccagctccatccccgtgggcagccgctgtgaggtgcgggcggcgggacaatcccctcgccggggcaccgtcatgtatgtaggtctcacagatttcaagcctggctactggattggtgtccgctatgatgagccactggggaaaaatgatggcagtgtgaatgggaaacgctacttcgaatgccaggccaagtatggcgcctttgtcaagccagcagtcgtgacggtgggggacttcccggaggaggactacgggttggacgagatatgacacctaaggaattcccctgcttcagctcctagctcagccactgactgcccctcctgtgtgtgcccatggcccttttctcctgaccccattttaattttattcattttttcctttgccattgatttttgagactcatgcattaaattcactagaaacccagaaagt

SEQ ID NO: 284991 - DNA, 1000 bp, Homo Sapiens
atgacggtgtctactcaaggtatttcacaacttatgacacgaatggtagatacagtgtaaaagtgcgggctctgggaggagttaacgcagccagacggagagtgataccccagcagagtggagcactgtacatacctggctggattgagaatgatgaaatacaatggaatccaccaagacctgaaattaataaggatgatgttcaacacaagcaagtgtgtttcagcagaacatcctcgggaggctcatttgtggcttctgatgtcccaaatgctcccatacctgatctcttcccacctggccaaatcaccgacctgaaggcggaaattcacgggggcagtctcattaatctgacttggacagctcctggggatgattatgaccatggaacagctcacaagtatatcattcgaataagtacaagtattcttgatctcagagacaagttcaatgaatctcttcaagtgaatactactgctctcatcccaaaggaagccaactctgaggaagtctttttgtttaaaccagaaaacattacttttgaaaatggcacagatcttttcattgctattcaggctgttgataaggtcgatctgaaatcagaaatatccaacattgcacgagtatctttgtttattcctccacagactccgccagagacacctagtcctgatgaaacgtctgctccttgtcctaatattcatatcaacagcaccattcctggcattcacattttaaaaattatgtggaagtggataggagaactgcagctgtcaatagcctagggctgaatttttgtcagataaataaaataaatcattcatcctttttttgattataaaattttctaaaatgtattttagacttcctgtagggggcgatatactaaatgtatatagtacatttatactaaatgtattcctgtagggggcgatatactaaatgtattttagacttcctgtagggggcgataaaataaaatgctaaacaactgggtaaa

SEQ ID NO: 284992 - DNA, 1000 bp, Homo Sapiens; identical to SEQ ID NO: 220980

SEQ ID NO: 284993 - DNA, 1000 bp, Homo Sapiens; identical to SEQ ID NO: 115559

SEQ ID NO: 284994 - DNA, 1000 bp, Homo Sapiens; identical to SEQ ID NO: 220981

SEQ ID NO: 284995 - DNA, 1000 bp, Homo Sapiens
aaccacaatgatctgattttctttcttctttctttttttctaattgagaggattattcccagtaagcttccatgaccctttcttggaggccttcacaggtaatacagatactggcactgattgtaattaaaatgagagaaaactctagcgcatcttctggcacggttttaacaacgtgtttgtgttgaatttcctttttatgcatcaaacgaaggccatattgtccataaatgctcagtgctcaggatctcattaatatgccgaacctaactacagatgactttttaatattgtaaaatattttctgctttttgacttgcatctgagagtttcttgtttcagtaaaaaaagaaaagacaaaaaaatcagctttggaaagtaatttaaatgtaccttattttttttttctttatgttttctttcattgggcaacagctaagagggcccagcaaggtaatttatggttgagctgatgtcaattggttcttgtcttgagtcgactcaatttagcccaagtgctgaaacaagaaatgtcatttttttcatcaaagacaccagggcagatttttaagtaaagaaagacaattggacccttaagaatttatgcatttgtaaagttgctgttgatccaaatattttcaagccatgtaatccattggttttgtgggcagtttaataaacctgaacctttgtgtgttttctaattgtacctgagttgaccatcctttctttttatagtatatttcttgtatgatattttgtaaagctctcacctggttcttttatggggacttttcgtttttgggcaactccagtgtatttatgtgaaactttataagagaattaatttttccatttgcatattaatatgttcctccacacatgtaaaggcacagtggctccgtgtgttaaaaaacagctgtattttatgtatgctttactgataagtgtgccaataataaactgtgttaatgaccaaaaaaaaaaaaaaaaaaaaaaa

SEQ ID NO: 284996 - DNA, 1000 bp, Homo Sapiens; identical to SEQ ID NO: 115560

SEQ ID NO: 284997 - DNA, 1000 bp, Homo Sapiens; identical to SEQ ID NO: 115561

SEQ ID NO: 284998 - DNA, 1000 bp, Homo Sapiens
tgcctccccttcactcccaccgcaggatttgggctcttggaatcctggggaacatagaactcatgacggaagagttgagacctaacgagaaatagaaatggggaactactgctggcagtggaactaagaaagcccttaggaagaatttttatatccactaaaatcaaacaattcagggagtgggctaagcacgggccatatgaataacatggtgtgcttcttaaaatagccataaaggggagggactcatcatttccatttacccttcttttctgactatttttcagaatctctcttcttttcaagttgggtgatatgttggtagattctaatggctttattgcagcgattaataacaggcaaaaggaagcagggttggtttcccttctttttgttcttcatctaagccttctggttttatgggtcagagttccgactgccatcttggacttgtcagcaaaaaaaaaaaataataataataataaggcctgctgtgtaagctgacagtatttgtagctgatagggggttgggaggaaagtgtctactaggagggtggggtgagattctgtgttgatgtaggaggccgagaaggcccttaactcaaagtagcttatttatccaaaatgttctggatgcatcatctccaaccaaggaccccttatttatcatgcctttgttctcttttccctcagatgtatatttctttaaaaataattttcctaataacaaaacttatttctaaaacagcttaaaaattcaaagaaaaaccccaaacactgacattacctacacttccactacccaaagacaaaatgtgcccactgtgtgcttttgagtgtattttcttttagtttgttttttgttgggtgcatatttatgataataacaatgatggacttcaattgtactcactgttctattgttggttttaattagcagcaagttgtgatcactttcccaggtgaataaatcatttcaaagcattaaaaaaaaaaaaaa

SEQ ID NO: 284999 - DNA, 1000 bp, Homo Sapiens
tcctgagtagctggaactacatgcgcgtgccaccacgcacagctaatttttataattttagtagagatggggtttcactgcgttggccaggatgatctcgatctcttgaccttgggatccacccgccttggcctcccaaagtgctgggattacaggtgtgagccaccatgcctggccctaatttttgtgtttttattagaaacagagtttcaccatgttggccaggctggagaattgctgtaatagttttccaactggcccctgtccttcctctctcttgctctcctcccatctcatctgcacctagcagccagagtgatcctgatactctcggcctttacttccgcctccctcagagcagcagcctgtcaaaacaccagattacaacaaatttagtttaaaggtctcaattagcgttattggcaattctagaatcaggcaacagactcattgaatcaggaacagattcactccataaaatacagagagtgctgcaatgagctgggtagaagaggttagttttatagacaggaaggggctgtcaaaggcagaaagaaatgaagaacaaaaaaaaagattgatttttttttttttgagacaggatctcactctgtcatccaggctgaagtccaatcccacaatcatggctcactgcagccaccacctcctgagctcaagtgatcctcccatctaagcccccaagtagctaggactacaggagcacaccaccacacctggctaatttttgtattttttgtggagacagggtctcagtatgttacccaggttggactggaaacccttggctcaagcaatttgcctgcctcagcctcccaaagtgctgggattacaggcgtgagccactgcacagggccagattcatcatttcaaagttactttctatatgcggccggaacagggtggttgacatcagttttcttcaggttactttttaataatgattaaaacggggaacttcattatcaaaaaaaaaaaaaaa

SEQ ID NO: 285000 - DNA, 1000 bp, Homo Sapiens
gctgccctcgctatgacaggaaagatgggtggcaagggggcaaaaggcggcaaacttgctcacctccgggcccggctcaaagaactggccgcgctggaggcggctgcaaagcagcaagagttggtggaacaggccaagagctcgcaagacgtcaagggagaggaaggctccgccgccccagaccagcacacgcacccaaaggaggccgccaccgacccacccgcgccccggacgccccccgagcccccggggtctccaccgagctctccaccgcctgcctcccttgggaggccggagggagaggaggaggggccggccgagcccgaagagcactcggtgaggatctgcatgagcccgggcccggagccgggagagcagatcctgtcggtgaagatgccggaggaaagggaggagaaggcggagtaaggtggggtgaggcggatcccgcgcgcagttccagcaggtgtgtccccagcgcccgctgcgcccctcgccccagcgccccaccttcccccacggctcaagagaagatgcttttccgtagtcgtgacctcagtggctgcagctctgaccgtcccgccagcacgccagccccgactcagctcctcgcggggctgggcctgagctcgacaagttgcatcaagtgttcgagtccctgagctctcactatcatttgagagccctaccttttcctgactgttcctctttttaagaacaaaatgattttccacttttaaagttcatgggtgagggataaaatgaggctccaatacatgggaagctttgctgaaaaagtaaagtgttattgaatgtgtggggtttcccctcaggaatttgtctaacacatttcaaggatagaaaatacttcactgccgggcatggtggctcatgcctataatcccagtgctttgggaagccgaagcaggaggatcactggaggccaagagttggagagcagactgggcaacatagcgagacctcatctcaaaccggaattcgg

SEQ ID NO: 285001 - DNA, 1000 bp, Homo Sapiens
aaagattatttagtcacctttctcctgtccaacttcaccaccacctgataatgggtatataacaggaagctgaaggtacaacatagtgactaaaattcagacttacacaagacagtttgaggcatatttcttaatctggtatcacctcgtgtgttctttggggccctagaaaccctggcttttgggagtgctatggcaagtagaagttctgccggatggaaagaggctgccccatttgaggtcatttaaaatctgtgaagcaaatccagactccttgccgttcagccactgtgaaaccagaatctgcttcacagaaaaaagcatctcagttaggagaagagacatcccctccttctcacttgccaaagagattcaaagacagcccctatcctccattcttgagtcagggccctaggtgacctattctaactcaaggaggagagctatgtacagggagagcattttagattgaaggttggaatggtgtactaaaccaaaaaagctgacaactgagagttttagaagattagaccattaggaacgtatctttgcaaactgcccattcacccatgaagaggaagcctcaagatcccttggaattgcatcccaaggcaaagcttttggctcaccgaaagctcacagattgcagaaattagcttttttaaaaaacaaaccccagtaaatataatttcattaacattttataacagatttatatttttgagttccgtgattgcaaattatgacctcaaattccatccttcacttatgtaacatgttgcaaattacccaaagatgagtctttcttctttctttcctttttcctttcttcttcctttccttttttctttcttcttccttctttcttcctttttctctctcctcttttcctcctcaaaatgtatatattttaaaagccttaactgttagttatgcctgcattcatatttgcacaggaaaaataaagacctggatttaaaaataaaaaaaaaaaaaaaaa

SEQ ID NO: 285002 - DNA, 1000 bp, Homo Sapiens; identical to SEQ ID NO: 115562

SEQ ID NO: 285003 - DNA, 1000 bp, Homo Sapiens; identical to SEQ ID NO: 115564

SEQ ID NO: 285004 - DNA, 1000 bp, Homo Sapiens
gtagtgtttatgtctgagcttattgtgtttgagctaacaccaggttactcagtaaccatgacctgctcctccatttccatttattctcaacattaaatagttttatcttgttgttgccagaaatgcacttgtgccaggtattgtccctgctgtatgaaaagcttcttggcaatgaattctgtaatagtgccctacattatggttttctggtggaattgttttaacagtgacaacccaggatttccaatatatttttgttttattgttattaccaaaaattccactatgattgatgttcagtgattttctatagcaacttttttggtaactctttgggtttctgatttgttttagctaaaattttggggatatgatttgggtctttgattaatgtcagctgaacttggatttctagttcatgaagaaatctctcccaatacccatttatcctatttttagcaataattcgttaatgattccacttgattttcagaatattgtcctggttgattttgatttgacagcatacattatgaaatttgaaagtaggttaccattttgaggcagttggatataaattatgtaaatatgtatgattatgatttttataaatggcataacatgagtgtactaactaccttctatgctggccatgctacagattttctggaggtatgacaatagtatttttttatgctcagattaaaaatcagcttttcacctctccagtttttccaagtgatactcccagttctagagcaatctacagctgtttatgtgaggtgcccaacacccattcatctcaagtgcttcagtctttggtttatttcatgcactgtgccttcaaaatgaaatttttaaaagggactttaaatgaagttgaatagtagtttttaaaagtcaatttgtaatttatgtgaaatctaactgtaatgaggtcctttctgttttttatatgtaaacagatctactaatcctgtataaaagttattttacgatg

SEQ ID NO: 285005 - DNA, 1000 bp, Homo Sapiens; identical to SEQ ID NO: 115565

SEQ ID NO: 285006 - DNA, 1000 bp, Homo Sapiens; identical to SEQ ID NO: 115567

SEQ ID NO: 285007 - DNA, 1000 bp, Homo Sapiens; identical to SEQ ID NO: 115569

SEQ ID NO: 285008 - DNA, 1000 bp, Homo Sapiens; identical to SEQ ID NO: 220985

SEQ ID NO: 285009 - DNA, 627 bp, Homo Sapiens
gcggccgcaagctcggcactcacggctctgagggctccgacggcactgacggccatggcgcgttcgaacctcccgctggcgctgggcctggccctggtcgcattctgcctcctggcgctgccacgcgacgcccgggcccggccgcaggagcgcatggtcggagaactccgggacctgtcgcccgacgacccgcaggtgcagaaggcggcgcaggcggccgtggccagctacaacatgggcagcaacagcatctactacttccgagacacgcacatcatcaaggcgcagagccagctggtggccggcatcaagtacttcctgacgatggagatggggagcacagactgccgcaagaccagggtcactggagaccacgtcgacctcaccacttgccccctggcagcaggggcgcagcaggagaagctgcgctgtgactttgaggtccttgtggttccctggcagaactcctctcagctcctaaagcacaactgtgtgcagatgtgataagtccccgagggcgaaggccattgggtttggggccatggtggagggcacttcaggtccgtgggccgtatctgtcacaataaatggccagtgctgcttcttgcaaaaaaaaaaaaaaaaaaa

SEQ ID NO: 285010 - DNA, 1000 bp, Homo Sapiens
gatgctccgaatgatccacggggaggcactttactttctgtaactggagaggtagagcctagaggttacttgggaccacctcatcagggtccacccatgcaccatgtccctggccatgagagccgaggaccacccccacatgaactgaggggagggccattacccgagcccagacctctaatggcagaaccaagaggacccatgctagatcagaggggtccacccttggatggcagaggtggaagggatccccgaggaatagatgcacgagggatggaggcccgagccatggaggcaagagggttagatgccagaggattagaggcccgtgcaatggaggcccgtgcgatggaagctcgtgcaatggaggcccgagcgatggaggcccgtgcaatggaagtccgagggatggaggccagaggcatggataccagaggcccagtgcctggccccagaggacctatacctagtggaatgcagggtcccagtccaattaacatgggggcggttgtcccccagggatccagacaggtcccagtcatgcagggaacaggaatgcaaggagcaagtatacagggtggaagccagcctggcggctttagtcccgggcagaaccaagtcactccacaggatcatgagaaggctgctttgattatgcaggttctacaactgactgcagaccagattgccatgttgcctcctgagcaaaggcagagtatcctgattttaaaggaacaaatacagaaatccactggagcaccttgataggttttcaaaaatacctggcaagaaatctggaaattctataattttgttgaaatattgaaaaaagatgacctgcatcctaacccttgaatgactcaaatcagtgccaggtggaggactcccatcaccttctctcagaacaaaatcacttcattttattgtcttagtttgtatattttctgtgacttgaaataaactttgaacacaattttagtacactgcaaaaaaaaaaaaa

SEQ ID NO: 285011 - DNA, 1000 bp, Homo Sapiens; identical to SEQ ID NO: 115573

SEQ ID NO: 285012 - DNA, 1000 bp, Homo Sapiens
ttccgtctctccttccgcttctttgtctttctctgccgctgtcggtgtctgtctgtctgctcttagctgtctccattgcctcggccttctttgctttttgtgggggagaggggaggggacgggcagggtctctgtcgcccaggctggggtgcagtggcgcgatcccagcactgcagcctcaacctcctgggctcaagccatccttccgcctcagcttccccagcagctgggactacaggcacgcgccaccacagccggctaattttttatttaattttttgtagagacgaggtttcgccatgttgcccaggctggtcttgaactccggggctcaagcgatcctcccgcttcagcctccctaagtgctgggattgcaggcgtgagccactttcccagcctctctttgctttgcctgccccgttctcttaactcttggaccctcctcgtctgcatggtaactccgtctgagtctaccattttcttgctctccctccttccttgggcctgcctcagttccctttggcctccccctttacccagctcttggggtgtctctgttttttccatccccacttcctgccttctcgtggccctgtgtgagcacatgtgtacatctcagccttatctcaaggaggtgacaccttctctccttgtccccatctggccgtctctctgtgcttccctggccaggggcgtgcctgctggtcctatggggggaaggctactccgcatctcagccaccttcctcaggctcactccacctacatccccagtctgccacaccccatccctttgggcctcagccctgtccctttgatgtcctcctttccttcagcccctctgccctgtccctgcacacctccactgcctcccagcagatctgtggagacaaaacaagcaacaccttaaaagagttttatttctgaaaataaattaattttttgtaaataaaatgtttaaaaataaaaaagaaactaaagttaaaaaaaaaaaaaaaaaa

SEQ ID NO: 285013 - DNA, 1000 bp, Homo Sapiens; identical to SEQ ID NO: 115574

SEQ ID NO: 285014 - DNA, 1000 bp, Homo Sapiens; identical to SEQ ID NO: 220986

SEQ ID NO: 285015 - DNA, 1000 bp, Homo Sapiens; identical to SEQ ID NO: 115575

SEQ ID NO: 285016 - DNA, 1000 bp, Homo Sapiens; identical to SEQ ID NO: 115576

SEQ ID NO: 285017 - DNA, 1000 bp, Homo Sapiens
aacaagatcaatgaaccaccaaagccagctcccagacaagtttccctgccagttaccaaatctactgacaatgcatttgagaaccctttctttaaagattcttttggttcatcacaagcctctgtggcttcttctcaacctgtatcttctgagatgtatagggatccatttggaaatccttttgcctaaattctgaacttggtctgcagaccatccagaggaataaaaaggttggccttagtagtcaaaaacaaagctgatagccagacacgttctgatttctgcccttgttccagctttgacgtattatctgttgccttatttctcattgcctcttctacttgtaaaatgcttttcactttctgtctaggttaaagctaaactgaatctatggctttaaataaattaagatcctaaactctctagcttaagtgtaaatgaagtacagtagtttccctactgaaccctacctcttgtgtccctggaaccttctagaacacctgccttctaccctctggttgggagatgcagccaccacatcccttcatatcatactgttttgaataaattttcaaatccttattgttcagagttgtttgggggttctgtttcagagcataaaacctaaaggttatagtagaacaaggcaccttcttaaaagaaatcttgcttcagaccatcagttacagagaatttcctaaagtaaaattgaagcaactacaacttctccttagacactttggaatctaaccacttaaggacctttttaaagagatagcttctcttctttctgaagatcaatttctcccaaggccaagattgtccttttctcccatttcttgctagctattgcaaatgagggaagaacattattcatctctcctccccttttttttctgattcttttttcagtcagttttgctcctgggttcaagtagtattaccaccctttcacaagcaacagactctcacagggcaaaaaaaaaaaaaaaaaaaaaaa

SEQ ID NO: 285018 - DNA, 1000 bp, Homo Sapiens
caggtgctgccctggcagcaccagagtgtgggccgggcccgagtgtctgcccctcggccctcagggtggggcacttagcacccagaagggaccaaaagcagggcatggcggtgcagaggagtttgggaggtgtaaacagcccatgcacgtggaggaggagctggctttcagccccagaccccacgctagcactttccacgctgcttgcccgctgttgatgtgcagttcccagtgcctgtgtgagccgacatctgctcagtcctatccctcgtcagcgtgtggagacccagctcctgcagccctcctgctcccacgcccccagacagcttggtggagggtcctgcatctgggccaggctggggtgcacccagccaaagacaaagctgcctccacgtgcccaaggattcagatggtgcactggccccgggaggagtctgaccaaaaatggagcccgctctgtggggaagccccgactcccccacgagaaacggtcccacggtgcggatctcccccttcccttgtggggcacagctggcctgggcctccaatcctgcggagctttcctgggtgtggctttgacctcagaagtggctctggtttggcctcaggagtgtggcctggcccagcctgctgcagcctcctggggggcccttgatgccactaatcccccgaccccccgcatctgccaaactgcacagacacacgcattgtaaggccgcttgtggcctccagcgtgcactcttgtttacgtcattgtcatcttcaagaccagtcctttgtgattagttttgcttcgcgagccctggtgtggactgtggtctgtatgaatcgtgtgtaactgtggtgaggggcttgtcctgtatgtgagtctgtacccaggtggggtctgtgccctgcacaccgggcccctctgtatttatcgctgcctgaatgcaacagtaatttatatccaggacaaatacagtctgggcgtcactatcctaaaaaaaaaaaaaaaaaa

SEQ ID NO: 285019 - DNA, 1000 bp, Homo Sapiens
taaaggaaaagtatgatacagatttttatattcttgataaatatccattggctgtaagacctttctataccatgcctgacccaagaaatcccaaacagtccaactcttacgatatgttcatgagaggagaagaaatattgtcaggagctcaaagaatacatgatcctcaactgctaacagagagagctttacatcatggaattgatttggagaaaattaaggcttacattgattccttccgctttggagcccctcctcatgctggtggaggcattggattggaacgagttactatgctgtttctgggattgcataatgttcgtcagacctccatgttccctcgtgatcccaaacgactcactccttaaattcacactttgccacttaactccagtgtggatgacagagcgagaccctgcctcaaaaaaaaaaaaaaaaaaagaaagccacacttattcttttcagtaacctgctagtgcacaggctgtactttaggtacttaaaatatgcactagaataaatttgcaaggccctaaaatatcactgttatttttggagtaattcagtataggttcgtttaaaagagatttttataacttcagacatgcatcagtaggaaataacttgagaaattcatatggttatgttacaaattcatattctgttactacagtaaacgttaagagttttaaacagttaagattgtacaatttttcttcttttctatattacaagggccccagtgttaatgtcttagattttcagtatttgaacttatttttttaaattctgtcattgagataagaataattcaggtagcatctgaaattttaatgaatgtataattggcatatcatggaaaattaaccagaaagtatcagttcttaaaagttatgcctagaaattatgtaaagctaaactactggttagaaagtattcagtgtaatattgtattaatttgttaaattctaaacttgaatttcaataaaattttaaagct

SEQ ID NO: 285020 - DNA, 1000 bp, Homo Sapiens; identical to SEQ ID NO: 220988

SEQ ID NO: 285021 - DNA, 1000 bp, Homo Sapiens
aagattgcagatggcagtgtgaagagagaagacatattctacacttcaaagctttggtgcaattcccatcgaccagagttggtccgaccagccttggaaaggtcactgaaaaatcttcaattggattatgttgacctctaccttattcattttccagtgtctgtaaagccaggtgaggaagtgatcccaaaagatgaaaatggaaaaatactatttgacacagtggatctctgtgccacatgggaggccgtggagaagtgtaaagatgcaggattggccaagtccatcggggtgtccaacttcaaccgcaggcagctggagatgatcctcaacaagccagggctcaagtacaagcctgtctgcaaccaggtggaatgtcatccttacttcaaccagagaaaactgctggatttctgcaagtcaaaagacattgttctggttgcctatagtgctctgggatcccaccgagaagaaccatgggtggacccgaactccccggtgctcttggaggacccagtcctttgtgccttggcaaaaaagcacaagcgaaccccagccctgattgccctgcgctaccagctacagcgtggggttgtggtcctggccaagagctacaatgagcagcgcatcagacagaacgtgcaggtgtttgaattccagttgacttcagaggagatgaaagccatagatggcctaaacagaaatgtgcgatatttgacccttgatatttttgctggcccccctaattatccattttctgatgaatattaacatggagggcattgcatgaggtctgccagaaggccctgcgtgtggatggtgacacagaggatggctctatgctggtgactggacacatcgcctctggttaaatctctcctgcttggtgatttcagcaagctacagcaaagcccattggccagaaaggaaagacaataattttgttttttcattttgaaaaaattaaatgctctctcctaaagattcttcacctaaaaaa

SEQ ID NO: 285022 - DNA, 666 bp, Homo Sapiens
gatcccggtgccagggaccctgcccagttccaggcgtcgcctaacccagaaacgactgggcgccgcgtcctggaaaggccccagcgcacggacatctgaggagctgtttccgttcctctgcccgccatgccgttcctggagctggacacgaatttgcccgccaaccgagtgcccgcggggctggagaaacgactctgcgccgccgctgcctccatcctgggcaaacctgcggaccgcgtgaacgtgacggtacggccgggcctggccatggcgctgagcgggtccaccgagccctgcgcgcagctgtccatctcctccatcggcgtagtgggcaccgcggaggacaaccgcagccacagcgcccacttctttgagtttctcaccaaggagctagccctgggccaggaccggatacttatccgctttttccccttggagtcctggcagattggcaagatagggacggtcatgacttttttatgattgggcacggagggatccagggcatctgtgaactggctgcttcttccagagagatctcttggcagagtgagggcctggagataaccagctttggattatcccgcatgcaacattcctgtgatcacataatcctcttcttcatcctcatatgaaataaatgaagagagcttcctcattcaaaaa

SEQ ID NO: 285023 - DNA, 1000 bp, Homo Sapiens; identical to SEQ ID NO: 115579

SEQ ID NO: 285024 - DNA, 1000 bp, Homo Sapiens
gcccacatagatggagatcatctgacactgctgaacgtctaccatgcttttaaacaaaatcatgaatcggttcagtggtgttatgacaacttcattaactacaggtccctgatgtccgcagacaatgtacgccagcagctatctcgaattatggacagatttaatttgcctcgtcgaagtactgactttacaagcagggactattatattaatataagaaaagctttggttactgggtattttatgcaggtggcacatttagaacgaacagggcattacttaactgtgaaagataaccaggtggttcagttgcatccctctactgttcttgaccacaaacctgaatgggtgctttataatgagtttgttctaacaacaaagaattacatccggacatgtacagatatcaagccagaatggttggtgaaaattgcccctcaatattatgacatgagcaatttcccacagtgtgaagcaaagagacagttggaccgcatcattgccaaacttcaatccaaggaatattcacagtactgaattcagtgcttagaactgaagttattgagaggacagctttaaaagatgaatgaactcaaaagttcgagttgtgctcttcacgttggttcgataatggcctttatttgaaagctttttaatttttctttacagtaaatattccattctgatttcataaattaaacatttatgcctcccttttgtgttgacactgtagctcatactggaaaagtcgatcaatgttttgcagtttattgaaagtagttctatatataacaatgttataagcatttctttagaaatggttgaaaatgcttctaaaatgtgattatcgaccatggtatgcatgatcgttgtaattgttgacattccttttagaagttgtgaaatgttacaacttgtgcttatgtagacacaatcttctgtctcagtacagaggcactgacttcaataaagtctatttatactaattttggccaaaaaa

SEQ ID NO: 285025 - DNA, 1000 bp, Homo Sapiens
agctttgcaatctaaattcttttcacctcttcaaaaagcgatgctaccacctaatagttttcaaggaaaagtggcattcattactgggggaggtactggccttggtaaaggaatgacaactcttctgtccagcctaggtgctcagtgcgtgatagccagccggaagatggatgttttgaaagctaccgcagaacaaatttcttctcaaactggaaataaggttcatgcaattcagtgtgatgtgagggatcctgatatggttcaaaacactgtgtcagaactgatcaaagttgcaggacatcctaatattgtgataaacaatgcagcagggaattttatttctcctactgaaagactttctcctaatgcttggaaaaccataactgacatagttctaaatggcacagccttcgtgacactagaaattggaaaacaactaattaaagcacagaaaggagcagcatttctttctattactactatctatgctgagactggttcaggttttgtagtaccaagtgcttctgccaaagcaggtgtggaagccatgagcaagtctcttgcagctgaatggggtaaatatggaatgcgattcaatgtgattcaaccagggcctataaaaaccaaaggtgcctttagccgtctggacccaactggaacatttgagaaagaaatgattggcagaattccctgtggtcgcctggggactgtagaagaactcgcaaatcttgctgctttcctttgtagtgattatgcttcttggattaatggagcagtcattaaatttgacggtggagaggaagtacttatttcaggggaattcaacgacctgagaaaggtcaccaaggagcagtgggacaccatagaagaactcatcaggaagacaaaaggttcctaagaccactttggccttcatcttggttacagaaaagggaatagaaatgaaacaaattatctctcatcttttgactatttcaagtctaataaattcttaattaac

SEQ ID NO: 285026 - DNA, 1000 bp, Homo Sapiens
cttcgagccttcgaagcccacgtgcaagcgcctcaaaccaagtcacgcttggcgaggccccagtgacactgatgtgctgagccaccatttcagactgagtctgcaccctcagccacatgaacaatctcccctacctccctgggactctgcttctgtaactgtctcattcacacctgcctggctcactggaaatcctcttttgagcgcgggatatggcttgcccttgtccgtgtgcccccaggactttgcctctacagcattttcttacaccccctccccagcgtgccctcagccaagtgctttggcccggtgcttcccgcagctgcacagagaccttggccacgcccgcgcgccctgagcgcagctgggttccaggagactctcagctcagctgagctagttgcctggcacccacctgtcgcgcgcggagagggggttccctgttgcttttgtgtctgtttcctgtccctggtaggggaagtgatgtcgtggatggggaggggtgggcagggtagtttcccccgcttgttttgggtgcacaggagccccactgctgatgacgaactatctctaactggtcttgaccacgagctagttctgaattgcaggggcctcaaagcagcacctaaaccttgagggggagggtgctctgggtttccgtgaggtaaccaccttaaatgggagggaagttggggtgtctgctttgggaccagaggaagatagcttgagaggcattggcgaggttcgcagcgccccagggagagagaaaaagctgagactcctggggaatgacgttggggtgatggagtccggggaaagagaggtggggggagagcctgaggtccccaagtgaggggagtcctaggcagagctgctgattgtggggctgggaggtggagggcccctgattcgaaggccatttggtgagtgttttgctggaaatatttcctgtatataaacttctttcaatctacaataataaaggcttgaggtaaactgc

SEQ ID NO: 285027 - DNA, 1000 bp, Homo Sapiens; identical to SEQ ID NO: 115580

SEQ ID NO: 285028 - DNA, 1000 bp, Homo Sapiens; identical to SEQ ID NO: 220991

SEQ ID NO: 285029 - DNA, 1000 bp, Homo Sapiens
aacattcaacccaaagagagtggaggtggtgtgggagagacccgggaggctattgtttatagattatctgaagatatgctgagtaaactccctcctgattacattcctcatgaggtgaaatctcgtttgataaagatgggccatcttaattcaatgaacatatttcttagacaagaaattgacagaatgcaaagagtcatttcagtactccgcagtagcctgagtgatctaaaattggccattgaaggaacaatcattatgagtgagaatctgagagatgctctggacaacatgtatgatgctcgtatacctcagctctggaaaagagtgtcttgggattcgtccacactgggcttctggttcactgaacttttggaaagaaatgctcagttttctacgtggatatttgaagggaggcctaatgtgttttggatgactggtttctttaatccccaaggcttcctcacagcaatgaggcaagaagtgacccgtgcccacaaaggctgggcactggacactgtgaccatccacaatgaagttctgagacagaccaaggaggagatcacgtcaccccctggggaaggtgtgtatatttatgggctctacatggatggagcagcctgggacagacggaatgggaagctcatggaatccacccccaaggtactcttcacgcagttacccgtgctccacatctttgccattaactccacggcacccaaggaccccaagctgtatgtgtgtcctatttacaagaaacccaggcgaactgatttgaccttcatcactgtggtatatttacgaacagtgttgtccccggatcactggatcctgagaggagtggcccttttgtgtgacatcaagtaagttcatttccatctgctcagggcaccagaacccacatagacagcctgtgctattgagggactcagtgatgtgtgtgtcttttctccccagtaattccttaattactctttctacattaaaaagttgatgttct

SEQ ID NO: 285030 - DNA, 1000 bp, Homo Sapiens; identical to SEQ ID NO: 115581

SEQ ID NO: 285031 - DNA, 1000 bp, Homo Sapiens; identical to SEQ ID NO: 220992

SEQ ID NO: 285032 - DNA, 1000 bp, Homo Sapiens
ccagacgctgagccacctcaagcgcaccgtggagaatatcaaggatcctttgttcaggttctttgagagagaagtgaagatgggcgcaaagctgcttcaggacgttcgccaggaccttgcagatgtcgtccaggtgtgcgaaggaaagaagaagcagaccaactacttgcgcacgctgatcaacgagctagtgaaagggatcttgcctcggagctggtcccactacacggtgcctgccggcatgaccgtcatccagtgggtgtccgacttcagcgagaggatcaaacagctgcagaacatctcactggcagctgcatctggtggcgccaaggagctaaagaacatccacgtgtgcctgggtggcctgttcgtgcctgaggcgtacatcactgccaccaggcagtatgtggcccaggccaacagctggtccctggaggagctctgcctggaagtcaacgtcaccacctcacagggcgccacccttgacgcttgcagcttcggagtcacgggtttgaaacttcaaggggccacgtgcaacaacaacaagctgtcactgtccaatgccatctcaaccgcccttcccctgacgcagctgcgctgggtcaagcagacaaacaccgagaagaaggccagtgtggtaaccttacctgtctacctgaacttcacccgtgcagacctcatcttcaccgtggacttcgaaattgctacaaaggaggatcctcgcagcttctacgagcggggtgtcgcagtcttgtgcacagagtaaacttttctagctgcccctttctgtaatagtgaaagttggtatttaacatttattcatttttaaaatatttggaaggtctgagcttgtgaaaagaaagtggttggtctgaggttggaggaagctgaatggaatctgacggttgggagtggtggaaattggaaggataccaggaggtatttgggaaggccaatggcgtggctcctttgaggaaataaaacactaagcatgagccgg

SEQ ID NO: 285033 - DNA, 1000 bp, Homo Sapiens; identical to SEQ ID NO: 220993

SEQ ID NO: 285034 - DNA, 1000 bp, Homo Sapiens; identical to SEQ ID NO: 220994

SEQ ID NO: 285035 - DNA, 1000 bp, Homo Sapiens
tggggccctggacggtgaaccacggccaggaccgccgtccccacgccccgggccggcccgcgcgggggaaggtgcaggaggggtccgcgcgtcccccttcggccgtggcttgcgaggactgcagctgcagggacgagaaggtggcgccgctggctccttgacgcgctcccgggcctcagggtcctgccctccggaggagcagcctcgaggctggtggttttcagagcaggaggccgacgttttctccgcattggaagagcccgccgtctgcaggggcctggaggaatcactggggatggtggcacaggcactgaacaggctggggccttttgacggccttcttggtttcagccaaggggctgcgctagcagcccttgtgtgtgccctgggccaggcaggcgatccccgcttccccttgccacggtttatcctcttggtgtctggtttctgtccccggggcattgggttcaaggaatccatcctgcaaaggcccttgtcattgccttcgctccatgtttttggggacactgacaaagtcatcccctctcaggagagtgtgcaactggccagccaatttcccggagccatcaccctcacccactctggtggccacttcattccagcagctgcaccccagcgtcaggcctacctcaagttcttggaccagtttgcagagtgaaagatcaagaaatgtctctgctcctacatccagctcctctaggggcagcctccgtcatccatgccctcccaggaccctccactcactgctgtgagtgcgcctcaccagaaccagttaagagacaactatcaattcttgagacccaaattataagggccctgccctgtactgaagaaaaggggagcacaaggccttaatggacattgacttgtgaaaacgcaaacatgaatatggttggagagccctggattaggagggtgacatggggaaggcagaggctggcaccatggtgactgccacataataaagtggtgatttgga

SEQ ID NO: 285036 - DNA, 1000 bp, Homo Sapiens
cctgccagaaagctcttgggaaggatgattttaccaagatccccaatggggtgaatggtgttgaagatcggatgtccgtaatatgggaaaaaggcgtgcatagtggtaaaatggatgaaaacagatttgtggcagttaccagcacaaatgcagccaaaatttttaatctctatccaagaaaaggaagaatagctgtaggatcagatgctgacattgttatttgggacccaaaaggcacaaggactatctcagcaaaaactcatcatcaggctgttaacttcaacattttcgagggcatggtttgccacggggtgccccttgtgactatttcaagaggcaaagtggtatatgaagccggagtgttcagtgtcacggcaggagatgggaagtttattcctcgaaaaccatttgctgaatatatttacaaacgaataaagcagcgagaccggacttgcacacctacccctgtggagcgtgcaccctataagggagaagtcgccacactgaaatccagagtgacaaaagaagatgccacagcagggaccaggaaacaggcccacccctgaagtgtgtgccatcggtaaaaaaaatcagaggaaaggaggctgccattcccttcacagccaaacattgtcaacccatggagaagcaggccttattcaactccctaggatcctttagaaaaaattcaccactataggcttctttgattttctttcagaagcaattgctgtctttctcactgtgtttttgttgctgcataagattgaaggtataaatttatattattgtgatggaaaggctgtgtggaaattcattgatgatactttaaaatgtcatctttgcttgtactagatttcttacttagaatttttaaaaatcattttcttgtttaaatagtttctttttttaaaaaaatggttacattagttttaaaatagctctgtgattttactttttattgtaattaataaacattgagatcttcattttatacctt

SEQ ID NO: 285037 - DNA, 1000 bp, Homo Sapiens; identical to SEQ ID NO: 115582

SEQ ID NO: 285038 - DNA, 1000 bp, Homo Sapiens; identical to SEQ ID NO: 115583

SEQ ID NO: 285039 - DNA, 1000 bp, Homo Sapiens; identical to SEQ ID NO: 223714

SEQ ID NO: 285040 - DNA, 1000 bp, Homo Sapiens
aattccaagttttcctttgctgtttataaactttactcatgtatttgtagtagctgcatttgtcattaataagagagacataatcctcctgttatactcagtatcattatatgctagtcaacctgattcactaacacacagatgaacaaccaaaatatacctaaaaggtatagtctctaggagttttattaatagtaaaggtaaaatctctcagtttcctacctctagaaagaggccatctcactagaataggatattatgcatactgagctagaccagaagagtctggaacaaaataaacacagcctttataatcaacttgaatactggtgttagctgagaactctgtaagtccctttaaaaattatgtatcttttggttcaagattaagaagcataatgacaacaaaaaaagcaggcagaatttatgaataagtgttgtttattattaaaacaataatttgttaatttcttataaggtcctgtgctataattactggtataaatataactgaatattggggtagctttcatttcttccattaattacatgtgtaaaattaaaacactactgtaatgttaatttcctggttttgaaaatcatattatggttatgtacattgttaacattaaggaaagctggcagaagggtgtgcataaattctatactctttttgaaacttttctataattctaaaattattttttaaagttaaacagtatattaagattaccttcactattcctcactcaagattaagacattttttgaaaagcagtagagtttgcttaaaatacaaattaattattcttgactataaccttgtaaaggtaaatctaatgtataaatttttgaaaaattttgcaccactggtcatagcatctatctcctttgccttaatttactgaaatacatcattttattcggttcaattgaaataaagctatgtctttactatgtattggccctaccaaaatcatatattaaaattttctaacat

SEQ ID NO: 285041 - DNA, 1000 bp, Homo Sapiens
cccacccacgggtgtccctgcccactcgtgtggcaagggaggggagggcaggagggctcggcctgagcagggtgctggggggagagcgcaatacctcacgcgggctgccgtcctaatcaacgtgcctatggcgggaccacgctcggagcctgcctcttctgcgactgttactttttctttgcgggatgggggtgggggttccctctccaggtggttgtccaagcccaggtcccggccctgggtgctcagccagctcggctaggccctgcgcctccctgcgcttcccccttcaggaagggtgtgtgccacctcgttgcactggatcccagtggctgcttgggggagaggcgtttgccatcactggtgttgtcacctccctgtttctccaccaagggcttgggcctctcggggctggggcctcccaggggatggggacccagaggtgcagtggccgcccacatccatggcctaggagctactgggcaggttcccggccacacatctggtgggctgttttgtttttttttttcctcttcccccagatgtcttgacgggatcactggggctctttgtgagtgagggtggccaaactaccgccggaggagatggggtctcagagcgagagctgcggagggggaggggaagaagaaggcctcacttttgctgctgcggggcccacacagccgctgctactttggggggtggggaaggggccaagctgcagacacacacagtcattcatttctgtccacacccctgtgggtggcgggtgtgcgtgtgtgtgcttgtgtgtgcgcacgtgtcggcgctcacacacacatgctagcccactgatgcacccagcccagggctggcagtctttgcagcgtggggccgtctcaccctggagcctggagaggatctatgcttgtttgtttttgtaatccatatcatagttgctttctttaattgttccttctgaataaacagtttatttaagataaaaaaaaaaaaaaaaaaa

SEQ ID NO: 285042 - DNA, 1000 bp, Homo Sapiens; identical to SEQ ID NO: 115585

SEQ ID NO: 285043 - DNA, 1000 bp, Homo Sapiens
ctttgaggagatgttttccttcactttagtttcaaacccaagtgagtgtgtgcacttctgcttctttagggatgccctgtacatcccacaccccaccctcccttcccttcatacccctcctcaacgttcttttactttatactttaactacctgagagttatcagagctggggttgtggaatgatcgatcatctatagcaaataggctatgttgagtacgtaggctgtgggaagatgaagatggtttggaggtgtaaaacaatgtccttcgctgaggccaaagtttccatgtaagcgggatccgttttttggaatttggttgaagtcactttgatttctttaaaaaacatcttttcaatgaaatgtgttaccatttcatatccattgaagccgaaatctgcataaggaagcccactttatctaaatgatattagccaggatccttggtgtcctaggagaaacagacaagcaaaacaaagtgaaaaccgaatggattaacttttgcaaaccaagggagatttcttagcaaatgagtctaacaaatatgacatccgtctttcccacttttgttgatgtttatttcagaatcttgtgtgattcatttcaagcaacaacatgttgtattttgttgtgttaaaagtacttttcttgatttttgaatgtatttgtttcaggaagaagtcattttatggatttttctaacccgtgttaacttttctagaatccaccctcttgtgcccttaagcattactttaactggtagggaacgccagaacttttaagtccagctattcattagatagtaattgaagatatgtataaatattacaaagaataaaaatatattactgtctctttagtatggttttcagtgcaattaaaccgagagatgtcttgtttttttaaaaagaatagtatttaataggtttctgacttttgtggatcattttgcacatagctttatcaacttttaaacattaataaactgatttttttaaag

SEQ ID NO: 285044 - DNA, 1000 bp, Homo Sapiens; identical to SEQ ID NO: 115586

SEQ ID NO: 285045 - DNA, 1000 bp, Homo Sapiens; identical to SEQ ID NO: 220996

SEQ ID NO: 285046 - DNA, 1000 bp, Homo Sapiens; identical to SEQ ID NO: 220997

SEQ ID NO: 285047 - DNA, 1000 bp, Homo Sapiens
ccccaggcgggggtcgggcagccccagcccctctccttttcctggactctggccgtgcgcggcagcccaggtgtttgctcagttgctgacccaaaagtgcttcatttttcgtgcccgccccgcgccccgggcaggccagtcatgtgttaagttgcgcttctttgctgtgatgtgggtgggggaggaagagtaaacacagtgctggctcggctgccctgagggtgctcaatcaagcacaggtttcaagtctgggttctggtgtccactcacccaccccaccccccaaaatcagacaaatgctactttgtctaacctgctgtggcctctgagacatgttctatttttaaccccttcttggaattggctctcttcttcaaaggaccaggtcctgttcctctttctccccgactccaccccagctccctgtgaagagagagttaatatatttgttttatttatttgctttttgcgttgggatgggttcgtgtccagtcccgggggtctgatatggccatcacaggctgggtgttcccagcagccctggcttgggggcttgacgcccttccccttgccccaggccatcatctccccacctctcctcccctctcctcagttttgccgactgcttttcatctgagtcaccatttactccaagcatgtattccagacttgtcactgactttccttctggagcaggtggctagaaaaagaggctgtgggcaggaaagaaaggctcctgtttctcatttgtgaggccagcctctggcttttctgccgtggattctccccctgtcttctcccctcagcaattcctgcaaagggttaaaaatttaactggtttttactactgatgacttaaaaaaaatacaaagatgctggatgctaacttgatactaaccatcagattgtacagtttggttgttgctgtaaatatggtagcgttttgttgttgttgttttttcatgccccatactactgaataaactagttctgtgcgggt

SEQ ID NO: 285048 - DNA, 1000 bp, Homo Sapiens; identical to SEQ ID NO: 115588

SEQ ID NO: 285049 - DNA, 1000 bp, Homo Sapiens
tgaaatgcttatctttattctacttcgtaagggtaagttttatttatactctttggactcccatgaacttttgcacactgctttgtgtttttggtttaccctaaactaccatcctttttatctttgctttttttcttcctattcagaaaagagcaaaatgtgaaaagacacaagactctcaggtatagaatgaactgagcaatttggagaatgtattggactttgtcctctcttattcccccctcctagccctgcaagttgctaggtacttgtgaggcagtgtactggagaggggagagcatggatcctggggtcaaagggcctttgcccccacccttacttggccctctacctgcaggtgaccactggcacattctcctgcttgtctcagcttcaggttcttcacctctaagatggggatgatgaaaacagtacctgtcatgcagaattgttgggaggattgataatttagatgtttatacatgtaatgtacttagatcagtgtctgctcttttcacttgatatccagtactatgtaagatagaaggtgcatgtcttctgtattctgtatttcccatttcttttgcgtgcagtctttgattcgtacaatagaaggaacacgtagaatgtatatttgtacattcatgtcaacatagtatttgaaattgctaccaaactcatttaatttggcataagactaacagatgaagtctctcatttgcttgaagatattttacaaaataccaactgttctatatttctttagaaaaagattatagttattaatattgatacctctgataatattttattcttaaatcttcagtgattccttttactatagattcatgacagctaattagtactaactgatttagaggtttcctttcccatcatatggaatgatgtaaagaaatcagatacaaactactgcaattagaaaataaaatatgaacaactttcaacaatgaaaaaaaaaaaaaaaaaaaaaaaaaaaaaa

SEQ ID NO: 285050 - DNA, 1000 bp, Homo Sapiens; identical to SEQ ID NO: 115589

SEQ ID NO: 285051 - DNA, 1000 bp, Homo Sapiens; identical to SEQ ID NO: 115590

SEQ ID NO: 285052 - DNA, 1000 bp, Homo Sapiens
ctgctcctgatgcttggaccccttttattgatcagagtgctctagaataatggatggtcttggatgatggataaatagggacagggacagttaaattgggagcctttcttacaaccttgatgggatttttccccccaagtttccttctccactgaaatgccacactaatgcttgttggattcatgaggtggccagaccaatgtgttgttttgttgttgttttttttttttaagcttcccttgagagaataaatggtaatggagagaactatttaacaaggtcctggtttctcttgcaacacagtagctaaacttgcctgcttttatatgcatttttgtagggatcagcttggtagacagtattagcggagaaacaccttgatcttggtttgcaagcccttctcccatcagtcctagattaggccctgttcagccatgcaggggtgttggtttatgcgtgctgcagcagtgggcataatgaatataatttacccagtggacaaaggtgtgtaccaagtgaatttaaataattggtgtggattggccagtagctaagtgggcttttaaagagtattgaagattgaaagggtttttctttcttttttaaaaaagaaaaacaaactattgattgtagataatgaaaagctagggtttgccctcttcatgtctactctccttccaaatagttatatccaaaactgtttttccctctcccctaccttgtcccccctattaaaatagaaacagggattgattaatgtcccgctcctgaatacatgtaaaatttgtacaaaaatatcttctatgaaaatgatttgtaatctgtagacttattacctgggagatgtcttgatgtaaaatcccatcctttgggttgtgggttttttgttttctccaaataaatctgatctttaaagttcaaaaaaaaaaaaaaaaaaaaaaaaaaaaaaaaaaaaaaaaaaaaaaaaaaaaaaaaaaaaaaaaaaaaaaaaaaaaaaaaa

SEQ ID NO: 285053 - DNA, 1000 bp, Homo Sapiens
tataacagcaacttcccaaaaggcatgttacttcgcttttttgtgcacttctatgacatggaaattattgaagaagaagctttcttggcttggaaagaagatataacccaagagtttccgggaaaaggcaaggctttgttccaggtgaatcagtggctaacctggttagaaactgctgaagaagaagaatcagaggaagaagctgactaaagaaccagccaaagccttaaattgtgcaaaacatactgttgctatgatgtaactgcatttgacctaaccactgcgaaaattcattccgctgtaatgttttcacaatatttaaagcagaagcacgtcagttaggatttccttctgcataaggtttttttgtagtgtaatgtcttaatcatagtctaccatcaaatattttaggagtatctttaatgtttagatagtatattagcagcatgcaataattacatcataagttctcaagcagaggcagtctattgcaaggaccttctttgctgccagttatcataggctgttttaagttagaaaactgaatagcaacactgaatactgtagaaatgcactttgctcagtaatacttgagttgttgcaatatttgattatccatttggttgttacagaaaaattcttaactgtaattgatggttgttgccgtaatagtatattgcctgtatttctacctctagtaatgggctttatgtgctagattttaatatccttgagcctgggcaagtgcacaagtctttttaaaagaaacatggtttacttgcacaaaactgatcagttttgagagatcgttaatgcccttgaagtggtttttgtgggtgtgaaacaaatggtgagaatttgaattggtccctcctattatagtattgaaattaagtctacttaatttatcaagtcatgttcatgccctgattttatatacttgtatctatcaataaacattgtgatacttgaaaaaaaaaaaaaaaaaaaaaaaaaaaaa

SEQ ID NO: 285054 - DNA, 1000 bp, Homo Sapiens; identical to SEQ ID NO: 115592

SEQ ID NO: 285055 - DNA, 1000 bp, Homo Sapiens
taagaactgtgcagtagccgtttgtggtttaaagcaaacatgcaagatgaacctgagggatgatagaatacaaagaatatatttttgttatggctggttaccaccagcctttcttcccctttgtgtgtgtggttcaagtgtgcactgggaggaggctgaggcctgtgaagccaaacaatatgctcctgccttgcacctccaataggttttattattttttttaaattaatgaacatatgtaatattaatagttattatttactggtgcagatggttgacatttttccctattttcctcactttatggaagagttaaaacatttctaaaccagaggacaaaaggggttaatgttactttaaaattacattctatatatatataaatatatataaatatatattaaaataccagttttttttctctgggtgcaaagatgttcattcttttaaaaaatgtttaaaaaaaaaaaaaaactgcctttcttcccctcaagtcaacttttgtgctccagaaaattttctattctgtaagtctgagcgtaaaacttcaagtattaaaataatttgtacatgtagagagaaaaatgactttttcaaaaatatacaggggcagctgccaaattgatgtattatatattgtggtttctgtttcttgaaagaatttttttcgttatttttacatctaacaaagtaaaaaaattaaaaagagggtaagaaacgattccggtgggatgattttaacatgcaaaatgtccctgggggtttcttctttgcttgctttcttcctccttaccctaccccccactcacacacacacacacacacacacacacacacacacacacacactttctataaaacttgaaaatagcaaaaaccctcaactgttgtaaatcatgcaattaaagttgattacttataaatatgaactttggatcactgtatagactgttaaatttgatttcttattacctattgttaaataaactgtgtgagacag

SEQ ID NO: 285056 - DNA, 1000 bp, Homo Sapiens
ggggggtggggcggggaagtgctctaacttttcttaaggttttgttgctagcccttcaagtgcactgagctatgtgactcggatggtctttcacacggcacatttggacatttccagaactaccatgagatggtttagacgggaattcatgcaaatgaggggtcaaaaatggtatagtgaccccgtccacgtcctccaagctcacgaccttggagccccgtggagctggactgaggaggaggctgcacagcgggagagcagctggtccagaccagccctgcagcccccactcagccggcagccagatggccccgcaaggcctccagggatggcccctagccacaggccctggctgaggtctctgggtcggtcagtgacatgtaggtaggaagcactgaaaatagtgttcccagagcactttgcaactccctgggtaagagggacgacacctctggtttttcaataccaattacatggaacttttctgtaatgggtacaatgaagaagtttctaaaaacacacacaaagcacattgggccaactatttagtaagcccggatagacttattgccaaaaacaaaaaatagctttcaaaagaaatttaagttctatgagaaattccttagtcatggtgttgcgtaaatcatattttagctgcacggcattaccccacacagggtggcagaacttgaagggttactgacgtgtaaatgctggtatttgatttcctgtgtgtgttgccctggcattaagggcattttacccttgcagttttactaaaacactgaaaaatattccaagcttcatattaaccctacctgtcaacgtaacgatttcatgaacgttattatattgtcgaattcctactgacaacattataactgtatgggagcttaactttataaggaaatgtattttgacactggtatcttattaaagtattctgatcctaaaaaaaaaaaaaaaaaaaaaaaaaaaaaaaaaaaaaaaaaaaaaaaaa

SEQ ID NO: 285057 - DNA, 1000 bp, Homo Sapiens; identical to SEQ ID NO: 115597

SEQ ID NO: 285058 - DNA, 1000 bp, Homo Sapiens; identical to SEQ ID NO: 221001

SEQ ID NO: 285059 - DNA, 1000 bp, Homo Sapiens
tgagcgacagaatagaaaaggaatccctggatggcccgatcgtgaagcagttagagagaggcgggagagccgtggtgaagatggactggcgggagaacatcactgaccccctccagacagacctgcgtaaattcaggacctataaaggtggttctgtcagagatctcctccgagccatgagaaataagaagcaccactaccgggagctgcctgcagaggtgcgggagacgctggggaccctccccgacgacttcgtgtgctacttcacgtctcgcttcccccacctcctcgcacacacctaccgggccatggagctgtgcagccacgagagactcttccagccctactacttccacgagcccccagagccccagcccccagtgactccagacgccctctgagcgagggcggcccctctgttctggtggccccagctgtgactgagggcctggtcaccacaattagagcttgatgcctcccggctttgcagggagaccaggcttcccaaaccaagtgccttgagctgcctgctctgcagcccacagaggacagtgctgaccccaggaagtgggagaagtggcccctcgtgacctacagggaactgggaagatgctggccccaaaagccttacggtcatgatgtctgcaaaggagggcctcagagacagcgcgagtagcacccccagccatctactggataaacttgcttcagactttttaaattcctgcttaatgtcagtctacaggcctttcaggaagggagaggagggaatcgtacattttgcttgcgtgctgggacagctaggctgagatgcaccaagtacagccttcactggagaccggaattgagaggtgggggatgctgaggagggggaggacggagttcagagggtgtcgtcctgcagtatgagatttctcattgatcacagatgtgcccagagtagcccaggtcactgttaactagtgtttctgcagaggcagcaggagccagcccggaattc

SEQ ID NO: 285060 - DNA, 619 bp, Homo Sapiens; identical to SEQ ID NO: 115598

SEQ ID NO: 285061 - DNA, 1000 bp, Homo Sapiens
ttgggaggaactcgacctactccgctaacccagtggcctgagccaatcacaaagaggattggagcctcactcgagcgctccttcccttctcctctctctgtgacagcctcttggaaagagggacactggaggggtgtgtttgcaatttaaatcactggatttttgcccaccctctttccaaataagaaggcaggagctgcttgctgaggtgtaaagggtcttctgagctgcagtggcaattagaccagaagatccccgctcctgtctctaaagaggggaaagggcaaggatggtggaggctttctgtgctacctggaagctgaccaacagtcagaactttgatgagtacatgaaggctctaggcgtgggctttgccactaggcaggtgggaaatgtgaccaaaccaacggtaattatcagtcaagaaggagacaaagtggtcatcaggactctcagcacattcaagaacacggagattagtttccagctgggagaagagtttgatgaaaccactgcagatgatagaaactgtaagtctgttgttagcctggatggagacaaacttgttcacatacagaaatgggatggcaaagaaacaaattttgtaagagaaattaaggatggcaaaatggttatgacccttacttttggtgatgtggttgctgttcgccactatgagaaggcataaaaatgttcctggtcggggcttggaagagctcttcagtttttctgtttcctcaagtctcagtgctatcctattacaacatggctgatcattaattagaaggttatccttggtgtggaggtggaaaatggtgatttaaaaacttgttactccaagcaacttgcccaattttaatctgaaaatttatcatgttttataatttgaattaaagttttgtcccccccccccttttttttataaacaagtgaatacattttataatttcttttggaatgtaaatcaaatttgaataaaaatcttacacgtgaaaaaaaa

SEQ ID NO: 285062 - DNA, 1000 bp, Homo Sapiens; identical to SEQ ID NO: 221003

SEQ ID NO: 285063 - DNA, 1000 bp, Homo Sapiens
gtcccagttatcacatgttcacacttgggtttaggggtgtttttttttaaaaccaggcaggttagctagcccaccctgtgctagttttcatgttcacactgaccctatttgaattaatatcctttgttagagtggtcgagatttcaaacccaattatgtacagggagctgtctgagagctagccagaactggggtacagcctgggctcagggaatagctgtcaacactcgggcaaagtttttgtctgtgcatgtgtatctccatttgttttgggatcccagtttttgttttaagagagtataaggtgtctcatttgagtctttttcttacctagccccctcttatcagtaaaacaaaggacttgccatggttcacagcaatgtgctacgatccaagatatcagccaaggagcccacttaggggagaactaggtgtccagatttttgtatgtgttgtttttcttgggggatggggtggggtgggagtaggtagagctgagaatactacatcttagtggtgacctttagccacgtgggtgaagtggcaaaggccatggccatatctgttgtcccaggccaaagactaacaactgccttgggaatcccttccttgtgtccttaccaaatgatagctcataaaactctgataatgtaacaaatcactttcaaaggagttcccagaagtcttcagaaagactaaaattctgtctcttcctgctttagacagccattaagatcccaactaattttaccgaacctaaaacccacaaagaggttgtttgtgttattgttcaatcttcagttgtaagagtaattctctatttttatattgaaacataattacttgatagctcagggtctacatttcattcaactttttacaccaaattctgcagagtggtcaaaatggaatattgggggctgttgtaaacagaggcttaattttattagaagtagccagttatttattaaagcatgatgttaataaaataggcatattc

SEQ ID NO: 285064 - DNA, 1000 bp, Homo Sapiens; identical to SEQ ID NO: 115600

SEQ ID NO: 285065 - DNA, 1000 bp, Homo Sapiens; identical to SEQ ID NO: 115601

SEQ ID NO: 285066 - DNA, 1000 bp, Homo Sapiens
cagcaaccccgccgcctcggcaggcctgcactccagcatgtcctcctactcgctggagcagagctacttgcaccagaacgctcgcgaggacctctcagtgggactgccccgttaccagcatcactctactccagtgtgtgacagaaaagatttcgtcctcaacttcaatgggatttcttctttccatccctcagctagcgggtcgtattatcaccatcaccaccagagcgtctgtcaggatattaagccctgcgtcatgtgaacggaaagaggccaagcgatggccgctctctcctctcccctcctcagagggggcagatagaaactgggacggattcaagtcacatgcacgcggatagcagtaagccacacacctgccacttagccagaatgcccaggatcgcgttggtcactgttatttgcctactgctggaagaaggacaaccgctggcaaggtagcgttccccaatctgaatacctgcaggctcccacatgagggagagggcagactcaggtgggaagatgtgccatgcgtaaggcatcaacgtgtatctgtgggatcttcgttgccttcagtaatcagggtgtgaaaaaagcagacaagttgtgtgtgtgtgtgtgtgtctaagaaaacttgtgtgcttttcaaaaaggcagtgctaagcacaagatttcaagaaagcctcttcttgttgcctagctgagtgggagagtcattttccccagacactacatttggatacaggtgccaaagaacattattaaggaattatttagaaacaatgtgtctagtttaagaaagtggttttcagtattgtgacaatacaacgtttttacaaggttgttttctaccaccatattttaaagatatttttatgaccgtgtatactcacactttgcttgtattttaaaaggaggatatatttgcacttatgtatacttttacagtttgccaaaatattttgttgtaaaattttttttcaataaaatgtatataaca

SEQ ID NO: 285067 - DNA, 1000 bp, Homo Sapiens; identical to SEQ ID NO: 115603

SEQ ID NO: 285068 - DNA, 1000 bp, Homo Sapiens; identical to SEQ ID NO: 221004

SEQ ID NO: 285069 - DNA, 1000 bp, Homo Sapiens; identical to SEQ ID NO: 115604

SEQ ID NO: 285070 - DNA, 1000 bp, Homo Sapiens; identical to SEQ ID NO: 221006

SEQ ID NO: 285071 - DNA, 1000 bp, Homo Sapiens; identical to SEQ ID NO: 221007

SEQ ID NO: 285072 - DNA, 1000 bp, Homo Sapiens
gtgattcaggatacacacagtgtgaagctgacaatctgcagtgcggaaaattaatatgtaaatatgtaggtaaatttttattacaaattccaagagccactattatttatgccaacataagtggacatctctgcattgctgtggaatttgccagtgatcatgcagacagccaaaagatgtggataaaagatggaacttcttgtggttcaaataaggtttgcaggaatcaaagatgtgtgagttcttcatacttgggttatgattgtactactgacaaatgcaatgatagaggtgtatgcaataacaaaaagcactgtcactgtagtgcttcatatttacctccagattgctcagttcaatcagatctatggcctggtgggagtattgacagtggcaattttccacctgtagctataccagccagactccctgaaaggcgctacattgagaacatttaccattccaaaccaatgagatggccatttttcttattcattcctttctttattattttctgtgtactgattgctataatggtgaaagttaatttccaaaggaaaaaatggagaactgaggactattcaagcgatgagcaacctgaaagtgagagtgaacctaaagggtagtctggacaacagagatgccatgatatcacttcttctagagtaattatctgtgatggatggacacaaaaaaatggaaagaaaagaatgtacattacctggtttcctgggattcaaacctgcatattgtgattttaatttgaccagaaaatatgatatatatgtataatttcacagataatttacttatttaaaaatgcatgataatgagttttacattacaaatttctgtttttttaaagttatcttacgctatttctgttggttagtagacactaattctgtcagtaggggcatggtataaggaaatatcataatgtaatgaggtggtactatgattaaaagccactgttacatttcaaaaaaaaaaaaaaaaa

SEQ ID NO: 285073 - DNA, 1000 bp, Homo Sapiens; identical to SEQ ID NO: 115605

SEQ ID NO: 285074 - DNA, 1000 bp, Homo Sapiens
acttggactgaacaggcctgatggagcttgtggctggcctcagatacacctaagaagcttaggggcaaggttcattctcctgctttaaaaagtgcatgaactgtagtgctttaaacaatcatctccttaacaggggtcgtaagcctggtttgcttctattacttttctttgacataaagaaaataacttctgctaggtattactctctactcctaaagttatttactatttggcttcaagtataaaattttggtgaatgtgtaccaagaaaaaattagtcacctgagtaacttggccactaataattaaccatctacctctgtttttaattttctttccaaaaggcagcttgaaatgttggtcctaatcttaattttttttcctcttctatagacttgagaatgtttttctctaaatgagagaaagacttagaatgtacacagatccaaaatagaatcagattatctctttttttctaaaggagagaaagacttagaacatacacagatcctaagtagaaccaggtaattgtctctttttctaataaggaatttgggtaatttttaattttttgttttttaaaaaataacctagactatgcaaaacatcaaagtgaattttccatgaatgtttttaatattctcatctcaacattgtgatatatgctactaaaaaccttttcatatacatcttacctcatttcaagtgaattattttaatctttttctctctttccaaaaatttacaggaatgtttagtgtaattggatttcgctatcagttcccatccttaagttttgatattcaatatctgatagatacactgcatctttggtcatctaagatttgtttacaaatgtgcaaattatttagagcatagactttataagcattaaaaaaaactaatggaggtaaaacctaaatgcgatgtgaaataattttagtgttgatactgtatgtgtatttttattctaataaacttttgtgttccagattgaaaa

SEQ ID NO: 285075 - DNA, 1000 bp, Homo Sapiens
ctcaccaaccagggtccccagttcaccttctcccaggaggacttcctgacttccatccttccctctctcacggaaatcgatactgtggtcttcattttcaccctggatgacaacctcacggaggtgcagactatagtggagcaggtgaaagagaagaccaaccacatccaggccctggcacacagcaccgtgggtcagaccttgccgatccctctgaagaagctctttccctccatcatcagcatcacatggccactgcttttctttgaatatgaagggaacttcatccagaagttccagcgtgagctaagcaccaaatgggtgctgaatacagtgagtacaggtgctcatgtgcttcttggtaagatcctacaaaaccacatgttggaccttcggattagcaactccaagctcttctggcgggcgctggccatgctgcagcggttctctggacagtccaaggctcgatgcatcgagagcctcctccgagcgatccactttccccagccactgtcagatgatattcgggctgctcccatctcctgccatgtccaggttgcacatgagaaggaacaggtgatacccatcgccttgctgagcctcctattccggtgctcgatcactgaggctcaggcacacctggctgcagctccttctgtctgtgaggctgtcaggagtgctcttgctgggccaggtcagaagcgcactgcggaccccctcgagatcctagagcctgacgttcagtgaacccatgtttctgggtgggtgaaaggggcccaaccctgcccacttcagcccagcccgcccaaggggacttgtgccagcagaacatgtgggaggaagaagccccgtttccagggcatccgcagcccagggtagggagaaatattctctccactttgggggagagttcttgctctcgacctagtggtttctactctcaccgacttattctgatttcagaaataaaatgaaatgtcttattttggaaaaaaaaaaa

SEQ ID NO: 285076 - DNA, 1000 bp, Homo Sapiens
cagatttcattgaggaatttgacaattatgcagaatgggacttgagagacattgattttgttgaagatgactcggacattttacatgctctgaagatggctgtggtagatatctatcattccaggttaaaggagagacaaagacgaaaaaaaattataagagaccatggattaatcaaccttagaaagtttcaattaatggaacggcggtatcccaaggaggtccaggacctgtatgaaacaatgaggcgatttgcaagaattgtggggccagtggaacatgacaaattcattgaaagccatgcattggaatttgaactccgaagggaaatcaagaggctccaagaatacaggacagcaggcattaccaatttttgtagtgccagaacctacgatcacctcaagaagacacgggaggaagagcgccttaaacgcactatgctctcagaagttctccagtatatccaggacagtagtgcttgccagcagtggctccgccggcaagctgacattgattccggcctgagtccttccattccaatggcttcgaattcaggtagacggagtgcaccacccttgaacctcactggcctccctggcacagagaagctgaatgaaaaagaaaaggagctctgtcagatggtgaggttggtccctggagcctatttagaatacaaatctgctctattgaacgaatgtaacaagcaaggaggcttaagactggcgcaggcaagagcactcatcaagatagatgtgaacaaaacccggaaaatctatgatttcctcatcagagaaggatacatcactaaaggctaaggctccaagagcttgggatcagaagtcagaagtttggaatgtggtgggtcaaaggacaatatgggtgggcattctggagagttgtttttcagctgaattctcatggtgaaaacaggggaaaggacaaaggaaaccttaaaaaaaaaaaaaaaaaaaaaaaaaaaaaaaaaaaaaaaaaaaaaaaa

SEQ ID NO: 285077 - DNA, 1000 bp, Homo Sapiens
ctgggaggctgaggcaggagaatctcttgagcccaggaggcggaggttgcagtgagctgagatgccaccaccacaccagcctgggtgacagagtgaaactcgtatctccaaacaaacaaacaaaaagtccttaaacatatgtgaacaaaaattttgtgatggaaggattctagttaatgagtattgcatcaagatttacatctttcttactaaggaaaagagttaataaaaattgttctttattttacaggcagttactgaggctcttcccagatctcagtaaacagccactcagccttgaaaatggagtgttgttgtttctaaacatatatttatgtcatttattaagtacagttcacttaaataacataagtagattttctcttgtagtgatttgggtaggaagaggccatgtttcagttcgttttctctgtagggtcgattgaattggaccttttcagttgttcagaaaaataaaaataatttctcatattaaatacagacgctcctcaacttatgatgtgggtaggtcccagtaaacccattataatttgaaaatatcatattgaaaatgcatttaatatctcttacctgaaatcataacttagccaagcctaccttaaatgttctcagaacatttagcctgcagttgggcaaaaccatttaacacaaagcctattttataatgaagtgttgaatagctcatgttatttactgaatactgttgtgaaagtgaaaaacaatgattgtatgggtactcaaagtataatttctactgaatgcatatcacttgtgcactgttgtaaagctgaaaaaccgttaagcctctacgatttttaagtaagttggggaccatcagtttaaaataaatgcaatactatttcatgataaacatggtcactgtaagttttactcttttgaatgagggtgcgacagaatgcagttagaatcagttcatatcaccattaaaatcatccattcagaaaccaaaaaaaaaaaa

SEQ ID NO: 285078 - DNA, 1000 bp, Homo Sapiens; identical to SEQ ID NO: 115608

SEQ ID NO: 285079 - DNA, 1000 bp, Homo Sapiens
ccttctgaagcagagaccggacaagagcctgcagcggaagggactctgggctgtgcctgaggctggctgggggcaggacaacacagctgcttccccaggctgcccactctggggacccgctgggggctggcagagggcatcggtcagcggggcagcggggctggccatgagggtccaccttcagccctttggcttcaaggatggagatggttttgccctccctctctgccctcgggtggggctggtgggtctgcagctggtgtgggaacttccccacggatggcggtggagggggttcgcaccgtgctgggctccccctgactgtagcacggagtgttggggctgggggccagctccaggagggcttgagagctcagcctgcctgggagagcccttgtggcgaggcattaaaacttgggcaccagcttctttctcggtggcagaaattttgaagtcagagagaaacggtcctttgttggcttctttgctttctcgtgggtcctttggcaggcctccctttggggagagggaggggagagaccacagccgggtgtgtgtctgcagcaccgtgggccctcaagctttcctgctgtcttctccctcctcctcctttcccctttctctttcctcatttcctagacgtacgtcaactgtatgtacataccggggctcctctcctaacatatatgtatatacacatccatatacatatattgtgtggtttcccctttctttcctttttttaagcaacaaaactatggaaataataccccaacagatgagcgaaaatgtattattgtaaagtttattttttttaatactgttgtctataatggggaaaaaggacattggccccgcagtgccctgccccagtcagcctggctgggctctggtgggggctcctgatccgcatccaagcttaaccaaggctccaataaacgtgctaggaagcaaaaaaaaaaaaaaaaaaaaaaaaaaaaaaaaaaaaaaaaaaaaaaaa

SEQ ID NO: 285080 - DNA, 1000 bp, Homo Sapiens
tgtgcaacagagcagtccagatgtctacgagcatacctggggctgattgggactgccatgacccccaactttgtcagcaatgtcaacaccagtgttgccttaagctgcacctgccgaggcagtggcaacctgcaggaggagtgtgaaatgctggaagggttcttctcccacaacccctgcctcacggaggccattgcagctaagatgcgttttcacagccaactcttctcccaggactggccacaccctacctttgctgtgatggcacaccagaatgaaaaccctgctgtgaggccacagccctgggtgccctctcttttctcctgcacgcttcccttgattctgctcctgagcctatggtagctggacttccccagggccctcttcccctccaccacacccaggtggacttgcagcccacaaggggtgaggaaaggacagcagcaggaaggaggtgcagtgcgcagatgagggcacaggagaagctaagggttatgacctccagatccttactggtccagtcctcattccctccaccccatctccacttctgattcatgctgcccctccttggtggccacaatttagccatgtcatctggtggtgaccagctccaccaagcccctttctgagcccttcctcttgactaccaggatcaccagaatctaataagttagccattctctattgcattccagattagggttagggtagggaggactgggtgttctgaggcagcctagaaagtcattctcctttgtgaagaaggctcctgccccctcgtctcctcctctgagtggaggatggaaaactactgcctgcactgccctgtccccggatcctgccgaacatctgggcatcaggagctggagcctgtgggccttgctttattcctattattgtcctaaagtctctctgggctcttggatcatgattaaacctttgacttaaaaaaaaaaaaaaaaaaaaaaaaaaaaaaaaaaaaaaaaaaaaaaaaaaa

SEQ ID NO: 285081 - DNA, 1000 bp, Homo Sapiens
ctgagctggtgcctggccccagtcttatctgtgcctttactgctttgcgcatctcagatgctaacttggttctttttccagaaggctttgtattggttaaaaattattttctattgcagagagcagctgtgactcatgcaaaaagtattttctctgtcagatccccactctataccaaggatattattaaaactagaaatgactgcattgagagggagttgtgggaaataagaagaatgaaagcctctctttctgtccgcagatcctgacttttccaaagtgccttaaaagaaatcagacaaatgccctgagtggtaacttctgtgttattttactcttaaaaccaaactctaccttttcttgtttttttttttttttttttttttttttttggttaccttctcattcatgtcaagtatgtggttcattcttagaaccaagggaaatactgctccccccatttgctgacgtagtgctctcatgggctcacctgggcccaaggcacagccagggcacagttaggcctggatgtttgcctggtccgtgagatgccgcgggtcctgtttccttactggggatttcagggctgggggttcagggagcatttccttttcctgggagttatgtaccgcgaagtgtgtcatgtgccgtgcccttttctgtttctgtgtatcctattgctggtgactctgtgtgaactggcctttgggaaagatcagagaggcagaggtggcacaggacagtaaaggagatgctgtgctgcctacagcctggacagggtctctgctgtactgccaggggcgggggctctgcatagccaggatgacgcctttcatgtcccagagacctgttgtgctgtgtattttgatttcctgtgtatgcaaatgtgtgtatttaccattgtgtagggggctgtgtctgatcttggtgttcaaaacagaactgtatttttgcctttaaaattaaataatataacgtgaataaatgaccctaactttgt

SEQ ID NO: 285082 - DNA, 1000 bp, Homo Sapiens; identical to SEQ ID NO: 115610

SEQ ID NO: 285083 - DNA, 1000 bp, Homo Sapiens; identical to SEQ ID NO: 115611

SEQ ID NO: 285084 - DNA, 1000 bp, Homo Sapiens
tcctgaagccagctcaaggtttgggagctccctcatcaccgtgaggtccaaggcaaagaaccaagtcgtcattgctgctggaaggagttctttgggagcccgactctccggggcacttcacgtctatagccttggctcagattgaagatttcactgcatttccccactctgcccacctctctcatgctgaatcacatccatggtgagcattttgatggacaaagtggcacatccagtggagcggtggtagatcctgatagacatggggctcctgggagtagagagacacactaacagccacaccctctggaaatctgatacagtaaatatatgactgcaccagaaatatgtgaaatagcagacattctgcttactcatgtctccttccacagtttacttcctcgctccctttgcatctaaacctttcttctttcccaacttattgcctgtagtcagacctgctgtacaacctatttcctcttcctcttgaatgtctttccaatggctggaaaggtccctctgtggttatctgttagaacagtctctgtacacaattcctcctaaaaacatccttttttaaaaaaagaattgttcagccataaagaaagaacaagatcatgccctttgcagggacatggatggagctggaggccattatccttcataaactattgcaggaacagaaaaccaaacactccatattctcacttgtaagtgggagctaaatgagaacacgtggacacatagagggaaacaacacacactggggcctatgagagggcggaaggtgggaggagggagagatcaggaaaaataactaatggatacttagggtgatgaaataatctgtgtaacaaacccccatgacacacctttatgtatgtaacaaaccagcacttcctgcgcatgtacccctgaacttaaaagttaaaaaaaagttgaacttaaaaataacagattggcccatgccaatcaaagtataatagaaagcatagtatac

SEQ ID NO: 285085 - DNA, 1000 bp, Homo Sapiens
cagcaccgagcagtcggatgtgaggttcagcagtgccgtgtagacagccttggccgcataggcccagccagggtgtgactcgggagctgcacacacctgggtggacacaaggcacggccacgtcatgtctctaaactgcggtcagatgtggcttctggctcctcggggcctcgcgagggtcacgcttgcctggtcaccctggggctgcttaggaaacctcacgactggtcaccttgcactcttcacacagaattgctacaatcccaaagcgctcgccccgcagggtccaaaggccagcggtgaccagcctgtcacccagctcctccccgccaaccctgcctgccgctgcacctgcctgccgctgcaggaaacatttgacaccgtcgaccaggaaagccacacggagaggccactgtgggtgaagcgcctcagttacacaggaaccctaaagcaaatctgccaccgtgggggaactgacgctggagatgcaaggtgctggtgggtctgagctggacgtcgcggtgtgtcctctgtgcccacggtctgagctagctagcgcaccgccgagttaaagaggagaaggaaaacatgctgctctggtgcacgcctgagcgtcctccatcttccaggatggcagcaatggcgctgtgcggcctcaccaggcccacgaggagcagcagcgctcggcccggagcagcaggaaggcccctctgtggagcgcccgccgtctgctccggggtggttcagtcactgcttgttgacatcaacatggcaattgcactcatgtggactgggaccgtgcgagctgccgtgtgggttagtcgggtgccaggacaatgaaatactccagcacgtgtggctgacgaatttgtttctacagaaataacagctggggacaactgcggtgatgatgtaaaaaccttcccataaaatgtaagaaaagctgatgaggctggtgacgttcagcctttgtcaataaacctgtcatgtgcggatcctt

SEQ ID NO: 285086 - DNA, 1000 bp, Homo Sapiens
gaagcattctccactacatagcagacaagcacaatctctttggcaagaacctcaaggagagaaccctgattgacatgtacgtggaggggacactggatctgctggaactgcttatcatgcatcctttcttaaaaccagatgatcagcaaaaggaagtggttaacatggcccagaaggctataattagatactttcctgtgtttgaaaagattttaaggggtcacggacaaagctttcttgttggtaatcagctgagccttgcagatgtgattttactccaaaccattttagctctagaagagaaaattcctaatatcctgtctgcatttcctttcctccaggaatacacagtgaaactaagtaatatccctacaattaagagattccttgaacctggcagcaagaagaagcctccccctgatgaaatttatgtgagaaccgtctacaacatctttaggccataaaacaacacatccatgtgtgagtgacagtgtgttcctagagatggtattgtctacagtcatgtcttaatggatcccagctctgtcatggtgctatctatgtattaagttgggtcctaagttgggtcttttgtgtcaacgagatcatctcttctagaaatatcaaccttttttgtccagtaaataattgttaggggatctttattggaaaacttttttggagaggctggtatttaagttagatctgattgggctactcatgtcctgtagccagttcatcctcataataagaatgggcaggatctcttgttctctcctgagtgtctttctactctcctgagcgtctttctgctctccttatcctgttctcttatccttatcccctccagtctctgcctaatttttagtgtttaataacaaccgaatgtctagtaaatgactctcctctgagctgtaataaataaaatggtagtaatgaatgcaatcagtattagccaaaataaagaatttatgagtcattaaaaaaaaaaaaaaaaaaa

SEQ ID NO: 285087 - DNA, 1000 bp, Homo Sapiens; identical to SEQ ID NO: 115614

SEQ ID NO: 285088 - DNA, 1000 bp, Homo Sapiens; identical to SEQ ID NO: 115615

SEQ ID NO: 285089 - DNA, 1000 bp, Homo Sapiens
agctcctcagccaggctgggctcatgaagagtactgaacctggagagccgccctgcattacttccgctggcttccagttcctgttgctggacaccccggctcagctctggtactttatgttgcagtatttgcagacagcccagagccggggcatggacctggtagagattctctccttcctcttccagctcagcttctctactctgggcaaggattactctgtggaaggtatgagtgattctctgttgaacttcctgcaacatctgcgtgagtttgggcttgttttccagaggaagaggaaatctcggcgttactaccccacacgcctggccatcaatctctcatcaggtgtctctggagctgggggcactgtgcatcagccaggtttcattgtcgtggaaaccaattaccgactgtatgcctacacggagtcggagctgcagattgccctcattgccctcttctctgagatgctctatcggttccccaacatggtggtggcgcaggtgacccgggagagtgtgcagcaggcaatcgccagtggcatcacagcccagcagataatccatttcctaaggacaagagcccacccagtgatgctcaaacagacacctgtgctgccccccaccatcaccgaccagatccggctctgggagctggaaagggacagactccggttcactgagggtgtcctgtataaccagttcctgtcgcaagtggactttgagctgctgctggcccacgcgcgggagctgggcgtgctcgtgttcgagaactcggccaagcggctcatggtggtgaccccggccgggcacagcgacgtcaagcgcttttggaagcggcagaaacatagctcctgagagcgcgggacttggacacggacctcggcgggcgggactgggcggggcggggcatcagaactcaggtgttttttatttacgcgtcagggcttttcttgtttaataaagttatgatagctaaaaaaaaaaaaaaaaaaaaa

SEQ ID NO: 285090 - DNA, 1000 bp, Homo Sapiens; identical to SEQ ID NO: 115617

SEQ ID NO: 285091 - DNA, 1000 bp, Homo Sapiens; identical to SEQ ID NO: 115618

SEQ ID NO: 285092 - DNA, 1000 bp, Homo Sapiens
ggtatctggggggcagtcagggctggttcgaatccattttgtccgtggactcgcctccccactgggccaccgtatgcagcttgaaagccgagcccacttcaatgctatgttccaaccatcctcccccactagacggcctggcttctctccaaccagccatcgccttctgcccactccctagccttggcccacaccagatccttggagtgaagtcggtcaagaacaaatggcccctatgcacagagccataggaactgggggccttccctggacagtgatcatgccaggcctggacctttaggcctgcctccccaggactccttagatcccactctttctacagacttctgtgatcacagccccctgcgggcaggggggctctccctccaccaactctcaaggctcctcagcctaagactatggctcatgagaaacactcaggcctgacctaggcttgggagtcaaactgctcatattgagcatattgttaagtgggtaaagccaagtaaaggtactgggtgtttttgtgaccacttgtgaatgggtgtatggagaactgaaaagggtatctgcatgaaggctcctgtctgactattccaggatccaatattactgccttctgaaacttcctctttagggtaaccatcatgtatgcccacgagggtgatagtaattcgtgagactgaagttgcttagagtacttctttgaccaaggaataccacagacaccctaccgatagaacagtggctcagatcttacttgctcctgcttacgaagtattcccaatcactggtcatctgaccctacttgaacactcctgaacagtcatgttttttaaaatcttcctttatatcaagtcagagagtatacttctataaatttcactcatggatgttaggaaatctagtcatcttccctgtgattgccctgttaagtatttaaccatagctatcatgtgtttcccaaatcttctctagattaaatatcttcagttacttc

SEQ ID NO: 285093 - DNA, 1000 bp, Homo Sapiens
tttaaaacttttaataaagggaagaagaccaatattattgattctatgcttcggatgttggagcaatattctagcaacttggaagatttgattcgggagcggactgaagagctggaaattgaaaaacagaaaacggaaaagcttctaacacagatgctaccaccatcagttgctgaatctctcaaaaagggctgcacagttgaacctgagggctttgacttggtcaccttgtacttcagcgacattgtgggcttcacaaccatttcagccatgagtgagcccattgaggtcgtggatcttctgaatgacctgtacacactctttgatgcaataattggcagtcatgatgtctacaaggtagagaccattggagatgcctacatggtggcttcaggcctcccaaagaggaatggcagtaggcatgcagctgagattgcaaacatgtccttagatatcctgagctctgtgggcactttcaagatgcggcacatgccagaagtgccggtccgaattcgaattggccttcactcagggccggttgttgctggagtggtgggcctcaccatgcccagatactgcttgtttggagacactgtgaacacagcttctcggatggaatctacaggcttaccttatcgcattcatgtcagtctcagcactgttacaattcttcaaaatctgagtgagggctatgaagtggagcttcgaggaagaacagagctcaagggcaaaggcacagaggaaaccttctggctgattgggaaaaaaggcttcatgaagccccttcctgtgcccccaccagtggacaaagatgggcaagtgggccatggcctgcaaccagtggagattgcagccttccaaagaagaaaagcagaaaggcagttggtgagaaacaagccataaggggcaaagggctccaggatttgaatcttctcttggtgaggcaatgggaaagctcacttcagttcaagaaattgttctgcctgggcaagaaattacg

SEQ ID NO: 285094 - DNA, 1000 bp, Homo Sapiens
aggccctggtgctacgtggtgaaggacagcgcgctctcctgggagtactgccgcctggaggcctgcgaatccctcaccagagtccaactgtcaccggatctcctggcgaccctgcctgagccagcctccccggggcgccaggcctgcggcaggaggcacaagaagaggacgttcctgcggccacgtatcatcggcggctcctcctcgctgcccggctcgcacccctggctggccgccatctacatcggggacagcttctgcgccgggagcctggtccacacctgctgggtggtgtcggccgcccactgcttctcccacagcccccccagggacagcgtctccgtggtgctgggccagcacttcttcaaccgcacgacggacgtgacgcagaccttcggcatcgagaagtacatcccgtacaccctgtactcggtgttcaaccccagcgaccacgacctcgtcctgatccggctgaagaagaaaggggaccgctgtgccacacgctcgcagttcgtgcagcccatctgcctgcccgagcccggcagcaccttccccgcaggacacaagtgccagattgcgggctggggccacttggatgagaacgtgagcggctactccagctccctgcgggaggccctggtccccctggtcgccgaccacaagtgcagcagccctgaggtctacggcgccgacatcagccccaacatgctctgtgccggctacttcgactgcaagtccgacgcctgccagggggactcaggggggcccctggcctgcgagaagaacggcgtggcttacctctacggcatcatcagctggggtgacggctgcgggcggctccacaagccgggggtctacacccgcgtggccaactatgtggactggatcaacgaccggatacggcctcccaggcggcttgtggctccctcctgaccctccagcgggacaccctggttcccaccattccctgccttgctgacaataaagatatttccaagaa

SEQ ID NO: 285095 - DNA, 1000 bp, Homo Sapiens
acagacagctcattttctcagttttttggtatttaaaccattgcattgcagtagcatcattttaaaaaatgcacctttttatttatttatttttggctagggagtttatccctttttcgaattatttttaagaagatgccaatataatttttgtaagaaggcagtaacctttcatcatgatcataggcagttgaaaaatttttacaccttttttttcacattttacataaataataatgctttgccagcagtacgtggtagccacaattgcacaatatattttcttaaaaaataccagcagttactcatggaatatattctgcgtttataaaactagtttttaagaagaaattttttttggcctatgaaattgttaaacctggaacatgacattgttaatcatataataatgattcttaaatgctgtatggtttattatttaaatgggtaaagccatttacataatatagaaagatatgcatatatctagaaggtatgtggcatttatttggataaaattctcaattcagagaaatcatctgatgtttctatagtcactttgccagctcaaaagaaaacaataccctatgtagttgtggaagtttatgctaatattgtgtaactgatattaaacctaaatgttctgcctaccctgttggtataaagatattttgagcagactgtaaacaagaaaaaaaaaatcatgcattcttagcaaaattgcctagtatgttaatttgctcaaaatacaatgtttgattttatgcactttgtcgctattaacatcctttttttcatgtagatttcaataattgagtaattttagaagcattattttaggaatatatagttgtcacagtaaatatcttgttttttctatgtacattgtacaaatttttcattccttttgctctttgtggttggatctaacactaactgtattgttttgttacatcaaataaacatcttctgtggaccaggaaaaaaaaaaaaaaaaaaa

SEQ ID NO: 285096 - DNA, 1000 bp, Homo Sapiens; identical to SEQ ID NO: 115620

SEQ ID NO: 285097 - DNA, 1000 bp, Homo Sapiens; identical to SEQ ID NO: 115621

SEQ ID NO: 285098 - DNA, 1000 bp, Homo Sapiens
ccgtaatatctgggccttggaaggaaggacacagggctctggaaggaggaggctgcatgcctgaaggctgggccttcgaccctggggatgggccacagggcaccaaacacatcatatgtctctctctttctattttggggtcccagggttttcatttcctggagacccgtggtctgtgtgcactggagcagagccaggctctcagttgcagcagggaaaagcctacatggggaactgcctcccgcaagctgtggtgtgagaagagccctggctggcagcaggagctgtgaagtttcatcccagccgggtgcatttagtagctgcctgaccatcttcctcccaggccctcagtttcttcatctgtagaatgagcagataggggccacagcagggattttcacacatcaaaggaggcagcctctgctctagttgatgtgaggatgagggggcggcctagaccccctgctgcccaggccgttgaggcaacactgggttcctggcttgacagctgtgggctggctgcccttgccagctcagacggctggcgagttttcagcttccctaagggactggcatagggttttgtggggtcaatgccaggaacctgggggaaactggatgcgttttatcctaagaagttcatccctcctgctcttactgtttccggccctggaggagaatgagggaggagagggttttctatgactgtgttagcttttattattagcaagagggctccttttgtaatttgtgcatgaaattcatgtcatttcctgggagaggagagggccgactggagagggtggggggcacactggggaagcaggcagaggtttccttcccttgtaggggggtggggggagtggggagagggggggctatccagttcgcctgatgagggctctcgaaccagccgttttgggttgtgttaaaggtgagaccttcctccattaatgtacaatctcgaactaactgctaataaagtggggttctgtttgta

SEQ ID NO: 285099 - DNA, 1000 bp, Homo Sapiens; identical to SEQ ID NO: 115622

SEQ ID NO: 285100 - DNA, 1000 bp, Homo Sapiens; identical to SEQ ID NO: 221012

SEQ ID NO: 285101 - DNA, 1000 bp, Homo Sapiens; identical to SEQ ID NO: 115623

SEQ ID NO: 285102 - DNA, 1000 bp, Homo Sapiens
acagcagcctgaaaaagggcaagaaatgcagcaagaccaagaaatcccccgaaccagtcaggtttacttacgctggatgtttgagtgtgaagaaataccggcccaagtactgcggttcctgcgtggacggccgatgctgcacgccccagctgaccaggactgtgaagatgcggttccgctgcgaagatggggagacattttccaagaacgtcatgatgatccagtcctgcaaatgcaactacaactgcccgcatgccaatgaagcagcgtttcccttctacaggctgttcaatgacattcacaaatttagggactaaatgctacctgggtttccagggcacacctagacaaacaagggagaagagtgtcagaatcagaatcatggagaaaatgggcgggggtggtgtgggtgatgggactcattgtagaaaggaagccttgctcattcttgaggagcattaaggtatttcgaaactgccaagggtgctggtgcggatggacactaatgcagccacgattggagaatactttgcttcatagtattggagcacatgttactgcttcattttggagcttgtggagttgatgactttctgttttctgtttgtaaattatttgctaagcatattttctctaggcttttttccttttggggttctacagtcgtaaaagagataataagattagttggacagtttaaagcttttattcgtcctttgacaaaagtaaatgggagggcattccatcccttcctgaagggggacactccatgagtgtctgtgagaggcagctatctgcactctaaactgcaaacagaaatcaggtgttttaagactgaatgttttatttatcaaaatgtagcctttggggagggaggggaaatgtaatactggaataatttgtaaatgattttaattttatattcagtgaaaagattttatttatggaattaaccatttaataaagaaatatttacctaataaaaaaaaaaaaaaaaaaa

SEQ ID NO: 285103 - DNA, 1000 bp, Homo Sapiens
tggatgccagcagtgagaggtgaagactctgggatctatagctgtgtttattatttggactctactccctttgcagcttcaaatcacagtgactccctggagatctgggtgactgataagccccctaaaccctctctgtcagcctggcccagcaccatgttcaagttagggaaggacatcacccttcagtgccgaggacccctgccaggtgttgaatttgtcctagaacatgatggagaagaagcacctcagcagttttcagaggatggagactttgtcatcaacaacgtagaaggaaaaggcattggaaactacagctgcagctaccgcctccaggcctaccctgatatctggtcagagcctagtgatcccctggagctggtgggggcagcagggcctgttgctcaggagtgcactgtagggaacattgtccgaagtagcctaatcgtggtggttgttgtagccttgggggtagtgctagccatagagtggaagaagtggcctcgactgcgaaccagaggctcagagacagacggaagagaccagaccattgcccttgaagagtgtaaccaagaaggagaaccaggcacccctgccaattctccttcatcaacctctcagagaatctctgtggaactgcccgttccaatataataatctcctcctttacaagagctttcctctcctctctcttgctctcagagacctataaatccaaccagttaccctgcaagtcagccccatctgctgttccttggtctctaatcacctgagctgggtaaaggggattctgggagttgagagctctgccagggtgagatgtttcctgaagagaggttccccacccctgtaactcctcactgtactgatttactggcgcatgaaattctattaaaaatgcattcttctgaataaaaagagtattcactatttaacttcaaaaaaaaaaaaaaaaaaaaaaaaaaaaaaaaaaaaaaaaaaaaaaaaaaaaaaaaaaaaa

SEQ ID NO: 285104 - DNA, 1000 bp, Homo Sapiens
gctctccaaaggccctgctccctgtcctctctcactttacagcttgtgtttcttctggattcagcttctcctaaacagacagtttaattatagttgcggcctggccccatcctcacttcctctttttatttcactgctgctaaaattgtgtttttacctactactttggtggttgtcctcttttcggcaaagttggagcgagtgccaagctctccatctgtggtcctttctgccaagagcgactcatagtaaccaggatgggagagcagctgccttattctgaatcccaaaaattacttgggggtgattgtcacagaggagggacagaaagggtatctgctgaccaccagcctgcctacccatgcccatgtctccattcctgctcaagcgtgtgtgctgggccggggagtccctgtctctcacagcatctagcagtattattaaatggattcattttaaaaatagctcctatattttgtaacatgtctcaaacactcatactgggttccacaatccactgttagaatacctatggttagggcttctgaactaaaataatggaaaattttaacaatttgtatagtgcctggatcattactagtgccataaccctgcttcttcaacatttcacagaacttctcttttatataaaggcaagagcacaaaatgagttcagatgatcacaaacaggtgagttttgttggagaagaaagttggagtaggagactttcacaagtggtttccatggagatagaatgaagcattctgtggtcaagtaagtttagggagctattcatgtttcacttgctttgtggagattcacactatgcactgggaaagtatctgaaaagtcttataataaagaaacaggcttaactttgtgtaagaacactgtttatcaatgtcatttggctatagaaacattttctcctgctgattgtgtgtgtgaaacatgtattaacattccaatgaactagcatttaataaagcacaattttgg

SEQ ID NO: 285105 - DNA, 1000 bp, Homo Sapiens
gtctctactaaaaatacaaaaaaaaaaaaaaattagccgggcgtggtggtgagtgcctgtaatcacagctacttgggaggctgagatgggagaatcacttgaacccgggaggcagaggttgcagtgagccgagattgtgcccctgcactccagcctgagcgacagtgagactctgtctcagtccatgaagatgtagaggagaaactggaactctcgagcgttgctgggggggattgtaaaatggtgtgaccactgcagaagacagtatggcagctttcctcaaaacttcagacatagaattaacacatgatcctgcaattccacttataggaattgacccacaagaaatgaaagcagggacttgaacccatatttgtacaccaatattcatagcagcttattcacaagacccaaaaggcagaagcaacccaaatgttcatcaatgaatgaatgaatggctaagcaaaatgtgatatgtacctaacgaagtatccttcagcctgaaagaggaatgaagtactcatacatgttacaacacggacgaaccttgaaaactttatgctaagtgaaataagccagacatcaacagataaatagtttatgattccacctacatgaggtactgagagtgaacaaatttacagagacagaaagcagaacagtgattaccagggactgaggggaggggagcatgggaagtgacggtttaatgggcacagggtttatgtttaggatgttgaaaaagttctgcagataaacagtagtgatagttgtaccgcaatgtgacttaatgccactaaattgacacttaaaaatggtttaaatggtcaattttgttatgtatattttatatcaatttaaaaaaaaacctgagccccaaaaggtattttaatcaccaaggctgattaaaccaaggctagaaccacctgcctatattttttgttaaatgatttcattcaatatcttttttttaataaaccatttttacttgggtgtttat

SEQ ID NO: 285106 - DNA, 1000 bp, Homo Sapiens
ttggtcataactcagccctttgggcggcctctgggcttgggcaccagctcatgccagccccagagggtcagggttggaggcctgtgcttgtgtttgctgctaatgtccagctacagacccagaggataagccactgggcactgggctggggtccctgccttgttggtgttcagctgtgtgattttggactagccacttgtcagagggcctcaatctcccatctgtgaaataaggactccacctttaggggaccctccatgtttgctgggtattagccaagctggtcctgggagaatgcagatactgtccgtggactaccaagctggcttgtttcttatgccagaggctaacagatccaatgggagtccatggtgtcatgccaagacagtatcagacacagccccagaagggggcattatgggccctgcctccccataggccatttggactctgccttcaaacaaaggcagttcagtccacaggcatggaagctgtgaggggacaggcctgtgcgtgccatccagagtcatctcagccctgcctttctctggagcattctgaaaacagatattctggcccagggaatccagccatgacccccacccctctgccaaagtactcttaggtgccagtctggtaactgaactccctctggaggcaggcttgagggaggattcctcagggttcccttgaaagctttatttatttattttgttcatttatttattggagaggcagcattgcacagtgaaagaattctggatatctcaggagccccgaaattctagctctgactttgctgtttccagtggtatgaccttggagaagtcacttatcctcttggagcctcagtttcctcatctgcagaataatgactgacttgtctaattcgtagggatgtgaggttctgctgaggaaatgggtatgaatgtgccttgaacacaaagctctgtcaataagtgatacatgttttttattccaataaattgtcaagaccaca

SEQ ID NO: 285107 - DNA, 1000 bp, Homo Sapiens; identical to SEQ ID NO: 221013

SEQ ID NO: 285108 - DNA, 1000 bp, Homo Sapiens
gtatatatcccctctactcttacttcccccaaatttaaagaagtatgggaaatgagaggcatttcccccaccccatttctctcctcacacacagactcatattactggtaggaacttgagaactttatttccaagttgttcaaacatttaccaatcatattaatacaatgatgctatttgcaattcctgctcctaggggaggggagataagaaaccctcactctctacaggtttgggtacaagtggcaacctgcttccatggccgtgtagaagcatggtgccctggcttctctgaggaagctggggttcatgacaatggcagatgtaaagttattcttgaagtcagattgaggctgggagacagccgtagtagatgttctactttgttctgctgttctctagaaagaatatttggttttcctgtataggaatgagattaattcctttccaggtattttataattctgggaagcaaaacccatgcctccccctagccatttttactgttatcctatttagatggccatgaagaggatgctgtgaaattcccaacaaacattgatgctgacagtcatgcagtctgggagtggggaagtgatcttttgttcccatcctcttcttttagcagtaaaatagctgagggaaaagggagggaaaaggaagttatgggaatacctgtggtggttgtgatccctaggtcttgggagctcttggaggtgtctgtatcagtggatttcccatcccctgtgggaaattagtaggctcatttactgttttaggtctagcctatgtggattttttcctaacatacctaagcaaacccagtgtcaggatggtaattcttattctttcgttcagttaagtttttcccttcatctgggcactgaagggatatgtgaaacaatgttaacatttttggtagtcttcaaccagggattgtttctgtttaacttcttataggaaagcttgagtaaaataaatattgtctttttgtatgtca

SEQ ID NO: 285109 - DNA, 1000 bp, Homo Sapiens
tcgggaagaggaaaggaacctcagaccttccagatcgcttcctctcgcaacaaactatttgtcgcaggaataaagatggctgctgaaccagtagaagacaattgcatcaactttgtggcaatgaaatttattgacaatacgctttactttatagctgaagatgatgaaaacctggaatcagattactttggcaagcttgaatctaaattatcagtcataagaaatttgaatgaccaagttctcttcattgaccaaggaaatcggcctctatttgaagatatgactgattctgactgtagagataatgcaccccggaccatatttattataagtatgtataaagatagccagcctagaggtatggctgtaactatctctgtgaagtgtgagaaaatttcaactctctcctgtgagaacaaaattatttcctttaaggaaatgaatcctcctgataacatcaaggatacaaaaagtgacatcatattctttcagagaagtgtcccaggacatgataataagatgcaatttgaatcttcatcatacgaaggatactttctagcttgtgaaaaagagagagacctttttaaactcattttgaaaaaagaggatgaattgggggatagatctataatgttcactgttcaaaacgaagactagctattaaaatttcatgccgggcgcagtggctcacgcctgtaatcccagccctttgggaggctgaggcgggcagatcaccagaggtcaggtgttcaagaccagcctgaccaacatggtgaaacctcatctctactaaaaatacaaaaaattagctgagtgtagtgacgcatgccctcaatcccagctactcaagaggctgaggcaggagaatcacttgcactccggaggtagaggttgtggtgagccgagattgcaccattgcgctctagcctgggcaacaacagcaaaactccatctcaaaaaataaaataaataaataaacaaataaaaaattcataatgtg

SEQ ID NO: 285110 - DNA, 1000 bp, Homo Sapiens
accaggatatgacagccaggggagcctggacggtctggaaccaggcctctgtggccctggcacaaaggaatgcgaggtcctccagggaaagggagctccatgcaggttgccagatcactctgaaaatcaagcatacaaaactagtgttaaaaagttccaaaatcaacaaaataacaaggtaatcagtaaaagaaattctgaattactgaccgtagaatatgaagaatttaaccatcaagattgggaaggaaattaaaaactgaaaatgtacaattatcacttaggctatctcaagagagatgatttgccttctcaaggaaaatggagacaggcatattcatgggtcatcaaaatccagacatacagtcaacactgagaatcagcacacaccatatttcaaatatagaagagtcatgtacttggcaaccagtaaattctgaaaaaaaagacacttacttattattaaaaccccaaatgcaatcagcgaaacatatttttactattcttggatgatagtcaaaatgatcataagccaggtttgcttccaccttccctgaaaattttactcacagatcatttgcaacaagcatagcttacttattgtttagggactgaacaatttattgggaagcaaactctttatatgctagaaagtacatttaaaagatgactacttacgcagggagatgcaggtctctctaaacgcatgaatgtatgtagtgtgtaggcactgtagtgagtgtatatatgctccacactacgtctgataaacacaaacctcagtattcagttattaggcacactagttttatacgcaactactgcttacatagtagactgttttgttgccaataatctttgaattgttctttaaaagaaactgaggttcagatacacataccatggaaaaatcttacttttcttgttactacacaaagctattttaaagaagatgctatgttgggagaagggcgaagttgtactatatgacataatcaat

SEQ ID NO: 285111 - DNA, 1000 bp, Homo Sapiens; identical to SEQ ID NO: 221014

SEQ ID NO: 285112 - DNA, 1000 bp, Homo Sapiens
aggaagacctggcagaggaggctccgtgcctgcagggcgggcgggccagcgggctgggcgaggcaggcatgagtgcctggctgcgggccatcggcttggagcgctatgaggagggcctggtgcataatggctgggacgacctggagtttctcagtgacatcaccgaggaggacttggaggaggctggggtgcaggacccggctcacaagcgcctccttctggacaccctgcagctcagcaagtgatagcggaggcaccacgaagctgtgaactcagagcccctccctgctaccaaggcccagctatggccccagggttgaaaagttatgagggtcagggcagtatctctctgcctatttattggggtgcctatttattggggatctgcattccccgctgcccaatcatttgcaatgccctaattagggcatcctgcccctcgccttttaggctcaggacggaaggtcagttgccatggttaccgaggaccctggttactctggtgctgtcctgttttactggaccccgcctcccagccccaggggtgcctgtgggggtccatttgggtacgtctgggcccccactttcaccagtttctgcggccttccaccgggcctgaaccacagcggaggagctccgctaagacctccccacccccgctgggggtgggggcgggtgtccgtccggaaatgaaggaatagcccgaggaccgggctggggtttatttaaactgttctgtgtgggtctggggagggagagcaccttaatattattggggttggttggggtggggcaggatctcagccataaagtgccagtttgcttagttctcactgtctcctggtctgtgctgccctgctctggggatgcacggcggcagggtgggggagggaggttcctcgcaggtctcagcccgggacagggtcttgcaagcagcctcctgggcagtcgtaagggttgcggcgtgatgtcttcaataaattaagttttatttggaaaa

SEQ ID NO: 285113 - DNA, 1000 bp, Homo Sapiens
aaatgctttaagttcactctggggaaagctggcctctgaaatcttaatgcagaattgggatgcagccatggaagaccttacacggttaaaagagaccatagataataattctgtgagttctccacttcagtctcttcagcagagaacatggctcattcactggtctctgtttgttttcttcaatcaccccaaaggtcgcgataatattattgacctcttcctttatcagccacaatatcttaatgcaattcagacaatgtgtccacacattcttcgctatttgactacagcagtcataacaaacaaggatgttcgaaaacgtcggcaggttctaaaagatctagttaaagttattcaacaggagtcttacacatataaagacccaattacagaatttgttgaatgtttatatgttaactttgactttgatggggctcagaaaaagctgagggaatgtgaatcagtgcttgtgaatgacttcttcttggtggcttgtcttgaggatttcattgaaaatgcccgtctcttcatatttgagactttctgtcgcatccaccagtgtatcagcattaacatgttggcagataaattgaacatgactccagaagaagctgaaaggtggattgtaaatttgattagaaatgcaagactggatgccaagattgattctaaattaggtcatgtggttatgggtaacaatgcagtctcaccctatcagcaagtgattgaaaagaccaaaagcctttcctttagaagccagatgttggccatgaatattgagaagaaacttaatcagaatagcaggtcagaggctcctaactgggcaactcaagattctggcttctactgaagaaccataaagaaaagatgaaaaaaaaaactatcaaagaaagatgaaataataaaactattatataaagggtgacttacattttggaaacaacatattacgtataaattttgaagaattggaataaaattgattcattttaaaaaaaaa

SEQ ID NO: 285114 - DNA, 1000 bp, Homo Sapiens; identical to SEQ ID NO: 221015

SEQ ID NO: 285115 - DNA, 1000 bp, Homo Sapiens; identical to SEQ ID NO: 221016

SEQ ID NO: 285116 - DNA, 1000 bp, Homo Sapiens
tttgggaagctgctgctcttgaatgggttttggaagttacacaaaatctccctctaaccacgggtctgtgtggcggcatgcccctgggttggggtgggtgggaggattcgtgagctgcacacagacagtccctttctctcctcccaagtgagggaggagacaggcccaaggcggaggccctccgagggagcatttagggacatctcaggaattcagaccgcacctggccaggcccacagctgtttgcctggcattgttcccccctttttcttcccataggcatttttgtttacttgaacaatgacctgagtgtcctaggcattcactcggagcctggatgatgggggctggttctacagaatgagccactggcattcgtgcccaggaccagtgagagcgttcccagtcatggggggatgacccttggtcccacggggaacacactgctctgtagaatgcggtagcctggatggagggtctgcaggcttaggctgcagcaggcctgccatgggtgtgaacccatgtccaggcacgcaccgacacacatgcacgcacgcacccctcttaattgaaccaagtgggtcctgtgtttctcttttctgccccgtagtgaggttctgttccttggtgcggcttcccttgcaccgttaggattctgtctggcatgcctgcagccgaggaagcccaggaccagccggccctgtgaattggagggtggcacagggaccgagcgggccccaggctccagcagccccaccttggacagcttctttttcttctttgaattaggactggagcgggtggggccagggcggtggtgggaaccggtagggcctagatgaggggcaggcagtcaggcagaaatgggcaagttcagggtcagattctgtcgttatttaatattttgttcatcatggactttttctgcatttattttgatttttaacgttgcattaaagtagtattatttgtcctgaaaaaaaaaaaaaaaaaaaaaaaa

SEQ ID NO: 285117 - DNA, 1000 bp, Homo Sapiens
aggcccgagggcttactgctgatggcagaaagcgacccagccaactgcgagccacccagtgagaaggccctgctttcagagccccccgagccaggtggggaagacgggccggtcaacctgcctcatgccagcaggcccttcatcttggagagtcgcttccagagcttacagcaggggacgtgcttagagacagaggatgtggcccagcaacaaaacctgctgttgcagaaggtaaaggcagagctggaagaagccaagaggttccacatcagcctccaggagtcctatcacagcctaaaggagaggtctctgactgacctgcagctgttgctggagtcccttcaggaggagaagtgtaggcaagcattgatggaagaacaggtgaatggtcgcctgcagggacagctgaatgagatttacaacctcaaacacaatctggcctgcagcgaagagagaatggcctatctatcctatgagagagccaaggaaatatgggagatcacggagaccttcaagagccgaatatccaagctggagatgctacagcaagtcacccaactggaggcagcggagcacctccaaagccgtcccccgcagatgttgttcaagttcctgagtccgcgcctctcactggcaaccgtcctcttggtctttgtctccaccttgtgtgcctgcccctcgtcactgatcagctcacgcctgtgcacctgcaccatgctgatgctgatcgggcttggggtcctggcctggcagaggtggcgcgccatccctgccacagactggcaggaatgggtcccctccaggtgtagactgtactccaaggactctgggcctccagcagatggaccttaaggggccaggagggccacctgccttagcttgctagctccctccctcctcctgggtgctgagggcatccagcaagcccctccacagctcttgcttgccgattatgtaaccaccagcctggtgaaatggatatagacgcccacctgcctca

SEQ ID NO: 285118 - DNA, 1000 bp, Homo Sapiens; identical to SEQ ID NO: 115625

SEQ ID NO: 285119 - DNA, 1000 bp, Homo Sapiens
tgccaagggtatccggaggattgtggctgtcacaggtgccgaggcccagaaggccctcaggaaagcagagagcttgaagaaatgtctctctgtcatggaagccaaagtgaaggctcagactgctccaaacaaggatgtgcagagggagatcgctgaccttggagaggccctggccactgcagtcatcccccagtggcagaaggatgaattgcgggagactctcaaatccctaaagaaggtcatggatgacttggaccgagccagcaaagccgatgtccagaaacgagtgttagagaagacgaagcagttcatcgacagcaaccccaaccagcctcttgtcatcctggagatggagagcggcgcctcagccaaggccctgaatgaagccttgaagctcttcaagatgcactcccctcagacttctgccatgctcttcacggtggacaatgaggctggcaagatcacgtgcctgtgtcaagtcccccagaatgcagccaatcggggcttaaaagccagcgagtgggtgcagcaggtgtcaggcttgatggacggtaaaggtggtggcaaggatgtgtctgcacaggccacaggcaagaacgttggctgcctgcaggaggcgctgcagctggccacttccttcgcccagctgcgcctcggggatgtaaagaactgagtggggaaggaggaggctcccactggatccatccgtccagccaagagctcttcatctgctacaagaacatttgaatcttgggacctttaaagagcccctcctaacccagcagtaactggaacacacttgggagcagtcctatgtctcagtgccccttaaatttctgccctgagccctccacgtcagtgccatcggtctagaaccactaaccccgcattgctgttgatcgtcacgctcgcatctatagataacggctctccagacctgagctttccgcgtcagcaagtaggaatcgtttttgctgcagagaataaaaggaccacgtgc

SEQ ID NO: 285120 - DNA, 1000 bp, Homo Sapiens; identical to SEQ ID NO: 221017

SEQ ID NO: 285121 - DNA, 1000 bp, Homo Sapiens
taaatctgctcaagataaaatgtaacttggaaagcgaggaaacactaaacatgtttttacctgctctctctatagagaaggaaataaaatataaatataagattaacacagtggaaggacaaatctttgaagccaaaattctagttttccaatataaggtttaacttacagttttttatgtagccaaaggtaaacggttttctgaatcttgcctaggtgtttcatttatctctaaaattctaaaaagcataaatcattcaaatcttcaaaccaaggcagaaataattttatgtcgctatagtataaaaacattaataagatagcacattgacttttaaagggaaaagtaaatataacttagcatgtaaactcatttcggctaccatttgctccaaattccctagaacagtggtttttaccactgtactccaaccccgtttttaagcaatggaactctttcttcaaacaaaagcttatgcagaacatctctgtgaaacgctgctgagtgagaactgctttcattgaagctggaagccatcataccttactgccttgaaacccctaggactcagctaagtatttgcctaaccctgaccagggaatgccttggttctgtcaattgctgacatctgagaacacagaataatccatcatttttaatttcaagatattggtacattttataggtatcaaagcaatggcttttcttttgcaacagttaatgtatttattaacttaataattactttatgtcttctataaaccaggctgttaatacaatgatgacaaacaaaactggcaagatcactaaaaaataagtgaataaacaaataagtagtaaaataaggtaagaagtaaatatgtaaaagagataatttcaagcataagtgcaatgtaaataataaagtaagcatttaaaattcaaaaaaaaaaaaaaaaaaaaaaaaaaaaaaaaaaaaaaaaaaaaaaaaaaaaaaaaaaaaaaaaaaaaaaaaaaaaa

SEQ ID NO: 285122 - DNA, 1000 bp, Homo Sapiens; identical to SEQ ID NO: 115626

SEQ ID NO: 285123 - DNA, 1000 bp, Homo Sapiens
ggaaaccatgaccaccttggcaatgtctctgcccagattgcatactctaagatctccaagcgctggaacttccccagccctttctaccgcctgcacttcaagatcccacagaccaatgtgtctgtggccatttttatgctggacacagtgacactatgtggcaactcagatgacttcctcagccagcagcctgagaggccccgagacgtgaagctggcccgcacacagctgtcctggctcaagaaacagctggcggcggccagggaggactacgtgctggtggctggccactaccccgtgtggtccatagccgagcacgggcctacccactgcctggtcaagcagctacggccactgctggccacatacggggtcactgcctacctgtgcggccacgatcacaatctgcagtacctgcaagatgagaatggcgtgggctacgtgctgagtggggctgggaatttcatggacccctcaaagcggcaccagcgcaaggtccccaacggctatctgcgcttccactatgggactgaagactcactgggtggctttgcctatgtggagatcagctccaaagagatgactgtcacttacatcgaggcctcgggcaagtccctctttaagaccaggctgccgaggcgagccaggccctgaactcccatgactgcccagctctgaggcccgatctccactgttgggtgggtggcctgccgggaccctgctcacaggcaggcttttcctccaacctgtggcgctgcagcagggcaggaaggggaaacacagctgatgaactgtggtgccacatgacccttgtggcacagatgcccacgtatgtgaaacacacatggacatgtgtcccagccacagtgttatgctctgtggctggctcacctttgctgagttccggggtgcaatgggggagggagggagggaaagcttcctcctaaatcaagcatctttctgttactgatgttcaataaaagaatagttgccaaggctg

SEQ ID NO: 285124 - DNA, 1000 bp, Homo Sapiens; identical to SEQ ID NO: 221018

SEQ ID NO: 285125 - DNA, 1000 bp, Homo Sapiens; identical to SEQ ID NO: 115628

SEQ ID NO: 285126 - DNA, 1000 bp, Homo Sapiens
ctgggagcgatgatgagacaggcaagttacaggggagtggggtgtccctggcctctaagaagtcccgactgtcctcctcttctagcaatgacagtgggaataaggttggcatccagcttcccgaggtggagctgtcagtttccacaaagaaagagtagcaggcctttgtatgtgtgtacatatatatatatataacaaaacatcagccttgggtggtgtgttcctatataaactccaaagggaaacacaccgactgcctcagcaatcatgcaaagaccttgcctggcccggtggcaagcgctgaaaaaccgaccgcctgtaggctcctggaactatacagataggtaaagagttccaagttcgtccagcccatgtgcaaagtcaacagtatttgccttaagatttcatatatatatatttttttgcattgactgctgagagctcctgtttactaagcaagcttttgtgtttattatcctcatttttactgaacattgttagttttggggtaatggaaacccactttttcattgtaatgactttgggggcttttgttagtaagggtgggtggggtgatgggttgcagacggaggtcaggtcttcctctttcctgagactggatctgttcaaacagcaaacgcccacagatggcccagaggtggtggtagtcagggtgtgtgggtgtttttagggttctttagtgttgtttctttcacccaggggtggtggtcccagccagtttggtgctgacggtgagaggaaattagaatctgtttgcaaattgtccaacccaccccctcaacatgaggggcttccattttctgtgttttgtaagggaactgtttccttcatgccgccatgttcctgatattagttctgatttctttttaacaaatgttatcatgattaagaaaatttccagcactttaatggccaattaactgagaatgtaagaaaattgatgctgtacaaggcaaataaagctgtttattaaccttga

SEQ ID NO: 285127 - DNA, 1000 bp, Homo Sapiens; identical to SEQ ID NO: 115629

SEQ ID NO: 285128 - DNA, 1000 bp, Homo Sapiens; identical to SEQ ID NO: 221021

SEQ ID NO: 285129 - DNA, 1000 bp, Homo Sapiens; identical to SEQ ID NO: 115630

SEQ ID NO: 285130 - DNA, 1000 bp, Homo Sapiens
gaaggccactggccgctactacgccatgaagatcctgcgaaaggaagtcatcattgccaaggatgaagtcgctcacacagtcaccgagagccgggtcctccagaacaccaggcacccgttcctcactgcgctgaagtatgccttccagacccacgaccgcctgtgctttgtgatggagtatgccaacgggggtgagctgttcttccacctgtcccgggagcgtgtcttcacagaggagcgggcccggttttatggtgcagagattgtctcggctcttgagtacttgcactcgcgggacgtggtataccgcgacatcaagctggaaaacctcatgctggacaaagatggccacatcaagatcactgactttggcctctgcaaagagggcatcagtgacggggccaccatgaaaaccttctgtgggaccccggagtacctggcgcctgaggtgctggaggacaatgactatggccgggccgtggactggtgggggctgggtgtggtcatgtacgagatgatgtgcggccgcctgcccttctacaaccaggaccacgagcgcctcttcgagctcatcctcatggaagagatccgcttcccgcgcacgctcagccccgaggccaagtccctgcttgctgggctgcttaagaaggaccccaagcagaggcttggtggggggcccagcgatgccaaggaggtcatggagcacaggttcttcctcagcatcaactggcaggacgtggtccagaagaagctcctgccacccttcaaacctcaggtcacgtccgaggtcgacacaaggtacttcgatgatgaatttaccgcccagtccatcacaatcacaccccctgaccgctatgacagcctgggcttactggagctggaccagcggacccacttcccccagttctcctactcggccagcatccgcgagtgagcagtctgcccacgcagaggacgcacgctcgctgccatcaccgctgggtggttttttacccctgcc

SEQ ID NO: 285131 - DNA, 1000 bp, Homo Sapiens; identical to SEQ ID NO: 115631

SEQ ID NO: 285132 - DNA, 873 bp, Homo Sapiens; identical to SEQ ID NO: 115632

SEQ ID NO: 285133 - DNA, 1000 bp, Homo Sapiens
cggcctgcgacctggcgctccccgcctgcaccaccgacgccgcgcacccagttgccgcgtcgctgccactgctggccgggaccctgctgctgctgggggcgtccgctgctccctgagtgccccactccggagttatcctgctccccacctccgggcgtcctgccctgttccccgtcctgagccgccacttccagcgaacacacacaggtgtcctgccgttggaccttcacctcctagagataaaccagcctcagctggcgcagcggggcccttcttccctccgcatccccttcagggagcaggagcccagggcgccctgggagctgagcctgggacttccaggacctcccctcaggttgttctctgattcttcctcccaaccccagagactgcagatttgtgccatgcggctgcctgcaccccagacaataaagggaccaaaaccacccaacccccaccctgcctctatcctaaggaagaccaagcaggcctggacccagagacgtcccccatcgtgggacacgacacacccagaccgcgtgccccaccgtcttagcttcaatcctggcagcacctggtagacccaaggacttgggtggatcaggacacctgaagaagagaagcttccggcaaccctgcaacccacccaaggaggctactggatcggggattcccaggggggctttgacacagtcctctgctgtctccccactaggatcattccacacccctgcacctgaccaagggaccaatgaggcagaggcttgccccaagtcacagccactcagatgcttcctgccccccagtgcccattccaggtcaccagatccaaggagcgcttgaggagctctgggtacagggcagcaacccagagcccatgggccctcccgggacatctggatgctgggcatagatttctcaacaaggaagactcccctgcctcctcaaggtctccattctcctaggagacaaagcaataataaaaggtgttagacaatgt

SEQ ID NO: 285134 - DNA, 1000 bp, Homo Sapiens
gtcgtcatccccggagtccctatacagaggtcctgccatggaaccttcccctccccgtgcgctctggggactgagcccatgacaccaaacctgccccttggctgctctcggactccctaccccaaccccagggactgcaggttgtgccctgtggctgcctgcaccccaggaaaggagggggctcaggccatccagccaccacctacagcccagtgggtaccaggcaggctcccttcctggggaaaagaagcacccagaccccgcgccccgctgatctttgcttcagtccttgaatcacctgtgggacttgaggactcgggatcttcaggacgcctggagaagggtggtttcctgccaccctgctggccaaggaggctcctggggtggggatcaccagggggattttgacacagccttcggctgccccccactaagttaattccacacccctgtaccccccagggggccctctgcctcatggcaaaggcttgccccaaatctcaacttctcagacgttccatacccccacatgccaatttcagcacccaactgagatccgaggagctcctgggaagccctgggtgcaggacactggtcgagagccaaaggtccctccccagacatctggacactgggcatagatttctcaagaaggaagactcccctgcctccccagggcctctgctctcctgggagacaaagcaataataaaaggaagtgtttgtaatcccagcactttgggaggccgaggtgggcggatcacgaggtcaggagatggagaccatcctggctaacacggtgaaaccccttatctatgcgcctgtagtcccagctacccaggaggctgaagcaggataatcgcttgaacccgggcggcggagattgcagtgagccgaggtcatgccactgcactgcagcctgggcgacagagcgagattctgcctcaaaaataaacaaataaattttaaaaataaataaataataaaaggaagtgttagac

SEQ ID NO: 285135 - DNA, 1000 bp, Homo Sapiens; identical to SEQ ID NO: 221023

SEQ ID NO: 285136 - DNA, 1000 bp, Homo Sapiens
ccactgtaatcacagggactaccagaatatttcaagaaatggtgcatcttcccgaaacctgaagaaatttatagaaagcttgtctagaaacaaggtgttggactatcccgccatcgttatatatgccatgattggaaatgatgtctgcagtgggaagagtgacccagtcccagccatgaccactcctgagaaactctactccaacgtcatgcagactctgaagcatctaaattcccacctgcccaatggcagccatgttattttgtatggcttaccagatggaacctttctctgggataatttgcacaacagatatcatcctctcggccagctaaataaagacatgacctatgcgcagttgtactccttcctgaactgcctccaggtcagcccctgccacggctggatgtcttccaacaagacgttgcggactctcacttcagagagagcagagcaactctccaacacactgaaaaaaattgcagccagtgagaaatttacaaacttcaatcttttctacatggattttgccttccatgaaatcatacaggagtggcagaagagaggcggacagccctggcagctcatcgagcccgtggatggattccaccccaacgaggtggctttgctgttgttggcggatcatttctggaaaaaggtgcagctccagtggccccaaatcctgggaaaggagaatccgttcaacccccagattaaacaggtgtttggagaccaaggcgggcactgagcctctcaggagcatgcacccctggggagcacagggaggcagaggcttgggtaaactcattccacaaaccctatgggggctgccacgtcacaggcccaaaggactcttcttcagcagcatctttgcaaaatgtctttctctcaatgaagagcatatctggacgactgtgcaatgctgtgtgctcccggggatcagtaacccttccgctgttcctgaaataacctttcataaagtgctttgggtgccattcca

SEQ ID NO: 285137 - DNA, 959 bp, Homo Sapiens
gggcatgaatatcagacgctagggggacagccactgtgttgtctgctaccctcatcctggtcactgcttctgctataacagccctaggccaggaatatgaacaagccgctgctttggatctctgtcctcaccagcctcctggaagcctttgctcacacagacctcagtgggaaggtgtttgtatttcctagagaatctgttactgatcatgtaaacttgatcacaccgctggagaagcctctacagaactttaccttgtgttttcgagcctatagtgatctctctcgtgcctacagcctcttctcctacaatacccaaggcagggataatgagctactagtttataaagaaagagttggagagtatagtctatacattggaagacacaaagttacatccaaagttatcgaaaagttcccggctccagtgcacatctgtgtgagctgggagtcctcatcaggtattgctgaattttggatcaatgggacacctttggtgaaaaagggtctgcgacagggttactttgtggaagctcagcccaagattgtcctggggcaggaacaggattcctatgggggcaagtttgataggagccagtcctttgtgggagagattggggatttgtacatgtgggactctgtgctgcccccagaaaatatcctgtctgcctatcagggtacccctctccctgccaatatcctggactggcaggctctgaactatgaaatcagaggatatgtcatcatcaaacccttggtgtgggtctgaggtcttgactcaacgagagcacttgaaaatgaaatgactgtctaagagatctggtcaaagcaactggatactagatcttacatctgcagtctttcttctttgaatttcctatctgtatgtctgcctaattaaaaaaatatatattgtattatgctacctgcaaaaaaaaaaaaaaaaaaaaaaaaaaaaaa

SEQ ID NO: 285138 - DNA, 473 bp, Homo Sapiens
aggcacagacaccaaggacagagacgctggctaggccgccctccccactgttaccaacatgaagctgctcgcagcaactgtgctactcctcaccatctgcagccttgaaggagctttggttcggagacaggcaaaggagccatgtgtggagagcctggtttctcagtacttccagaccgtgactgactatggcaaggacctgatggagaaggtcaagagcccagagcttcaggccgaggccaagtcttactttgaaaagtcaaaggagcagctgacacccctgatcaagaaggctggaacggaactggttaacttcttgagctatttcgtggaacttggaacacagcctgccacccagtgaagtgtccagaccattgtcttccaaccccagctggcctctagaacacccactggccagtcctagagctcctgtccctacccactctttgctacaataaatgctgaatgaatcc

SEQ ID NO: 285139 - DNA, 464 bp, Homo Sapiens; identical to SEQ ID NO: 221025

SEQ ID NO: 285140 - DNA, 613 bp, Homo Sapiens
gagttgagcacagagggacagaggcacggaacccccagaaatgtccctcctcagaaacaggctccaggccctgcctgccctgtgcctctgcgtgctggtcctggcctgcattggggcatgccagccagaggcccaggaaggaaccctgagccccccaccaaagctaaagatgagtcgctggagcctggtgaggggcaggatgaaggagctgctggagacagtggtgaacaggaccagagacgggtggcaatggttctggagcccgagcaccttccggggcttcatgcagacctactatgacgaccacctgagggacctgggtccgctcaccaaggcctggttcctcgaatccaaagacagcctcttgaagaagacccacagcctgtgccccaggcttgtctgtggggacaaggaccagggttaaaatgttcataaaagccaggtgtggttgtggcgggtgcctgtagtcccagctactcaggaggctgaggtaggatgatggcttgagcccaggagttcgagaccagcctgggcaacacagcgagatctcttgggggtaaaacaaaaagaaaaaaaaaagttcatacttctccaataaataaagtctcacctg

SEQ ID NO: 285141 - DNA, 1000 bp, Homo Sapiens; identical to SEQ ID NO: 221026

SEQ ID NO: 285142 - DNA, 1000 bp, Homo Sapiens
taatccattcacattcctcagtttcaccacctccctcttccagactgcactctctgtcatcagtcccctcctttctaacagaaatggggttatgattttgaaggctgtgggttcagggagtctttgccaatcctgttggccctaaactatcaaggaggctccatttcaccatttgattttttgcatttcaggaggcaactgattgtttcgatatgtacatattactcacgtataccccatttccttccagtcagcccaacattttccaccagtctgtccccatctctgaaatccttccttctctttccccctaagtcttttgagtgtcatcatgtactggtggtttctcggttccatctcatccatttccttttcaatggagactacagcgtcagccagctcagccttggcttttaactcaatattccagtccataggggtggttaaaagttgctgcaaggctgcaggcactggcagtgggaagaggcagacgactagatgacttctgcacttttagctggttgaaaagtaccactcccactctgaacatctggccgtccctgcaaagagtgtactgtgcttgaagcagagcactcacacataaatggctgtgtgtggaattgcttgccaaagaagtttctagcctttccctttcccctaactgcatcagggaagaattcttatctctagcttggtttccacatgaggtttttctgagaagggcttgggacaagaagtctgtcatgttagttaagcaggcaagaaatcctactaatccagttttgtttgaaagttgtttgtccgtatgattttttaaaagtcaagtttaatttcaaaaaaccttttttttctgagattacttttggggtaatatttaaaatgagagacattttgtaaccctgtaaaatacatagggaatataacattccagtgtatacaaagaaggcaaattctttaatcaaataaagcgtattataaaatgagaaaaaaaaaaaaaaaa

SEQ ID NO: 285143 - DNA, 1000 bp, Homo Sapiens
gttgatagcagatggatcaatattagtaaccccatccaagattgaactgtgaaagagaggttccaggggtatctccctcagtgccagttacttagtgatgtgttacccaggatgcagcaggtgtgtgcaggtatcttgctctctaggcctgtgtgtgtgtgtgagtgtgtgtgtatatgggtgtgggtgtgtttgtgtgtggtggttgtggggggggtgttggaggttctatttcatttaaaaatgtattcatttccctggccccacagatgcttccctccatactttttatttgctctgtttcctcagatttattttgtcttgccccattgcctctccttccttgaactctttccttttcaatctcaactcattcactgctgttgctcatttgcccttttccatgtattttttcctacttaggattttccactctatctttgtggttcatgaggactttgcctcttctcctgcctcattccctgactttctctagttagatgtcagtcctaaataggttttcctcacttcaggcctcacccctcaccttgtttttttgggggctccagggaccaatctggggctggaaatgttaggaggttgccttggtgctgccccagatctgtccagcagggggcagtaagtgatcttggtagtatccctggctgctaagcccttggcaggggtggtcctttctacattcccattcacttaacagctcttttgggattgggtgtttcattccatttctgcccactccctctcctctcctctctggtaggtttaattttatgctttccctgattccagctttctgcttcctgaggactcccgctccccccaccccaaagtttgtctgtggtgttatagtggtaactgcagttcctcctctggaatgtagactgtatatgtttaataactcaccttctctatccttgctcaaaatgtgggataacgcgatgactgtgaccctggttggaaattaaacttgttttatgca

SEQ ID NO: 285144 - DNA, 1000 bp, Homo Sapiens; identical to SEQ ID NO: 221029

SEQ ID NO: 285145 - DNA, 1000 bp, Homo Sapiens
atgaggctcgccaggagctgcaccgcattatcaatgaccgggagatgagggacgccataatcctcatcttcgccaacaagcaggacctgcccgatgccatgaaaccccacgagatccaggagaaactgggcctgacccggattcgggacaggaactggtatgtgcagccctcctgtgccacctcaggggacggactctatgaggggctcacatggttaacctctaactacaaatcttaatgagcattctccacccatcccctggaaggagagaaatcaaaaacccattcataggattatcgccaccatcacctctttcaattgccactttctcttcttttgaatttgaactctggagttactgttctacagtttggcggggacggggcttgggggttttctcttttgtttgtttccctttctttttcctttttttttttttttttttgttggctttgcgttaggatggctctgatctgacatttgacatgaacacaaagttgccaagatgctccttgttgacttccagcagaatgggaatgggggaaacacagcagttcttgggtaaaagtccctttgtaataataggtttgggatttttttatttcgagagaatctttcattttcctatgtatgcttttttccttttttgcccagtttccttatcacttgctgtagatggcttattttgcattcatgcagactatgttgcaagtctgtttcatctagtaaactgaaaattattgcttaatcaaactgccgtttgtcttttatatttaaggccttccccccccttccttatgagttctaacttagtaatttcaaatgtgaccttttatatctaagaccagtatagtaaacttagcccacagtggcaaataatgagtaatattgtaatatgttccagttgcacctcagtatgttaaacaggtaatgtaagaagttctctgaaatgtcagcaagtaagttctgaaacacatcatgcatgagtaggaataaac

SEQ ID NO: 285146 - DNA, 1000 bp, Homo Sapiens
ttactggcctttttcatttatctataatttacctaagattacaaatcagaagtcatcttgctaccagtatttagaagccaactatgattattaacgatgtccaacccgtctggcccaccagggtccttttgacactgctctaacagccctcctctgcactcccacctgacacaccaggcgctaattcaaggaatttcttaacttcttgcttctttctagaaagagaaacagttggtaacttttgtgaattaggctgtaactactttataactaacatgtcctgcctattatctgtcagctgcaaggtactctggtgagtcaccacttcagggctttactccgtaacagattttgttggcatagctctggggtgggcagttttttgaaaatgggctcaaccagaaaagcccaagttcatgcagctgtggcagagttacagttctgtggtttcatgttagttaccttatagttactgtgtaattagtgccacttaatgtatgttaccaaaaataaatatatctaccccagactagatgtagtattttttgtataattggatttcctaatactgtcatcctcaaagaaagtgtattggttttttaaaaaagaaagtgtatttggaaataaagtcagatggaaaattcattttttaaattcccgttttgtcactttttctgataaaagatggccatattaccccttttcggccccatgtatctcagtaccccatggagctgggctaagtaaataggaattggtttcacgcctgaggcaattagacactttggaagatggcataacctgtctcacctggacttaagcatctggctctaattcacagtgctcttttctcctcactgtatccaggttccctcccagaggagccaccagttctcatgggtggcactcagtctctcttctctccagctgactaaactttttttctgtaccagttaatttttccaactactaatagaataaaggcagttttctaaaaaaa

SEQ ID NO: 285147 - DNA, 1000 bp, Homo Sapiens
tgaacctgtgggacactgcgggccaggaggagtatgaccgcctccgtacactctcctaccctcagaccaacgttttcgtcatctgtttctccattgccagtccgccgtcctatgagaacgtgcggcacaagtggcatccagaggtgtgccaccactgccctgatgtgcccatcctgctggtgggcaccaagaaggacctgagagcccagcctgacaccctacggcgcctcaaggagcagggccaggcgcccatcacaccgcagcagggccaggcactggccaagcagatccacgctgtgcgctacctcgaatgctcagccctgcaacaggatggtgtcaaggaagtgttcgccgaggctgtccgggctgtgctcaaccccacgccgatcaagcgtgggcggtcctgcatcctcttgtgaccctggcacttggcttggaggctgcccctgccctccccccaccagttgtgccttggtgccttgtccgcctcagctgtgccttaaggactaattctggcacccctttccagggggttccctgaatgcctttttctctgagtgcctttttctccttaaggaggcctgcagagaaaggggctttgggctctgcccccctctgcttgggaacactgggtattctcatgagctcatccaagccaaggttggacccctccccaagaggccaacccagtgccccctcccattttccgctactgaccagttcatccagctttccacacagttgttgctgcctattgtggtgccgcctcaggttaggggctctcagccatctctaacctctgccctcgctgctcttggaattgcgcccccaagatgctctctcccttctccaatgagggagccacagaatcctgagaaggtgaatgtaccctaacctgctcctctgtgcctaggccttacgcatttgctgactgactcagcccccatgcttctggggacctttcctacccccatcagcatcaataaaacctcctgtctcc

SEQ ID NO: 285148 - DNA, 1000 bp, Homo Sapiens; identical to SEQ ID NO: 221030

SEQ ID NO: 285149 - DNA, 1000 bp, Homo Sapiens; identical to SEQ ID NO: 115639

SEQ ID NO: 285150 - DNA, 1000 bp, Homo Sapiens
tctgagaaggaacccttgaaactcgaccccagcaggaaggcccctccccccgggcccagcaggcccgcggtcaggctggtggacgccgtaggggacgctaagcctcagcccgttgattcctgggtctagcttgcatgcctgggcccaggcccagcctcttgttcttagggcttggatcgtggaagaagggccaccctgagcagatcgtgccgtggagcttggagccccctggcggcaggggttggcagcgcctcgccccagccaagcctgactttggggacaccctcctgcccccccaccccactccccccatcctacctaactccctaggcctgagttagctgtttactgacatggtgctgtgtgtgagcgagtgacagaaggcccgaggaggccgactgggctgctggggcagggcccagggaggtggcagggaagggtgcctggctgggctttggggctggtgggataggagggtgcccctgggaacacagtgccccagtggtgcgggccaggtctggcgccaggggcaggcagctaggcagggagggggctgggaaagaacttggacttctaaaggcggagggtctccctgggcaccctgcaggcaggcagaccacggtgtggggggtgccccacaaggcccagccctgggcaaggaagctttggaagcagcaaggtgggggtcaggctacaggtgccccacctccccagagccctgcagtcacgtgaggcccctgtgcagtagagagcctttctccagcccatgctggctggggccggggctgccgcatctgcctggagcctgggcagcacctccgggactgaccttcggcagtggctgggggactgctttcagtgcctgctgttcgtgactcagaaacagaagaaaaacactgagaaaaagcattaaaaataagccaaaataagactattggtaaacacctaaatttttgtaagaaaatttaaaaattaaagcagcaaaggaaaaaaaaaaaaa

SEQ ID NO: 285151 - DNA, 1000 bp, Homo Sapiens
gctccggacctcgcctcctcctgctctccctgggcctcagcctcctgctgcttgtggttgtctgtgtgatcggatcccaaaactcccagctgcaggaggagctgcggggcctgagagagacgttcagcaacttcacagcgagcacggaggcccaggtcaagggcttgagcacccagggaggcaatgtgggaagaaagatgaagtcgctagagtcccagctggagaaacagcagaaggacctgagtgaagatcactccagcctgctgctccacgtgaagcagttcgtgtctgacctgcggagcctgagctgtcagatggcggcgctccagggcaatggctcagaaaggacctgctgcccggtcaactgggtggagcacgagcgcagctgctactggttctctcgctccgggaaggcctgggctgacgccgacaactactgccggctggaggacgcgcacctggtggtggtcacgtcctgggaggagcagaaatttgtccagcaccacataggccctgtgaacacctggatgggcctccacgaccaaaacgggccctggaagtgggtggacgggacggactacgagacgggcttcaagaactggaggccggagcagccggacgactggtacggccacgggctcggaggaggcgaggactgtgcccacttcaccgacgacggccgctggaacgacgacgtctgccagaggccctaccgctgggtctgcgagacagagctggacaaggccagccaggagccacctctcctttaatttatttcttcaatgcctcgacctgccgcaggggtccgggattgggaatccgcccatctgggggcctcttctgctttctcgggaattttcatctaggattttaagggaaggggaaggatagggtgatgttccgaaggtgaggagcttgaaacccgtggcgctttctgcagtttgcaggttatcattgtgaactttttttttttttaagagtaaaaagaaatatacctaaa

SEQ ID NO: 285152 - DNA, 997 bp, Homo Sapiens
cgcgcttgcgcattgagtcccactccttcgacctctgccgcagcccgtgccgccgccgcctcctgggaagagaggaagcgggagaggagcccacgtcgcctgtcacccaatatctccagccgcgcagtcccgaagagtgtaagatgttcgcctgcgccaagctcgcctgcaccccctctctgatccgagctggatccagagttgcatacagaccaatttctgcatcagtgttatctcgaccagaggctagtaggactggagagggctctacggtatttaatggggcccagaatggtgtgtctcagctaatccaaagggagtttcagaccagtgcaatcagcagagacattgatactgctgccaaatttattggtgcaggtgctgcaacagtaggagtggctggttctggtgctggtattggaacagtctttggcagccttatcattggttatgccagaaacccttcgctgaagcagcagctgttctcatatgctatcctgggatttgccttgtctgaagctatgggtctcttttgtttgatggttgctttcttgattttgtttgccatgtaacaaattactgcttgacatgttggcattcatattaattacggatgtaattctgtgtatcttactgtgactccgaaaactgtagtattggtgtcatgggaatgtacgttatttccaaagtcatttcattaaagatgaaaactttaatttcttctgtgatttgtacttacactaagtttagattatcacaaagaagaacgtgcattcaggcagatgctgtcccattcagaggaagctacagcagttgctccactgatgaaaaatattccaatgtaatttttatgggaattcttttatatagtgttctgcatattgtaattcatagggcttttgtttattcatataaaggataaatatttgggtgttttgagcttctataaaatatgattaattaaaggtagttaatactcaaaaaaaaaaaaaaaaaa

SEQ ID NO: 285153 - DNA, 1000 bp, Homo Sapiens; identical to SEQ ID NO: 115646

SEQ ID NO: 285154 - DNA, 1000 bp, Homo Sapiens
cagtgtgagaagcatgtgctggtcatactgacggacatgagttcctatgcagaggccttgcgggaggtctctgctgctagagaggaggtgcctgggcgccgagggtttcctggatatatgtacacagacctggccaccatctacgagcgggcgggccgcgtggagggtcggggaggatccatcacacagatccccatcctcaccatgcccaacgacgatatcacccaccctatcccagacttgacgggcttcatcacagagggacagatctacgtggacagacagcttcacaacagacagatctacccccccatcaacgtgctcccttccctgtcgcggctgatgaagtcagccattggggaaggcatgacaagaaaggaccatggagatgtctccaaccagctgtacgcctgctatgccatcgggaaggacgtgcaggccatgaaggcagtagttggggaggaggcgctcacctctgaggacctgctctacctggaattcctgcagaagtttgagaagaacttcatcaatcagggcccctacgagaaccgctcggtgttcgagtcgctggacctgggctggaagctgctgcgcatcttccccaaggagatgctgaagcgcattccgcaggccgtgatcgacgagttctattcccgcgagggggcgctgcaggacctcgcgcctgacactgcgctctagccccgcgcgccgtggcaccccaacaccggcagggaacctaccctcggctcccgggtctcccctccctcgccaccccaaccagcggcttctgcgccgccctccgccctccgctggctccgaggtggtgggggcgccgcacgctccatccctttccctcgctcgattccttttcccgcgctccatgcctccccctcgactcccggtgctgcggaagaactgaaggttgcgatgccttactctgacgggagcatctgtatttttatgttaaaagcccacaaaataaaaataaaaagtaactgag

SEQ ID NO: 285155 - DNA, 1000 bp, Homo Sapiens
agcttgccccctccccacccgcagacatgtccgagtccaagagcggccccgagtatgcttcgtttttcgccgtcatgggcgcctcggccgccatggtcttcagcgccctgggcgctgcctatggcacagccaagagcggtaccggcattgcggccatgtctgtcatgcggccggagcagatcatgaagtccatcatcccagtggtcatggctggcatcatcgccatctacggcctggtggtggcagtcctcatcgccaactccctgaatgacgacatcagcctctacaagagcttcctccagctgggcgccggcctgagcgtgggcctgagcggcctggcagccggctttgccatcggcatcgtgggggacgctggcgtgcggggcaccgcccagcagccccgactattcgtgggcatgatcctgattctcatcttcgccgaggtgctcggcctctacggtctcatcgtcgccctcatcctctccacaaagtagaccctctccgagcccaccagccacagaatattatgtaaagaccacccctcctcattccagaacgaacagcctgacacatacgcacggggccgccgcccccagtagttggtcttgtacatgcgcagtgtcctagtgcccatcgtctgtttccccggccttgcccccgcccgccccgtgccgtggacatctgggcccactcatcgcccctccaggcccccggcgccccaccccctagagtgctctgtgtatgcggatgatttagaattgtcatttctctttactggatgtttatttataaagatctggcctgttcctgcgtctgcggagcggcccttgtctcccagctatctataaccttagctagagtgtcgccttgtgggttcctgttgctgagacttcctggatggagccgccctcaccgccgggcccgtggccctgcgcggagctgtgtccaataaagttcttggatgtgaaaaaaaaaaaaaaaaaaaaaaaaaaaaaaaaaa

SEQ ID NO: 285156 - DNA, 1000 bp, Homo Sapiens; identical to SEQ ID NO: 221033

SEQ ID NO: 285157 - DNA, 1000 bp, Homo Sapiens
agcagaagaaaattcagatgtccaatttgatgaatcaagcgagactcaaagtcctcagagcaagagatgaccttatcacagacctactaaatgaagcaaaacagagactcagcaaggtggtaaaagatacaaccaggtaccaagtgctgctggatggactggttctccagggtttgtaccagttgctggagccccgaatgattgttcgttgcaggaaacaagatttccctctggtaaaggctgcagtgcagaaggcaattcctatgtacaaaattgccaccaaaaacgatgttgatgtccaaattgaccaggagtcctacctgcctgaagacatagctggtggagttgagatctataatggagatcgtaaaataaaggtttccaacaccctggaaagccggctggatctcatagcccagcagatgatgccagaagtccggggagccttgtttggtgcaaatgccaacaggaagtttttggactaagccttcaggaggtggagctcgtcgtcagctctcctgctgtgatgtggaagcttctgatatttgaagaaacacgaatgtctctgtagcttcctcttcactgccccagtattgctctgtatttatcagcgatgcccctctgtcactcatgccttgcctaattgttcacaatggtggaaagcttcatgtaatatgatcaggacccacctccagttcttctgaaagtgtgacagtgtccagccggttctgcagcactaggggagggggcagatggtggttgcatgggcttcctgggtctccactctccgtctggcctaaaggtgatgtatttggtgtttggccctgcagtccccactcttgaggcttaaggcgcatgtggcacaccactccttccagcagtagtcgctttactgttacctgtttaggcctagaagttttccctcatctgtaaatgtgatttaaaatctaagccatgaatatgctttatttattaaaagagttatgcggatttaatgtga

SEQ ID NO: 285158 - DNA, 1000 bp, Homo Sapiens
tcgctttaggtggtggtcttgaactggctttagcctgtgatatacgagtagcagcttcctctgcaaaaatgggcctggttgaaacaaaattggcgattattcctggtggaggggggacacagcgattgccacgcgccattggaatgtccctggccaaggagctcatattctctgcgcgagtcctcgatggcaaagaagccaaagcagtgggcttaatcagccacgttctggaacagaaccaggagggagacgcggcctacaggaaggccttggacctggcgagagagtttttacctcagggacctgttgcaatgagagtggcaaaattagcaattaatcaagggatggaggtcgatttagtaacagggttagccatagaagaagcttgttatgctcagaccattccaacaaaagacagacttgaaggtcttcttgcttttaaagagaaaaggccccctcgctataaaggagaataaaaggaacagaaattcttaagatgccaatgtaataaatgtacttcctggaagtgtctttcggatccactatatgcctcagcacatggaaccttaatgaccaaagtgaagagcagattattcatacggtgtaataagcgtctggaatggacccatccgtgtacttcattcaaatgtgtaaatgtcatattcattcagatttataaagctagtagtgtatagtcagaaacagaatcaaagttagatatacatttttaaatatttactgcatatgaggctttctgttaattttttaatgtgaataatttatatattgcacattctaggaataatattgattgtatgtctactgtgctgcattaagaaaataaaatttctatataccaaaaatgtgaagttataccaaataaagtttctaagtgattaatgcatacgaacagctacatatacatatatctaaacctgaaaaatgaattgatattctgagtgaaaactacctaatataaataaaattagtgaaaagaaaa

SEQ ID NO: 285159 - DNA, 1000 bp, Homo Sapiens
agtccttaaaatgtaagattatagattctaaagattctatagttctagacatggaggttctaaggcctaggattctaaaatgtgatgttctaaggctctgagagtctagattctctggctgtaaggctctagatcataaggcttcaaaatgttatcttctcaagttctaagattctaatgatgatcaattatagtttctgaggctttatgataatagattctcttgtataagatcctagatcctaagggtcgaaagctctagaatctgcaattcaaaagttccaagagtctaaagatggagtttctaaggtccggtgttctaagatgtgatattctaagacttactctaagatcttagattctctgtgtctaagattctagatcagatgctccaagattctagatgattaaataagattctaacggtctgttctgtttcaaggcactctagattccattggtccaagattccggatcctaagcatctaagttataagactctcacactcagttgtgactaactagacaccaaagttctaataatttctaatgttggacacctttaggttctttgctgcattctgcctctctaggaccatggttaagagtccaagaatccacatttctaaaatcttatagttctaggcactgtagttctaagactcaaatgttctaagtttctaagattctaaaggtccacaggtctagactattaggtgcaatttcaaggttctaaccctatactgtagtattctttggggtgcccctctccttcttagctatcattgcttcctcctccccaactgtgggggtgtgcccccttcaagcctgtgcaatgcattagggatgcctcctttcccgcaggggatggacgatctcccacctttcgggccatgttgcccccgtgagccaatccctcaccttctgagtacagagtgtggactctggtgcctccagaggggctcaggtcacataaaactttgtatatcaacgaaaaaaa

SEQ ID NO: 285160 - DNA, 912 bp, Homo Sapiens; identical to SEQ ID NO: 221034

SEQ ID NO: 285161 - DNA, 1000 bp, Homo Sapiens; identical to SEQ ID NO: 115647

SEQ ID NO: 285162 - DNA, 1000 bp, Homo Sapiens; identical to SEQ ID NO: 115649

SEQ ID NO: 285163 - DNA, 1000 bp, Homo Sapiens
ctgaaatagtggttcttggaaaaatggatccccagtgaaaactagagctctaagcccattcagcccatttcacacctgaaaatgttagtgatcaccacttggaccagcatccttaagtatcagaaagccccaagcaattgctgcatcttagtagggtgagggataagcaaaagaggatgttcaccataacccaggaatgaagataccatcagcaaagaatttcaatttgttcagtctttcatttagagctagtctttcacagtaccatctgaatacctctttgaaagaaggaagactttacgtagtgtagatttgttttgtgttgtttgaaaatattatctttgtaattatttttaatatgtaaggaatgcttggaatatctgctatatgtcaactttatgcagcttccttttgagggacaaatttaaaacaaacaaccccccatcacaaacttaaaggattgcaagggccagatctgttaagtggtttcataggagacacatccagcaattgtgtggtcagtggctcttttacccaataagatacatcacagtcacatgcttgatggtttatgttgacctaagatttattttgttaaaatctctctctgttgtgttcgttcttgttctgttttgttttgttttttaaagtcttgctgtggtctctttgtggcagaagtgtttcatgcatggcagcaggcctgttgcttttttatggcgattcccattgaaaatgtaagtaaatgtctgtggccttgttctctctatggtaaagatattattcaccatgtaaaacaaaaaacaatatttattgtattttagtatatttatataattatgttattgaaaaaaattggcattaaaacttaaccgcatcagaacctattgtaaatacaagttctatttaagtgtactaattaacatataatatatgttttaaatatagaatttttaatgtttttaaatatattttcaaagtacataaaaaaaaaaaaaaaaaa

SEQ ID NO: 285164 - DNA, 1000 bp, Homo Sapiens
aacatgtgttcaaagtcaaggatatggaaaacctggaagatgttttctaccaaatgatcgatgaaagccagtctctgagtctctgtggcatggtttgggaacacaggaagggtaccgattaccacaagcaaccatggcaggccaagatctcagtcattcgcccttcaaagggacacgagagctgtatgggggctgtggtgtctgagtactttgtgctgacagcagcacattgtttcactgtggatgacaaggaacactcaatcaaggtcagcgtaggaggggagaagcgggacctggagatagaagtagtcctatttcaccccaactacaacattaatgggaaaaaagaagcaggaattcctgaattttatgactatgacgttgccctgatcaagctcaagaataagctgaaatatggccagactatcaggcccatttgtctcccctgcaccgagggaacaactcgagctttgaggcttcctccaactaccacttgccagcaacaaaaggaagagctgctccctgcacaggatatcaaagctctgtttgtgtctgaggaggagaaaaagctgactcggaaggaggtctacatcaagaatggggataagaaaggcagctgtgagagagatgctcaatatgccccaggctatgacaaagtcaaggacatctcagaggtggtcacccctcggttcctttgtactggaggagtgagtccctatgctgaccccaatacttgcagaggtgattctggcggccccttgatagttcacaagagaagtcgtttcattcaagttggtgtaatcagctggggagtagtggatgtctgcaaaaaccagaagcggcaaaagcaggtacctgctcacgcccgagactttcacatcaacctctttcaagtgctgccctggctgaaggagaaactccaagatgaggatttgggttttctataaggggtttcctgctggacaggggcgtgggattgaattaaaacagctgcgacaac

SEQ ID NO: 285165 - DNA, 1000 bp, Homo Sapiens
gagcaaaataagtacaaagtaaatcttgaacaggttcactaagcacccaccctgtgaaaagtattatggaaatcactgcagcacaggaaaagtaattcagatgttaatgccacttgaagaagttggtaggctagcaaagaggatgagacatgaactgtcataaaggactcagcaaccagccagggacagataaagcgctatggaaaggggcttccaagttcttttgaacatgacccttagtaacaaacacaatttatataatgacccagcaaaacacatcacatcttactgtcgaaattaaatgtgtgatccatcctagtattttctgttccattccttttcattctatttcatttataaaacatgctagttgagacttttcaaatggatttttatgacccactactgggtttggatccacagtttgaaaaatattgctacaagacacttaaggagaccatcctgtttaagtttattcttataagtaggtcagtcatatgagacctgatcaataaatatccaatacccagagtcctgctctcagagttcttctgtttcgtgacccacttttctaccagtaaaagacatagaccaatggggaggaggggaggagagatggatatttcagccctctccatcctagtcaacactggatccacctagtgcctctgggccataaggctgagcagagtgagcttgtattagttggtagcttttaaaaaatataataaaaaaaaagtagagattctccaaactctagcctggtttcctagattgagaactatgatatttttctctgataatttaatatctactctcctacaaaagctcaagcctgaagatacaagactattagaagaaacatgactaccctcagtgtattagaaaagaggtcatgcagctttctaaacattattgaattgtttgagctgttttgaaattgtaattcttttcagctattaaaaagaagagcaatgagaaaaaaaaaaaaaaaaaaaaa

SEQ ID NO: 285166 - DNA, 1000 bp, Homo Sapiens
ctgcatagtcagggcccacagacacccaacattcgggtcagcagtggcactcagaggaaaagacaattttcaccttccctttgtgatcagagccgtcccaggacttcaggggcttcctacctacagaatttattaagagttccccctgatcccacctccacagaatcatttcttctgaagggccccccttccatgagtgaattcatccaagggcaccggctcagcaaggaaaaaaggttaaccgtggctccaccagattgtcagcagcctgctgcctccgtaccgccacagtgctcacaactagccgggaggcaagactgcccaactgtcagtcctgacacagctctccctgaggagcagccacattccagctcccagtgcgcccctctccactgtctctccaagcctcctcacccctagtcttcatctcctgtggacgaacatctggggtggaagttttgtagccacacacaggatactgcccaagatccagcgggtgttttcttctcggttgttagatgtacaattggattaatgtccatcgttttggaagacgagagaaagttgagaagaacacgaagcacagaccctgatgtgataaaacattttgtggtttctctgagtcacagataaacttctgccatcaaatggctacagttcatttaaatttaaaaaaaagaaaaaagaaacagaaaacgtgtctcagatggctggctttacctcgatagcataagagagacctaagacatgtaaaatacgtatattgcagtatcatctttcctcacactccaaattcagctagggaagttgattccaatatgtttgtcattgatatttattttgtactttatttgctacatgatttatgtctatacaaataatttctctgaggtgaatttaattcatttattttcaaataagcataatttgctcaattaagtatgagtttgaatttagtttgaaatctggaattggccagactgtggtcatttttcttgca

SEQ ID NO: 285167 - DNA, 1000 bp, Homo Sapiens; identical to SEQ ID NO: 220406

SEQ ID NO: 285168 - DNA, 1000 bp, Homo Sapiens
gatgggcagagcatcaaccccaagttggcgggcctgattgggcggcacgggccccagaacaagcagcccttcatggtggctttcttcaaggccacggaggtccacttccgcagcatccggtccacggggagcaaacagcgcagccagaaccgctccaagacgcccaagaaccaggaagccctgcggatggccaacgtggcagagaacagcagcagcgaccagaggcaggcctgtaagaagcacgagctgtatgtcagcttccgagacctgggctggcaggactggatcatcgcgcctgaaggctacgccgcctactactgtgagggggagtgtgccttccctctgaactcctacatgaacgccaccaaccacgccatcgtgcagacgctggtccacttcatcaacccggaaacggtgcccaagccctgctgtgcgcccacgcagctcaatgccatctccgtcctctacttcgatgacagctccaacgtcatcctgaagaaatacagaaacatggtggtccgggcctgtggctgccactagctcctccgagaattcagaccctttggggccaagtttttctggatcctccattgctcgccttggccaggaaccagcagaccaactgccttttgtgagaccttcccctccctatccccaactttaaaggtgtgagagtattaggaaacatgagcagcatatggcttttgatcagtttttcagtggcagcatccaatgaacaagatcctacaagctgtgcaggcaaaacctagcaggaaaaaaaaacaacgcataaagaaaaatggccgggccaggtcattggctgggaagtctcagccatgcacggactcgtttccagaggtaattatgagcgcctaccagccaggccacccagccgtgggaggaagggggcgtggcaaggggtgggcacattggtgtctgtgcgaaaggaaaattgacccggaagttcctgtaataaatgtcacaataaaacgaatgaatg

SEQ ID NO: 285169 - DNA, 1000 bp, Homo Sapiens; identical to SEQ ID NO: 221036

SEQ ID NO: 285170 - DNA, 1000 bp, Homo Sapiens; identical to SEQ ID NO: 115652

SEQ ID NO: 285171 - DNA, 1000 bp, Homo Sapiens
gagaaccaccacaatccacctccctttgctccaccagtgatggagtttcccgctgcccatgaccgcatggtatacctgggcctctcagactacttcttcaacacagccgggcttgtataccaagaggctggggtcttgaagatgacccttagagatgacatgattccaaaggagtccaaatttcgactgacaaccaagttctttggaaccttcctacctgaggtggccaagaagtttcccaacatgaagatacagatccatgtctcagcctccaccccgccacacctgtctgtgcagcccaccggccttaccttctaccctgccgtggatgtccaggcctttgccgtcctccccaactcctccctggcttccctcttcctgattggcatgcacacaactggttccatggaggtcagcgccgagtccaacaggcttgttggagagctcaagctggataggctgctcctggaactgaagcactcaaatattggccccttcccggttgaattgctgcaggatatcatgaactacattgtacccattcttgtgctgcccagggttaacgagaaactacagaaaggcttccctctcccgacgccggccagagtccagctctacaacgtagtgcttcagcctcaccagaacttcctgctgttcggtgcagacgttgtctataaatgaaggcaccaggggtgccgggggctgtcagccgcacctgttcctgatgggctgtggggcaccggctgcctttccccagggaatcctctccagatcttaaccaagagccccttgcaaacttcttcgactcagattcagaaatgatctaaacacgaggaaacattattcattggaaaagtgcatggtgtgtattttagggattatgagcttctttcaagggctaaggctgcagagatatttcctccaggaatcgtgtttcaattgtaaccaagaaatttccatttgtgcttcatgaaaaaaaacttctggtttttttcatgtg

SEQ ID NO: 285172 - DNA, 1000 bp, Homo Sapiens
taagtttacagaagtaaaaccaaatgattctccttctaaagagaatgtaaagaaaatgaagaatgaatgcatactgcctgaaggaagaacaggcgtcacacagataggatattgtgtgcaagacacaacctctgccaatactacccttgttcatcagaccacaccttcacatgtaatgccaccaaatcaccaccaattagcatttaattatcaagaattagaacatttacagactgtgaaaaacatttcacctttacaaattctgcctccctcaggtgattctgaacagctctcaaatggcataactgtgatgcatccatctggtgatagtgacacaacgatgttagaatctgaatgtcaagctcctgtacagaaggatataaagattaagaatgcagattcatggaaaagtttaggcaaaccagtgaaaccatcaggtgtaatgaaatcctcagatgagctcttcaaccaatttagaaaagcagccatagaaaaggaagtaaaagctcggacacaggaactcatacggaagcatttggaacaaaatacaaaggaactaaaagcatctcaagaaaatcagagggatcttgggaatggattgactgtagaatctttttcaaataaaatacaaaacaagtgctctggagaagagcagaaagaacatcagcagtcatcagaagctcaagataaatccaaactctggcttctcaaagaccgtgatttagcaaggcagaaagaacaagagaggaggaggagagaagcaatggtgggtaccattgatatgacccttcaaagtgacattatgacaatgtttgaaaacaactttgattaaaactcagtttttaaattaaccatcaacttaaaatgaatggtaaaagatcaaaatgcatatggtaaaatgattgctttcagataacaagataccaatcttatattgtattttgactgctctaaaatgattaaacagttttcacttacatttttaaaaaaaaaaaaaaaa

SEQ ID NO: 285173 - DNA, 1000 bp, Homo Sapiens; identical to SEQ ID NO: 115653

SEQ ID NO: 285174 - DNA, 1000 bp, Homo Sapiens
cccggcccggcagagcggggttgatggaccgggccgcccggtgcagcggcgccagctccctgccactgctcctggcccttgccctgggtctagtgatccttcactgtgtggtggcagatgggaattccaccagaagtcctgaaactaatggcctcctctgtggagaccctgaggaaaactgtgcagctaccaccacacaatcaaagcggaaaggccacttctctaggtgccccaagcaatacaagcattactgcatcaaagggagatgccgcttcgtggtggccgagcagacgccctcctgtgtctgtgatgaaggctacattggagcaaggtgtgagagagttgacttgttttacctaagaggagacagaggacagattctggtgatttgtttgatagcagttatggtagtttttattattttggtcatcggtgtctgcacatgctgtcaccctcttcggaaacgtcgtaaaagaaagaagaaagaagaagaaatggaaactctgggtaaagatataactcctatcaatgaagatattgaagagacaaatattgcttaaaaggctatgaagttacctccaggttggtggcaagctgcaaagtgccttgctcatttgaaaatggacagaatgtgtctcaggaaaaacagctagtagacatgaattttaaataatgtatttactttttatttgcaactttagtttgtgttattattttttaataagaacattaattatatgtatattgtctagtaattgggaaaaaagcaactggttaggtagcaacaacagaagggaaatttcaataacctttcacttaagtattgtcaccaggattactagtcaaacaaaaaagaaaagtagaaaggaggttaggtcttaggaattgaattaataataaagctaccatttatcaagcatttaccatgtgctaataagtttgaaatatattatttcctttattcctttcagcaatccatgagatagctattataatcctc

SEQ ID NO: 285175 - DNA, 1000 bp, Homo Sapiens; identical to SEQ ID NO: 115654

SEQ ID NO: 285176 - DNA, 1000 bp, Homo Sapiens
gccctgctgggcgaccgctggatcctcacagctgcccacaccctgtatcccaaggaacacgaagcgcaaagcaacgcctctttggatgtgttcctgggccacacaaatgtggaagagctcatgaagctaggaaatcaccccatccgcagggtcagcgtccacccggactaccgtcaggatgagtcctacaattttgagggggacatcgccctgctggagctggaaaatagtgtcaccctgggtcccaacctcctccccatctgcctccctgacaacgataccttctacgacctgggcttgatgggctatgtcagtggcttcggggtcatggaggagaagattgctcatgacctcaggtttgtccgtctgcccgtagctaatccacaggcctgtgagaactggctccggggaaagaataggatggatgtgttctctcaaaacatgttctgtgctggacacccatctctaaagcaggacgcctgccagggggatagtgggggcgtttttgcagtaagggacccgaacactgatcgctgggtggccacgggcatcgtgtcctggggcatcgggtgcagcaggggctatggcttctacaccaaagtgctcaactacgtggactggatcaagaaagagatggaggaggaggactgagcccagaattcactaggttcgaatccagagagcagtgtggaaaaaaaaaaacaaaaaacaactgaccagttgttgataaccactaagagtctctattaaaattactgatgcagaaagaccgtgtgtgaaattctctttcctgtagtcccattgatgtactttacctgaaacaacccaaagggcccctttctttcttctgaggattgcagaggatatagttatcaatctctagttgtcactttcctcttccactttgataccattgggtcattgaatataactttttccaaataaagttttatgagaaatgccagtgtgcaaaaaaaaaaaaaaaaaaaaaaaaaaaaaa

SEQ ID NO: 285177 - DNA, 1000 bp, Homo Sapiens
aagttgggtttctcagtcctgccactttcacagtgtacgaataccacagaccagataaacagtgtaccatgttttatagcacttccaatatcaaaattcagaaagtctgtgaaggagccgcgtgcaagtgtgtagaagctgattgtgggcaaatgcaggaagaattggatctgacaatctctgcagagacaagaaaacaaacagcatgtaaaccagagattgcatatgcttataaagttagcatcacatccatcactgtagaaaatgtttttgtcaagtacaaggcaacccttctggatatctacaaaactggggaagctgttgctgagaaagactctgagattaccttcattaaaaaggtaacctgtactaacgctgagctggtaaaaggaagacagtacttaattatgggtaaagaagccctccagataaaatacaatttcagtttcaggtacatctaccctttagattccttgacctggattgaatactggcctagagacacaacatgttcatcgtgtcaagcatttttagctaatttagatgaatttgccgaagatatctttttaaatggatgctaaaattcctgaagttcagctgcatacagtttgcacttatggactcctgttgttgaagttcgtttttttgttttcttctttttttaaacattcatagctggtcttatttgtaaagctcactttacttagaattagtggcacttgcttttattagagaatgatttcaaatgctgtaactttctgaaataacatggccttggagggcatgaagacagatactcctccaaggttattggacaccggaaacaataaattggaacacctcctcaaacctaccactcaggaatgtttgctggggccgaaagaacagtccattgaaagggagtattacaaaaacatggcctttgcttgaaagaaaataccaaggaacaggaaactgatcattaaagcctgagtttgctttcaaaaaaaaaaaaaaaaaa

SEQ ID NO: 285178 - DNA, 1000 bp, Homo Sapiens; identical to SEQ ID NO: 115656

SEQ ID NO: 285179 - DNA, 1000 bp, Homo Sapiens
tttgcctttttggaaacctatggaactcactacagtagctctgggtctctaggaggactctatgaactaatatatgttttggataaagcttccatgaagcggaaaggtgttgaactaaaagacataaagagatgccttgggtatcatctggatgtatctctggctttctctgaaatctctgttggagctgaatttaataaagatgattgtgtaaagaggggagagggtagagctgtaaacatcaccagtgaaaacctcatagatgatgttgtttcactcataagaggtggaaccagaaaatatgcatttgaactgaaagaaaagcttctccgaggaaccgtgattgatgtgactgactttgtcaactgggcctcttccataaatgatgctcctgttctcattagtcaaaaactgtctcctatatataatctggttccagtgaaaatgaaaaatgcacacctaaagaaacaaaacttggaaagagccattgaagactatatcaatgaatttagtgtaagaaaatgccacacatgccaaaatggaggtacagtgattctaatggatggaaagtgtttgtgtgcctgcccattcaaatttgagggaattgcctgtgaaatcagtaaacaaaaaatttctgaaggattgccagccctagagttccccaatgaaaaatagagctgttggcttctctgagctccagtggaagaagaaaacactagtaccttcagatcctacccctgaagataatcttagctgccaagtaaatagcaacatgcttcatgaaaatcctaccaacctctgaagtctcttctctcttaggtctataattttttttttaatttttcttccttaaactcctgtgatgtttccattttttgttccctaatgagaagtcaacagtgaaatacgccagaactgctttatcccacggaaaatgccaatctcttctaaaaaaaaacaaaattaaactaaaaaaaaaaaaaaaaaaaaaaaaaaaaaa

SEQ ID NO: 285180 - DNA, 791 bp, Homo Sapiens
ctctggctggacgccgccgccgccgctgccaccgcctctgatccaagccacctcccgccagagaggtgtcatgggcttccaaaagttctcccccttcctggctctcagcatcttggtcctgttgcaggcaggcagcctccatgcagcaccattcaggtctgccctggagagcagcccagcagacccggccacgctcagtgaggacgaagcgcgcctcctgctggctgcactggtgcaggactatgtgcagatgaaggccagtgagctggagcaggagcaagagagagagggctccagcctggacagccccagatctaagcggtgcggtaatctgagtacttgcatgctgggcacatacacgcaggacttcaacaagtttcacacgttcccccaaactgcaattggggttggagcacctggaaagaaaagggatatgtccagcgacttggagagagaccatcgccctcatgttagcatgccccagaatgccaactaaactcctccctttccttcctaatttcccttcttgcatccttcctataacttgatgcatgtggtttggttcctctctggtggctctttgggctggtattggtggctttccttgtggcagaggatgtctcaaacttcagatgggaggaaagagagcaggactcacaggttggaagagaatcacctgggaaaataccagaaaatgagggccgctttgagtcccccagagatgtcatcagagctcctctgtcctgcttctgaatgtgctgatcatttgaggaataaaattatttttcccc

SEQ ID NO: 285181 - DNA, 1000 bp, Homo Sapiens
ttataaagcaaattactccaaggtttataaagcagattacctcttgcccttgggtgctatctagcagtaaaagataaatttgttgaatattggtaattaaaagactccacataagtccattaactgctttccacccagcttcaaagcttaaaaagagctcaggcttttccaggaagatccaggagggctaattagaaatcaacttgtggttgaccgcttgtttcttgttattaccaaaacaggaggggaaaaaattaactgctccaaatttaaccataaatcaattcatgtttaacgtttctcattaaaatccagtattatattatcatatctctctttacttcccagtataagatttttgaaaatcctgaataaaccagtatcgttactggcacctgaaattaatttgtgaatttgcaacagtaatcagagttaccattatttaatttgtatgctaaatgaggaggtacattgaaaccctccaaatctccagtctcatctatgtcatattttgccactgcctttcagaagtgatttagttgtggaaagataataaattgatttgttatggttacatatttagcgcacccagagaaaattaattatatttctacagagaaaatgaatttgggatactaaagtagtttaagtctcctttactgaatgtaagggggggatcgaaaagaaggtatttttccaatcacagtgttatgtagtattgttctatttttgtttacaaacatggaaaacagagtatttctggcagctgtggtacaaatgtgataatatattgctaaaatattttagatgttattatgctaatatagtaggggttgaagaaaacaaaatagcttattatagaattgcacatagttctgcccaaattatgtgaaatgcttatgcttgtgtatatgtataaattaatacagagtacgttaaaagcaaaaagatgtatatttgcatatttttctaaagaaatatattattcatcttttcattc

SEQ ID NO: 285182 - DNA, 1000 bp, Homo Sapiens
gacaaagatggtgatggaactataacaacaaaggaattgggaactgtaatgagatctcttgggcagaatcccacagaagcagagttacaggacatgattaatgaagtagatgctgatggtaatggcacaattgacttccctgaatttctgacaatgatggcaagaaaaatgaaagacacagacagtgaagaagaaattagagaagcattccgtgtgtttgataaggatggcaatggctatattagtgctgcagaacttcgccatgtgatgacaaaccttggagagaagttaacagatgaagaagttgatgaaatgatcagggaagcagatattgatggtgatggtcaagtaaactatgaagagtttgtacaaatgatgacagcaaagtgaagaccttgtacagaatgtgttaaatttcttgtacaaaattgtttatttgccttttctttgtttgtaacttatctgtaaaaggtttctccctactgtcaaaaaaatatgcatgtatagtaattaggacttcattcctccatgttttcttcccttatcttactgtcattgtcctaaaaccttattttagaaaattgatcaagtaacatgttgcatgtggcttactctggatatatctaagcccttctgcacatctaaacttagatggagttggtcaaatgagggaacatctgggttatgccttttttaaagtagttttctttaggaactgtcagcatgttgttgttgaagtgtggagttgtaactctgcgtggactatggacagtcaacaatatgtacttaaaagttgcactattgcaaaacgggtgtattatccaggtactcgtacactatttttttgtactgctggtcctgtaccagaaacattttcttttattgttacttgctttttaaactttgtttagccacttaaaatctgcttatggcacaatttgcctcaaaatccattccaagttgtatatttgttttccaataaaaaaattacaatttaccc

SEQ ID NO: 285183 - DNA, 1000 bp, Homo Sapiens; identical to SEQ ID NO: 221040

SEQ ID NO: 285184 - DNA, 1000 bp, Homo Sapiens
accaatgtcattaattgatttttcttgttaatcagaattcctattctgtacctttcctctaacttctcagatttgtaattcttcttttgggagctgagctagtgcttttaggagaacagataaatgtggtctcagccagccctagagactgcttcttgtgtttgtgtcattctgtcctgagaaatgaagtcatctgaaaaataaaatgaaagaaactgaattgtctaatgttaactctgcacattgtaacttttcttgttgagttagtatcttaatttttactccagcacaagtatttaatcaaagaaaagattcatacatgtgaaattggaaggtatttataaaatttttattgctgtataccaaactcagaattggaactttttacatttgagtttcactttttagaagtatgttttaagcaagcaaaaacaaaatgggatgtgaagaattgaggcatgcaacccaatagcataaatgtcctttttccccccaaatatggtctagatgagttattataaacattgtttttatttttttgagacagagtttcgctcttgttgcccaggctagagtgcaatggcgccatctcggctcaccgcaacctccaccttcctggttcaagggattctcctgcctcagcctcccaagtagctgggattacaggcatgcaccaccacgcccagctaatttttatattctttagtaaagacagggtttctccatgttggtcaggctggtctcgaacttctgacctcaggtgatctgcccacctcggcctcccaaagtgctgggattacaggcgtgagccactgcacctggccttataaatatccttttaactaactcagtaactgccatattttgttgggttgtcttcttaaaagaatataagactaaagtgttaatgtcacttggtgttacatttccttacagatttttgtatagtctaatttggttaatccttgtgacattaaaaacacatacactttttaaaaaa

SEQ ID NO: 285185 - DNA, 1000 bp, Homo Sapiens; identical to SEQ ID NO: 115657

SEQ ID NO: 285186 - DNA, 1000 bp, Homo Sapiens; identical to SEQ ID NO: 115658

SEQ ID NO: 285187 - DNA, 1000 bp, Homo Sapiens
gctttggtgctccggaacaacagccttctgccctggagcacagcatccaatattctggagaagtgcggagattcaacactgccaatgatgataacgttactcaggtgcgggcattctatgtgaacgtgctgaatgaggaacagaggaaacgtctgtgtgagaacattgccggccacctgaaggatgcacaaattttcatccagaagaaagcggtcaagaacttcactgaggtccaccctgactacgggagccacatccaggctcttctggacaagtacaatgctgagaagcctaagaatgcgattcacacctttgtgcagtccggatctcacttggcggcaagggagaaggcaaatctgtgaggccggggccctgcacctgtgcagcgaagcttagcgttcatccgtgtaacccgctcatcactggatgaagattctcctgtgctagatgtgcaaatgcaagctagtggcttcaaaatagagaatcccactttctatagcagattgtgtaacaattttaatgctatttccccaggggaaaatgaaggttaggatttaacagtcatttaaaaaaaaaatttgttttgacggatgattggattattcatttaaaatgattagaaggcaagtttctagctagaaatatgattttatttgacaaaatttgttgaaattatgtatgtttacatatcacctcatggcctattatattaaaatatggctataaatatataaaaagaaaagataaagatgatctactcagaaatttttatttttctaaggttctcataggaaaagtacatttaatacagcagtgtcatcagaagataacttgagcaccgtcatggcttaatgtttattcctgataataattgatcaaattcatttttttcactggagttacattaatgttaattcagcactgatttcacaacagatcaatttgtaattgcttacatttttacaataaataatctgtacgtaagaacaaaaaaaaaaaa

SEQ ID NO: 285188 - DNA, 1000 bp, Homo Sapiens; identical to SEQ ID NO: 115659

SEQ ID NO: 285189 - DNA, 1000 bp, Homo Sapiens; identical to SEQ ID NO: 115662

SEQ ID NO: 285190 - DNA, 1000 bp, Homo Sapiens
aatgctgagatgataaagtccccttaagccaacaaaccctctgtagctatagaatgagtgcaggtttctattggtgtggactcagagcaatttacaagagctgttcatgcagccatccatttgtgcaaaatagggtaagaagattcaagaggatatttattacttcctcataccacatggcttttgatgattctggattctaaacaacccagaatggtcatttcaggcacaacgatactacattcgtgtgtgtctgcttttaaacttggctgggctatcagaccctattctcggctcaggttttgagaagccatcagcaaatgtgtacgtgcatgctgtagctgcagcctgcatcccttcgcctgcagcctactttggggaaataaagtgccttactgactgtagccattacagtatccaatgtcttttgacaggtgcctgtccttgaaaaacaaagtttctatttttatttttaattggtttagttcttaactgctggccaactcttacatccccagcaaatcatcgggccattggattttttccattatgttcatcacccttatatcatgtacctcagatctctctctctctcctctctctcagttatatagtttcttgtcttggactttttttttcttttctttttctttttttttttgctttaaaacaagtgtgatgccatatcaagtccatgttattctctcacagtgtactctataagaggtgtgggtgtctgtttggtcaggatgttagaaagtgctgataagtagcatgatcagtgtatgcgaaaaggtttttaggaagtatggcaaaaatgttgtattggctatgatggtgacatgatatagtcagctgccttttaagaggtcttatctgttcagtgttaagtgatttaaaaaaataataacctgttttctgactagtttaaagatggatttgaaaatggttttgaatgcaattaggttatgctatttggacaataaactcaccttgacct

SEQ ID NO: 285191 - DNA, 1000 bp, Homo Sapiens; identical to SEQ ID NO: 221041

SEQ ID NO: 285192 - DNA, 1000 bp, Homo Sapiens
tcctgcactgtgattgccaccaacattctcttggttgatgagatcatgcgagctggaatgtcttctctgaaaggttgaattgaagcttcctctgtatctgaatcttgaagactgcaaagtgatcctgaggattacagctgtggaatttttgtccaagcttcaaataattttgaaagaaattttcccatatgaaaaaaggagagaacactggcatctgttgaaatttggaagttctgaaattatagtatttttaaaaattgcactgaagtgtatacacataaagcaggtcttttatccagtgaacaggatgttttgctttagcagcagtgacataaaattccatgttagataagcatatgttacttaccttgttattaaatatttcttgaaaagcaaattttaatggtttaattttatgtggacgtatgttaaattatccaactaccctattgttaagcatttggttttaaaatttttatgctaatataaatgctcaagtaatttaaaatattgaaagcatccctgttggtataaatttctgagtaaatgcattggatcagttggactttgaacgcctttgaaatggctttgctaaaatgctcccgccacaaagttgtaggaaatgggaagaggagtcaactagaggcaagggagttgagagagctgcaactgtaaagggcaagaacaggcagaggtaaaaagatgatggaaggtgtggtgactaagggccacggttattgggtgaaatttgagattgtaggccaactgtattttcaagcttctgaacttaggcaaaatattcatcgcaaagtctctagcgtcatatttttctcacccaaattacgtttccacgagattatttatatatagttggtctatctctgcagtccttgaaggtgaagttgtgtgttactaggctgtgttttgggatgtcagcagtggcctgaagtgagttgtgcaataaatgttaagttgaaacctcaaaaaaaaaaaaaaaaaa

SEQ ID NO: 285193 - DNA, 1000 bp, Homo Sapiens; identical to SEQ ID NO: 115663

SEQ ID NO: 285194 - DNA, 1000 bp, Homo Sapiens; identical to SEQ ID NO: 115664

SEQ ID NO: 285195 - DNA, 1000 bp, Homo Sapiens
gaacaaagtcagcaaggaatccagtgtcgagcctgtcagctgtccagagaaaggtctggacatctatctcatcattggcatatgtggaggaggcagcctcttgatggtctttgtggcactgctcgttttctatatcaccaaaaggaaaaaacagaggagtcggagaaatgatgaggagctggagacaagagcccacagagtagctactgaagaaaggggccggaagccccaacaaattccagcttcaacccctcagaatccagcaacttcccaacatcctcctccaccacctggtcatcgttcccaggcacctagtcatcgtcccccgcctcctggacaccgtgttcagcaccagcctcagaagaggcctcctgctccgtcgggcacacaagttcaccagcagaaaggcccgcccctccccagacctcgagttcagccaaaacctccccatggggcagcagaaaactcattgtccccttcctctaattaaaaaagatagaaactgtctttttcaataaaaagcactgtggatttctgccctcctgatgtgcatatccgtacttccatgaggtgttttctgtgtgcagaacattgtcacctcctgaggctgtgggccacagccacctctgcatcttcgaactcagccatgtggtcaacatctggagtttttggtctcctcagagagctccatcacaccagtaaggagaagcaatataagtgtgattgcaagaatggtagaggaccgagcacagaaatcttagagatttcttgtcccctctcaggtcatgtgtagatgcgataaatcaagtgattggtgtgcctgggtctcactacaagcagcctatctgcttaagagactctggagtttcttatgtgccctggtggacacttgcccaccatcctgtgagtaaaagtgaaataaaagctttgactagaaaaaaaaaaaaaaaaaaaaaaaaaaaaaaaaaaaaaaaaaaaaaaaaaaaaaaaaaaaaaaaaa

SEQ ID NO: 285196 - DNA, 1000 bp, Homo Sapiens; identical to SEQ ID NO: 115666

SEQ ID NO: 285197 - DNA, 1000 bp, Homo Sapiens
gatctggcccatcagttcacacaggtccagcgggacatgttcaccctggaggacacgctgctaggctaccttgctgatgacctcacatggtgtggtgaattcaacacttccaaaataaactatcaatcttgcccagactggagaaaggactgcagcaacaaccctgtttcagtattctggaaaacggtttcccgcaggtttgcagaagctgcctgtgatgtggtccatgtgatgctcaatggatcccgcagtaaaatctttgacaaaaacagcacttttgggagtgtggaagtccataatttgcaaccagagaaggttcagacactagaggcctgggtgatacatggtggaagagaagattccagagacttatgccaggatcccaccataaaagagctggaatcgattataagcaaaaggaatattcaattttcctgcaagaatatctacagacctgacaagtttcttcagtgtgtgaaaaatcctgaggattcatcttgcacatctgagatctgagccagtcgctgtggttgttttagctccttgactccttgtggtttatgtcatcatacatgactcagcatacctgctggtgcagagctgaagattttggagggtcctccacaataaggtcaatgccagagacggaagcctttttccccaaagtcttaaaataacttatatcatcagcatacctttattgtgatctatcaatagtcaagaaaaattattgtataagattagaatgaaaattgtatgttaagttacttcactttaattctcatgtgatccttttatgttatttatatattggtaacatcctttctattgaaaaatcaccacaccaaacctctcttattagaacaggcaagtgaagaaaagtgaatgctcaagtttttcagaaagcattacatttccaaatgaatgaccttgttgcatgatgtatttttgtacccttcctacagatagtcaaaccataaacttcatggtcatgggtaaa

SEQ ID NO: 285198 - DNA, 1000 bp, Homo Sapiens; identical to SEQ ID NO: 221044

SEQ ID NO: 285199 - DNA, 1000 bp, Homo Sapiens; identical to SEQ ID NO: 115668

SEQ ID NO: 285200 - DNA, 1000 bp, Homo Sapiens
tgaccagcattcaaggtcacttggtacatatgaccgtggtctccggcagcaacgtgactctgaacatctctgagagcctgcctgagaactacaaacaactaacctggttttatactttcgaccagaagattgtagaatgggattccagaaaatctaagtactttgaatccaaatttaaaggcagggtcagacttgatcctcagagtggcgcactgtacatctctaaggtccagaaagaggacaacagcacctacatcatgagggtgttgaaaaagactgggaatgagcaagaatggaagatcaagctgcaagtgcttgaccctgtacccaagcctgtcatcaaaattgagaagatagaagacatggatgacaactgttatttgaaactgtcatgtgtgatacctggcgagtctgtaaactacacctggtatggggacaaaaggcccttcccaaaggagctccagaacagtgtgcttgaaaccacccttatgccacataattactccaggtgttatacttgccaagtcagcaattctgtgagcagcaagaatggcacggtctgcctcagtccaccctgtaccctggcccggtcctttggagtagaatggattgcaagttggctagtggtcacggtgcccaccattcttggcctgttacttacctgagatgagctcttttaactcaagcgaaacttcaaggccagaagatcttgcctgttggtgatcatgctcctcaccaggacagagactgtataggctgaccagaagcatgctgctgaattatcaacgaggattttcaagttaacttttaaatactggttattatttaattttatatccctttgttgttttctagtacacagagatatagagatacacatgcttttttcccacccaaaattgtgacaacattatgtgaatgttttattattttttaaaataaacatttgatataattatcaattaactgaaaaaaaaaaaaaaaaaaaaaaaaaaaaaaa

SEQ ID NO: 285201 - DNA, 1000 bp, Homo Sapiens; identical to SEQ ID NO: 115669

SEQ ID NO: 285202 - DNA, 1000 bp, Homo Sapiens; identical to SEQ ID NO: 221046

SEQ ID NO: 285203 - DNA, 1000 bp, Homo Sapiens; identical to SEQ ID NO: 115670

SEQ ID NO: 285204 - DNA, 1000 bp, Homo Sapiens
gtcattttcgtgactaccgtctggaagctcactcagaagttttctgaaatcaatccagacatgaagaaattaaagaaggcgagggcgctgaccatcacggccatcgcgcagctcttcctgttgggctgcacctgggtctttggcctgttcatcttcgacgatcggagcttggtgctgacctatgtgtttaccatcctcaactgcctgcagggcgccttcctctacctgctgcactgcctgctcaacaagaaggttcgggaagaataccggaagtgggcctgcctagttgctggggggagcaagtactcagaattcacctccaccacgtctggcactggccacaatcagacccgggccctcagggcatcagagtccggcatatgaaggcgcatggttctggacggcccagcagctcctgtggccacagcagctttgtacacgaagaccatccatcctcccttcgtccaccactctactccctccaccctccctccctgatcccgtgtgccaccaggagggagtggcagctatagtctggcaccaaagtccaggacacccagtggggtggagtcggagccactggtcctgctgctggctgcctctctgctccaccttgtgacccagggtggggacaggggctggcccagggctgcaatgcagcatgttgccctggcacctgtggccagtactcgggacagactaagggcgcttgtcccatcctggacttttcctctcatgtctttgctgcagaactgaagagactaggcgctggggctcagcttccctcttaagctaagactgatgtcagaggccccatggcgaggccccttggggccactgcctgaggctcacggtacagaggcctgccctgcctggccgggcaggaggttctcactgttgtgaaggttgtagacgttgtgtaatgtgtttttatctgttaaaatttttcagtgttgacacttaaaattaaacacatgcatacagaaaaaaaaaaaaaaaa

SEQ ID NO: 285205 - DNA, 1000 bp, Homo Sapiens
gattggtgatttttccaaggtatgtgcgctgccaaccgtgtcagggaaacaccaagatctgaagtatgtcaacccagaaacagtggctgccttactgtcggggaagttccagggtctgattgagaagttttatgtcattgattgtcgctatccatatgagtatctgggaggacacatccagggagccttaaacttatatagtcaggaagaactgtttaacttctttctgaagaagcccatcgtccctttggacacccagaagagaataatcatcgtgttccactgtgaattctcctcagagaggggcccccgaatgtgccgctgtctgcgtgaagaggacaggtctctgaaccagtatcctgcattgtactacccagagctatatatccttaaaggcggctacagagacttctttccagaatatatggaactgtgtgaaccacagagctactgccctatgcatcatcaggaccacaagactgagttgctgaggtgtcgaagccagagcaaagtgcaggaaggggagcggcagctgcgggagcagattgcccttctggtgaaggacatgagcccatgataacattccagccactggctgctaacaagtcaccaaaaagacactgcagaaaccctgagcagaaagaggccttctggatggccaaacccaagattattaaaagatgtctctgcaaaccaacaggctaccaacttgtatccaggcctgggaatggattaggtttcagcagagctgaaagctggtggcagagtcctggagctggctctataaggcagccttgagttgcatagagatttgtattggttcagggaactctggcattccttttcccaactcctcatgtcttctcacaagccagccaactctttctctctgggcttcgggctatgcaagagcgttgtctaccttctttctttgtattttccttctttgtttccccctctttcttttttaaaaatggaaaaataaacactacagaatgag

SEQ ID NO: 285206 - DNA, 1000 bp, Homo Sapiens; identical to SEQ ID NO: 221049

SEQ ID NO: 285207 - DNA, 1000 bp, Homo Sapiens
gggatgtatgacgtccccatcatcgtcacagactctggaaaccctcccctgtccaacacgtccatcatcaaagtcaaggtgtgcccatgtgatgacaacggggactgcaccaccattggcgcagtggcagcggctggtctgggcaccggtgccatcgtggccatcctcatctgcatcctcatcctgctgaccatggtcctgctgtttgtcatgtggatgaagcggcgagagaaggagcgccacacgaagcagctgctcattgaccccgaggacgacgtccgcgacaacatcctcaagtatgacgaggaaggcggtggcgaggaggaccaggactacgacctcagccagctgcagcagccggaagccatggggcacgtgccaagcaaagcccctggcgtgcgtcgcgtggatgagcggccggtgggcgctgagccccagtacccgatcaggcccatggtgccgcacccaggcgacatcggtgacttcatcaatgagggactccgcgctgctgacaacgaccccacggcacccccctatgactccctgctggtcttcgactacgaggggagcggctccaccgcaggctccgtcagctccctgaactcatccagttccggggaccaagactacgattacctcaacgactgggggcccagattcaagaagctggcggacatgtatggaggtggtgaagaggattgactgacctcgcatcttcggaccgaagtgagagccgtgctcggacgccggaggagcaggactgagcagaggcggccggtcttcccgactccctgcggctgtgtccttagtgctgttaggaggccccccaatccccacgttgagctgtctagcatgagcacccacccccacagcgccctgcacccggccgctgcccagcaccgcgctggctggcactgaaggacagcaagaggcactctgtcttcacttgaatttcctagaacagaagcactgtttttaaaaaaaaaaaaaaaaaaagaag

SEQ ID NO: 285208 - DNA, 1000 bp, Homo Sapiens; identical to SEQ ID NO: 115672

SEQ ID NO: 285209 - DNA, 1000 bp, Homo Sapiens
aagcataatggattcaaccgccagaagcaagaagtctatcttttaccaatcataatcagtgatagtggaaatcctccactgagcagcactagcaccttgacaatcagggtctgtggctgcagcaatgacggtgtcgtccagtcttgcaatgtcgaagcttatgtccttccaattggactcagtatgggcgccttaattgccatattagcatgcatcattttgctgttagtcatcgtggtgctgtttgtaactctacggcggcataaaaatgaaccattaattatcaaagatgatgaagacgttcgagaaaacatcattcgctacgatgatgaaggaggaggggaggaggacacagaggcttttgacattgcaactttacaaaatccagatggaattaatggatttttaccccgtaaggatattaaaccagatttgcagtttatgccaaggcaagggcttgctccagttccaaatggtgttgatgtcgatgaatttataaatgtaaggctgcatgaggcagataatgatcccacggccccgccatatgactccattcagatatatggctatgaaggccgagggtcagtggctggctccctcagctccttggagtccaccacatcagactcagaccagaattttgactacctcagtgactggggtccccgctttaagagactgggcgaactctactctgttggtgaaagtgacaaagaaacttgacagtggattataaataaatcactggaactgagcattctgtaatattctagggtcactccccttagatacaaccaatgtggctatttgttttagaggcaagtttagcaccagtcatctataaactcaaccacattttaatgttgaaccaaaaaaagataataaaataaaaaagtatatgttaggaggttataaatcttgtggagtgtgaattaagtatgtggagtgtctagaagtccttggatatttgatatttacctgaccaccacagacaaagatt

SEQ ID NO: 285210 - DNA, 1000 bp, Homo Sapiens
caaatctacggttatgaaggcaggggctcagtggccgggtccctgagctccctagagtcggccaccacagattcagacttggactatgattatctacagaactggggacctcgttttaagaaactagcagatttgtatggttccaaagacacttttgatgacgattcttaacaataacgatacaaatttggccttaagaactgtgtctggcgttctcaagaatctagaagatgtgtaaacaggtatttttttaaatcaaggaaaggctcatttaaaacaggcaaagttttacagagaggatacatttaataaaactgcgaggacatcaaagtggtaaatactgtgaaataccttttctcacaaaaaggcaaatattgaagttgtttatcaacttcgctagaaaaaaaaaacacttggcatacaaaatatttaagtgaaggagaagtctaacgctgaactgacaatgaagggaaattgtttatgtgttatgaacatccaagtctttcttcttttttaagttgtcaaagaagcttccacaaaattagaaaggacaacagttctgagctgtaatttcgccttaaactctggacactctatatgtagtgcatttttaaacttgaaatatataatattcagccagcttaaacccatacaatgtatgtacaatacaatgtacaattatgtctcttgagcatcaatcttgttactgctgattcttgtaaatctttttgcttctactttcatcttaaactaatacgtgccagatataactgtcttgtttcagtgagagacgccctatttctatgtcatttttaatgtatctatttgtacaattttaaagttcttattttagtatacgtataaatatcagtattctgacatgtaagaaaatgttacggcatcacacttatattttatgaacattgtactgttgctttaatatgagcttcaatataagaagcaatctttgaaataaaaaaagatttttttttaaaaaaaa

SEQ ID NO: 285211 - DNA, 1000 bp, Homo Sapiens
atcaaagcctacatgttgatgactcttcaaggattagaatatttacatcaacattggatcctacatagggatctgaaaccaaacaacttgttgctagatgaaaatggagttctaaaactggcagattttggcctggccaaatcttttgggagccccaatagagcttatacacatcaggttgtaaccaggtggtatcgggcccccgagttactatttggagctaggatgtatggtgtaggtgtggacatgtgggctgttggctgtatattagcagagttacttctaagggttccttttttgccaggagattcagaccttgatcagctaacaagaatatttgaaactttgggcacaccaactgaggaacagtggccggacatgtgtagtcttccagattatgtgacatttaagagtttccctggaatacctttgcatcacatcttcagtgcagcaggagacgacttactagatctcatacaaggcttattcttatttaatccatgtgctcgaattacggccacacaggcactgaaaatgaagtatttcagtaatcggccagggccaacacctggatgtcagctgccaagaccaaactgtccagtggaaaccttaaaggagcaatcaaatccagctttggcaataaaaaggaaaagaacagaggccttagaacaaggaggattgcccaagaaactaattttttaaagagaacactggacaacattttactactgagggaaatagccaaaaaggcaaataatggaaaaatagtaaacattaagtaaatgctgtagaagtgagtttgtaaatattctacacatgtaaaatatgtaaaactatgggttatttttattaaatgtattttaaaataaaaatttaattctggtttttctgattagagtcccaaagtgagaaaagttcaatactcttgaaatgtagaattgaaaatgcattagggaaaacttaataaaaattattaccagttatttggaaaaaaaaaaaa

SEQ ID NO: 285212 - DNA, 1000 bp, Homo Sapiens
aaccgcttcggcaagacggcgctgcaggtcatgatgtttggcagcaccgccatcgccctggagctgctgaagcaaggtgccagccccaatgtccaggacacctccggtaccagtccagtccatgacgcagcccgcactggattcctggacaccctgaaggtcctagtggagcacggggctgatgtcaacgtgcctgatggcaccggggcacttccaatccatctggcagttcaagagggtcacactgctgtggtcagctttctggcagctgaatctgatctccatcgcagggacgccaggggtctcacacccttggagctggcactgcagagaggggctcaggacctcgtggacatcctgcagggccacatggtggccccgctgtgatctggggtcaccctctccagcaagagaaccccgtggggttatgtatcagaagagaggggaagaaacactttctcttcttgtttctcctgcccactgctgcagtaggggaggagcacagtttgtggcttataggtgttggttttgggggtgtgagtgtttgggggacgtttctcatttgtttttctcactccttttggtgtgttggacagagaagggctcctgcaggccacagccacctaaacggttcagtttcttctgcgcctcaggctgctggggcctcagacgagacccaagggcagagcatttaagagtgaagtcatgacctccagggagcctagaagctggtggccttggccggctgtgctcagagacctgaagtgtgcacgttgcttcaggcatggggggtggggggagcgtcccaaatcaataagaaggtagaatgagttatgagttattcatattctgttggaagcttgttttccagtctcttgtacagcgttttaaaagaaatggattctatttattatgctttattggaaaaaatgttgtaataatttaatgtttttacccattaaattaagacttgtgcatgatcaaaaaaaaaaaaaaaaaa

SEQ ID NO: 285213 - DNA, 1000 bp, Homo Sapiens; identical to SEQ ID NO: 115673

SEQ ID NO: 285214 - DNA, 1000 bp, Homo Sapiens
ctttgccatggtcaagaggtacctgacctccttccccattgatgaccgcgtgcagagccacatcctccacttggaacacgatctggttcatgtgaccaggaagaaccacgccaggcaggcgggagttcgaggtcttggacatcaaagctgagtcactggacctagctgtgcccccaacctagattggcagcaccaccccagggcagaggactctctgggcacccgctgtgcatggagccagagtgcagagccccagatcctttagtaatgcttcccctggtcctgcaacaggcccggtcacctcggccgggcccggggctgaggtcagcctcactgcctgcttattgcctctttctcagaatcctctttcctccccatttggccctgggctcaggggaccaggtggggcgggtggggagctgtccggtgctaccacaccgtgccctcagtggactaaccacagcagcagccagggatgggccctggaggttcccggccggagagtgcctctcccctctgccatccacgtcaggtctttggtggggggaccccaaagccattctgggaagggctccagaagaaggtccagcctaggccccctgcaaggctggcagcccccacccccaccccccaggccgccttgagaagcacagtttaactcactgcgggctcctgagcctgcttctgcctgctttccacctccccagtccctttctctggccctgtccatgtgactttggcccttggttttctttccagattggaggtttccaagaggccccccaccgtggaagtaaccaagggcgcttccttgtgggcagctgcaggccccatgcctctcctccctctctggcagggccccatcctgggcagaggggcctggggctgggcccagagtccagccgtccagctgctcctttcccagtttgatttcaataaatctgtccactccccttttgtgggggtgaacgttttaacagccaaaaaaaaaaaaaaaaaa

SEQ ID NO: 285215 - DNA, 1000 bp, Homo Sapiens; identical to SEQ ID NO: 221051

SEQ ID NO: 285216 - DNA, 1000 bp, Homo Sapiens; identical to SEQ ID NO: 221052

SEQ ID NO: 285217 - DNA, 1000 bp, Homo Sapiens
ttctgtggtgccaagtagaaagtttaactgaaattaataagccaatggaaagaaagaaatattaataactgctggtggaaagactagctagatgtcagtgtggaaagattagatccactttacatgtgatattccaaatgaattaaaatgttaagtataaaaagaaaaatactacaagtctcacaccaatagtggtataaaggaacttcatggcaattggcaaggtagatcaactaagagaaaaagttttaaatgtgtagtaaataggaaaaagacaaaacaagatggaatttaaaagaagctatttgcattacacatggatgcactcagtttttgtaaaactatatgcatatccataggggtttgtactcttaggcaaatttataaagcgatcgtgtataaatgatataaaaaatcaatttgaatggtattcaaatttcctaatattaaaaatgcaactttgacttagttcatgctattgtattagcaaaactgttttaattgcatgtgtccttatagcagcagcattgtgtattagtagccttttaagagaactgtgtagaagactataaaaagggctttataactgatcttttgacatactcactttgagtggcatatgcccaggaaaatatttaaaagaaagaaaagctatttgtacaaagttttctagcagttccactcagataactttaagggggaaaaaagcccaacgattggaaatggttaagtaaattttggtgtattgctagtgctatcacagaatgttatatagccattcaataatattgatatatgtcaaattgtatgcaaaaaagtgagattcaaaaatgttaataagaacataaattgtgtttactgatacatgtgaaaatttaggtctacattgaaaagaatcagaagataacatgtaattcagtttaacattaggggttctttatttttcttctgttaaatattgatgtatgcaataaaaaataaaagattaattggtaaagtg

SEQ ID NO: 285218 - DNA, 1000 bp, Homo Sapiens
cccttcatgaagcactgaaactactgccacctgctcactgcgaaaccctccggtacctcatggcacatctaaagagagtgaccctccacgaaaaggagaatcttatgaatgcagagaaccttggaatcgtctttggacccacccttatgagatctccagaactagacgccatggctgcattgaatgatatacggtatcagagactggtggtggagctgcttatcaaaaacgaagacattttattttaaatttttaatttgaggggaaaagaaatgttttacagatgaaggaatgttttatagtaatttaatttgctcctgtagctgcattatttcttgattagaggtttgggcatataaccagattaaagtgaaggaactttctgttgtttttgtagcaccgctcagctgtcttgtaaaacagtgaacacacgctttctggttctagtaatcctgggtgtttatcacgttcagagaaactcaagctattgcatgattagccccctatctggcaaggaaaccccatacagaagaaacaacaaacctgcgcctgcaccgcctctgcgtcctgggtagtctgtgcttgtaatccagcatgtttcacagagtaagcctgttgtgactttgcttttggggtctatgtcattggtttctgatgcttgtacaaacacgcacacacaaatggataaaacagcacctctggctgttacattaccataaaccatatcacatgcctacattttacaaatgatttctggtttctcttagttcttctctaacatagtactttctttccagcaaaagcaaaatgtgttttcagatttgttactttaataaaggttatccataccaataaaaagtgtacaacacagcattttctgttaaattattattggttttcagttgtaatttggtattttttctggcatgcgtttattaatttattaaattggcttttagaaataaaaaatattgatagcttacttttttctcataagaat

SEQ ID NO: 285219 - DNA, 1000 bp, Homo Sapiens; identical to SEQ ID NO: 115675

SEQ ID NO: 285220 - DNA, 1000 bp, Homo Sapiens
tatgaccccagggtgatgaagcacacaacggatctggatgcatcaaagatcacccaagggcagttcgacgagcattacgtgctgtcttctcgggtgcgcactggccgcagcatccgtgggctgagcctgcctccagcctgcacccgggccgagcgaagggaggtagagaacgtggccatcactgccctggagggcctcaagggggacctggctggccgctactacaagctgtccgagatgacggagcaggaccagcagcggctcatcgatgaccactttctgtttgataagccagtgtcccctttattaacatgtgctgggatggcccgtgactggccagatgccaggggaatctggcataattatgataagacatttctcatctggataaatgaggaggatcacaccagggtaatctcaatggaaaaaggaggcaatatgaaacgagtatttgagcgattctgtcgtggactaaaagaagtagaacggttaatccaagaacgaggctgggagttcatgtggaatgagcgcctaggatacattttgacctgtccttcgaaccttggaacaggactacgagctggtgtccacgttaggatcccaaagctcagcaaggacccacgcttttctaagatcctggaaaacctaagactccagaagcgtggcacaggtggtgtggacactgccgcggtcgcagatgtgtacgacatttccaacatagatagaattggtcgatcagaggttgagcttgttcagatagtcatcgatggagtcaattacctggtggattgtgaaaagaagttggagagaggccaagatattaaggtgccaccccctctgcctcagtttggcaaaaagtaaactttccctttcccaatttataaataatctgtctgctggtacaacagacataaatctctactctgagagtttttatacacttggaaaaatataaaattgtagatcctgcctatctttacaataaaactctccttaatat

SEQ ID NO: 285221 - DNA, 717 bp, Homo Sapiens
agagcgatcatgtcgcacaaacaaatttactattcggacaaatacgacgacgaggagtttgagtatcgacatgtcatgctgcccaaggacatagccaagctggtccctaaaacccatctgatgtctgaatctgaatggaggaatcttggcgttcagcagagtcagggatgggtccattatatgatccatgaaccagaacctcacatcttgctgttccggcgcccactacccaagaaaccaaagaaatgaagctggcaagctacttttcagcctcaagctttacacagctgtccttacttcctaacatctttctgataacattattatgttgccttcttgtttctcactttgatatttaaaagatgttcaatacactgtttgaatgtgctggtaactgctttgcttcttgagtagagccaccaccaccatagcccagccagatgagtgctctgtggacccacagcctaagctgagtgtgaccccagaagccacgatgtgctctgtatccagaacacacttggcagatggaggaagcatctgagtttgagaccatggctgttacagggatcatgtaaacttgctgtttttgttttttctgccgggtgttgtatgtgtggtgacttgcggatttatgtttcagtgtactggaaactttccattttattcaagaaatctgttcatgttaaaagccttgattaaagaggaagtttttataat

SEQ ID NO: 285222 - DNA, 641 bp, Homo Sapiens
atttaaattctgcagctcagagattcacacagaagtctggacacaattcagaagagccacccagaaggagacaacaatgtccctgctacccgtgccatacacagaggctgcctctttgtctactggttctactgtgacaatcaaagggcgaccacttgcctgtttcttgaatgaaccatatctgcaggtggatttccacactgagatgaaggaggaatcagacattgtcttccatttccaagtgtgctttggtcgtcgtgtggtcatgaacagccgtgagtatggggcctggaagcagcaggtggaatccaagaatatgccctttcaggatggccaagaatttgaactgagcatctcagtgctgccagataagtaccaggtaatggtcaatggccaatcctcttacacctttgaccatagaatcaagcctgaggctgtgaagatggtgcaagtgtggagagatatctccctgaccaaatttaatgtcagctatttaaagagataaccagacttcatgttgccaaggaatccctgtctctacgtgaacttgggattccaaagccagctaacagcatgatcttttctcacttcaatccttactcctgctcattaaaacttaatcaaacttcaaaaaaaaaaaa

SEQ ID NO: 285223 - DNA, 1000 bp, Homo Sapiens; identical to SEQ ID NO: 221053

SEQ ID NO: 285224 - DNA, 539 bp, Homo Sapiens; identical to SEQ ID NO: 115677

SEQ ID NO: 285225 - DNA, 1000 bp, Homo Sapiens
ttctccccataggcgactcttctgcctggactagagggacctctcccagggtccctggggtggggatagggagcagatgcaatgactcaggacatccccccgccaaaagctgctcagggaaaagcagctctcccctcagagtgcaagcccctgctccagaagatagcttcaccccaatcccagctacctcaaccaatgccaaaaaaagacagggctgataagctaacaccagacagacaacactgggaaacagaggctattgtcccctaaaccaaaaactgaaagtgaaagtccagaaactgttcccacctgctggagtgaaggggccaaggagggtgagtgcaaggggcgtgggagtggcctgaagagtcctctgaatgaaccttctggcctcccacagactcaaatgctcagaccagctcttccgaaaaccaggccttatctccaagaccagagatagtggggagacttcttggcttggtgaggaaaagcggacatcagctggtcaaacaaactctctgaacccctccctccatcgttttcttcactgtcctccaagccagcgggaatggcagctgccacgccgccctaaaagcacactcatcccctcacttgccgcgtcgccctcccaggctctcaacaggggagagtgtggtgtttcctgcaggccaggccagctgcctccgcgtgatcaaagccacactctgggctccagagtggggatgacatgcactcagctcttggctccactgggatgggaggagaggacaagggaaatgtcaggggcggggagggtgacagtggccgcccaaggcccacgagcttgttctttgttctttgtcacagggactgaaaacctctcctcatgttctgctttcgattcgttaagagagcaacattttacccacacacagataaagttttcccttgaggaaacaacagctttaaaagaaaaagaaaaaaaaagtctttggtaaatggcaaaaaaaaaaaaaaaaaa

SEQ ID NO: 285226 - DNA, 1000 bp, Homo Sapiens; identical to SEQ ID NO: 221054

SEQ ID NO: 285227 - DNA, 1000 bp, Homo Sapiens; identical to SEQ ID NO: 115679

SEQ ID NO: 285228 - DNA, 1000 bp, Homo Sapiens
cattatttggtttaaaccagaacccagtgtttccacacttaaattctctaaccgaatattcatggatggctcaagtctgcacagagcaagtcctcactcttcaaggaggcccacttgtgtcttaggcaggcaagagaattgaaatgagggtgccacccaagtagcccagagtgagctttagctctctctagaatgagcaagactgggccccacatggcttagagaggcttgaaggccagcagctgggttgggggtggtggtcattaatggcatatggtcctagacaaaccatctcctccttgccggctccccctccagccagagacagaggatgtggcctggttcaaagtaaagcagaggatgcaacaaatgtggccaagcctatcaaaggaaatgagaatgacagccttttttcctgggccagaagtagaggggtgggtgcgtaaggatgtgtgagttttgcttttgactccaggaacaaaaaggtaaatcccacatcccagtttctcagaagtccctgtttattccaaatgccatccagatgtgtgcaatgtggcaaactgaagctgcacagtgttggtttccttgtattctgaggatgttaaagactttgttaaatggttatccaattgctctttcacaggtagcctattaaactattttaatatgtttttttaaacctcataaaaatctagcacactcttctcttgagcagttagcagacctaaagcaagcctgaattggctatgcagtacattgtattctgtttgggggaatttgttttagccattttctttaattaccagttttccagaacactcttagctatgttgacatgaggcagttccttccaggtgattctgtttccttaagtattatataaactgtgccaatacagacaaagcataatcaatataatctgaattattgttatctttacctcctgagtaataagcatggtgtcagttttgtacatagcaaataaaataaatgaaatctg

SEQ ID NO: 285229 - DNA, 1000 bp, Homo Sapiens; identical to SEQ ID NO: 223037

SEQ ID NO: 285230 - DNA, 1000 bp, Homo Sapiens
gtgggtcagatcggcaacacggggcccaagggaaaacgtggagagaagggtgatccaggagaagtgggacgggggcaccccgggatgcctgggcccccagggatcccaggactccctggccggcctggccaggcaatcaacggcaaggatggagatcgagggtccccaggggctccaggagaggcaggtcgacctggcctgccaggccccgtggggctgccgggcttctgtgaacctgccgcctgccttggagcttcggcctatgcctctgcccgccttacagagcctggatccatcaaggggccttgagcatcaggcccagacagagcctggcaggcatcctggcgggaaggaccaggtcccctctgggtggacatgcacccatccccagtccaggaaaccatctcccccaggaccttctgtctgggactcaggagtcctaaggaaaaggaattctaaaacatgggggaaggggaggtagagcactgatgggtgaaaaagtgaggccaacacacagggcaagtggtgtcgatggagtcgaagcgctgaaggaatagggcggctttccttccagcgagcatcattcggctgttaccaaaacaaacatcttaatctgcacctttctccactggccatcttgtccttgggtcagtgggacatgggcacctcgggaggcccgggccctgcccagctacagttccacccctcagcttgaggaccaatgactgaggtctatgccagttcctgatcccatctcactctctggacctaccaggtgactgctgctgggtgactcccctgaggcggctatacccttaagccagccccactacttccttccctgcctcccagctcagtatttaaacatcatctcccttctctttctcgcataactccccacccctttctccccgatccacccaggcctttctgtaaataaaagctcccaagttgggtacaaaccaggatattggagttactctatcctggagttaactag

SEQ ID NO: 285231 - DNA, 1000 bp, Homo Sapiens
cctccccgctgagcacggggaagattctggaccagaaagcatacagctgtgctaatcggctaattgtcctatgtatcgaaaacagtttcatgacagacgctaggaagtaatggccttctgatgattcttaaagagttttcaattttttcttatgtgaagagttgacactgaaatctaaaatgtttaattgttgtaaatattacagtttttttttttttactacatattctttacaacagcaaccaaagaaaacatacctcaatacactcaaaactgaagacatagaggactcagatcaaagacaaaatctgatccatatattggtgctagattctgcaggaaaccccagcagtgtgaacgcatcccaacataggttaagagcaagttgaaaacaaaggccagattctgccactgcatccttcagacagttatatcctccttttaaaccattgttgttgagtgtaagatgtccttcatgttttcttataaagtcagtgtttagaaatgttaccctttctaagttatatacagatcaaatgcttttttctttcacgtacatccatcatttgcaactgctgttcgtacacagaaacaggactgctcaaatgatcctatttgtattttctgatgctatcagactctaatgtttttttccctaaaatattattgccatcatgctttaggaatttttatatttttacacaatcatattttagtatggtgtctgtttatgtaactctgacttgctggaaaagttgaaactccaaataatctgaaactagaaaagaaatagcacataattactaccttccccttggcggctctcctcccccaacccccaccccacaattttatgacttccatttggcaattgttgaattataactgcgactgaaacaaacaggttcatagagatgaattttctgagaaacatatatctacatgttgtataattggattttttttccatgtaagtgaacataaaaacatcttttccggg

SEQ ID NO: 285232 - DNA, 1000 bp, Homo Sapiens
gagctccggggccttcggggagccctggcttgcctggtgtgcctggctccatgggagacatggtgaattatgatgaaatcaagaggttcatcagacaagagatcattaaaatgtttgatgagagaatggcttactacacctccaggatgcagttccccatggagatggcggcagctccgggacgaccagggcctccagggaaggatggtgctccgggcaggccaggtgctccagggtcacctgggctccctggtcagattggcagagaaggacggcagggcttgccaggagtaagaggattgcctggtaccaaaggtgaaaaaggggacattggtattggcattgcaggagaaaatggtcttcccggccccccaggtcctcaaggtcctccaggctatggcaagatgggtgcaacaggaccaatgggccagcaaggcatccctggcatccctgggcccccgggtcccatgggccagccaggcaaggctggccactgtaatccctctgactgctttggggccatgccgatggagcagcagtacccacccatgaaaaccatgaaggggccttttggctgaaattccccacctgcctttggatgaaagactccgttgggaataaatggccaaagcttataggactctgtgacaggttgtgaatgttttttttttttgttgttgttgtttttaattgctgttaatattttttaaataataaagaaacaaaactatctgccctttcccttccagtgggttcctctggtgctgcagccagagctccctgttgccctccttttcccgtttagtcccaggaacaaaaagggcatttgggtacaggggcatatacctgtaatcctagctattcaaggggctgaggtgggaggatcgcctgagcccaggagtttgagaccagtctaagcaacataatgagactcagtctccgaaaaataaaaattaaaaaataaagggtatttccctccttaaaaaaaaaaaaaaaaaaa

SEQ ID NO: 285233 - DNA, 1000 bp, Homo Sapiens
gttgacacatttttgtaccatcccccttttgtaccatctctgctcacaaagattatatgcaggctttgaagaggaggagatgcagaagataattgaatttgtatcttgtatgcctatgtaattcaaagtgacttagtccattgaattgtgttcatttattagttggctggttaagatagcattaattatcttaaatttattcaactactaaaagtctcaggcaataggacagatgagtgtcatcatttttattgtgtggcatacttggagctataatccaaacgttttactcaacaaaataatgctagagtaactgatcaatttggttaaattgaatgaagaaccaagtgaacacagagaaaacttattcggacaagtagacccagcacagcaaaaatttgtctgaaagataagacaagcttataagaccaaagctaagtctaagaaaatctaaatggaaaaaaaattgcgtgttcagatccaatagtgagtgatgtggtacaactggaggagttagctacttgcttcatgaatttgtcaaaagtgaatactaataaagtgggaggcttcactaaatgagggggtaaataagatttaagtttatcagaagtgtgtgtattgtgtgaccatactaagcttctgggtgtaagtaaagatgctggctattttacaactttttattgtattgtgttatgcaaagtacattttggagataaatgtttttcagcacattaatgtctttaaattcaggttgtattgggtgtattttacaactatttatttttaaataacatttagggtgtgttttcccccattttgtttgttctctatcttacctcatcaaactctttacgatttaattgaatatactcatgttaagtgcaatggcattagttttattcaaaatcccacatgggcataatgctttgaggccttgattcctacatgttcattatgcataatgagcttgtcacctatctcagcaataaaggttctgacc

SEQ ID NO: 285234 - DNA, 1000 bp, Homo Sapiens
catttctttggcccccttactctgttgtcctttcccttttctttcagtttttttaatcgcatgtctagtatattaagtctccatagccctcctgatgcagtagacagtgctatgctgtggatataataccaaccagaaattggcatttataaacctgttaagagactttaagcatgtttcaagaggcagttgccccactggaatttctataaggctggtacccttcccagagttacagaatcttgggtgctatctctagtctgtgagggaggaactcccagcatccccattgcccacaaatgggatcctcactgtatccactaggagattagaaattaaggtttcttcactacttctatggtagggttgtctgaaattccctttcaggctgtgggtactggtcttgggttctagtcataaggggttccttataaggagcaggcggaggggagtacactttcatgtgatttaattttgatcctgccctctccagctgctccttcaaaagaaacatcaaaagatagaaactctgggctgggcacagtggctcacacactttgggaggccaagcgggggtgcagatcacctgaggtcaggagtttgagaccagcctggccaatgtggtgaaaccccatctctactaaaaatacaaaaattagctgggcgtggtggtgcatgcctgtaatcccagctactcgggaggctgaggcaggagaatcgcttgaacccaggaggcggaggttgcagtgagccaagatggcgccattgcactccagcctgggcgacaagagcaaaactccgtctcaaaaaaaaaaaagatacaaagtctgcatttgatataatgccttaattactgggtctacaattaatgttgactgttttagattgtaagctcctggagagcagtattgctgtagtaggaatgttttaacagtgtcatatgaaaaagaacaaaataaatattttgattttgtgattctaaaaaaaaaaaaaaaaaaaa

SEQ ID NO: 285235 - DNA, 1000 bp, Homo Sapiens; identical to SEQ ID NO: 115682

SEQ ID NO: 285236 - DNA, 1000 bp, Homo Sapiens
ggacgcgctatttacctcctgaaggttggcaaagctggacaaaataagcctgccattttcatggactgtggtttccatgccagagagtggatttctcctgcattctgccagtggtttgtaagagaggctgttcgtacctatggacgtgagatccaagtgacagagcttctcgacaagttagacttttatgtcctgcctgtgctcaatattgatggctacatctacacctggaccaagagccgattttggagaaagactcgctccacccatactggatctagctgcattggcacagaccccaacagaaattttgatgctggttggtgtgaaattggagcctctcgaaacccctgtgatgaaacttactgtggacctgccgcagagtctgaaaaggagaccaaggccctggctgatttcatccgcaacaaactctcttccatcaaggcatatctgacaatccactcgtactcccaaatgatgatctacccttactcatatgcttacaaactcggtgagaacaatgctgagttgaatgccctggctaaagctactgtgaaagaacttgcctcactgcacggcaccaagtacacatatggcccgggagctacaacaatctatcctgctgctgggggctctgacgactgggcttatgaccaaggaatcagatattccttcacctttgaacttcgagatacaggcagatatggctttctccttccagaatcccagatccgggctacctgcgaggagaccttcctggcaatcaagtatgttgccagctacgtcctggaacacctgtactagttgagaaagctgatggccttgtttcaaaattctcatttttcatttcttttctttcttgaattcttattttggtttgcctggatgttttgcagatcccaatctttcttttaagcttctgggtctattaaactaggtagatcttttcgtattgatcataataaaagtgaatcattactattggaaaaaaaaaaaaaaa

SEQ ID NO: 285237 - DNA, 1000 bp, Homo Sapiens; identical to SEQ ID NO: 221057

SEQ ID NO: 285238 - DNA, 1000 bp, Homo Sapiens; identical to SEQ ID NO: 221058

SEQ ID NO: 285239 - DNA, 1000 bp, Homo Sapiens
ggcccagacggtggaacagaggctgaagttgttcaagttggcgtctgagaagcatcagcatatgtatcgcctcgccatgaccggctctgggatcgatcgtcacctcttctgcctttacgtggtgtctaaatatctcgctgtggagtcccctttccttaaggaagttttatctgagccttggagattatcaacaagccagacccctcagcagcaagtggagctgtttgacttggagaataacccagagtacgtgtccagcggagggggctttggaccggttgctgatgacggctatggtgtgtcgtacatccttgtgggagagaacctcatcaatttccacatttcttccaagttctcttgccctgagacggattctcatcgctttggaaggcacctgaaagaagcaatgactgacatcatcactttgtttggtctcagttctaattccaaaaagtaattccactggagctgctgggaaggaaaacgagctcttctgatgcaaaccaaatgaaaaataggcattaatcctgaccttagctcgggatgaaacactgctcttaaaaaaactcagttttccttccagaaaatgtgggtgtttttttttcctagaacagtatctctcccctgtgaagcataaccccactacttccagacttgccctcccttgggggacatctgataaagtctcccctgatgtctccgcatcggcttggatttattaagggatgcaaatcttgttgagttaatgaaggaattagtagggttgtggcttcacacacagtggaatggaaatggtgtgctttctcagtggcaaccgaaggcctagtgcttaagggcatttagcatcatccaagcagggtaaacttttgttttgttaaaagaaaaatgtgttattcaagttggtgtccccagttgtagctaacacatctggaatgcactaaccaaaatgctgtgctttggagacctgcttttgtcaccgtgggtaaccgttcccgtctgg

SEQ ID NO: 285240 - DNA, 1000 bp, Homo Sapiens
tcccctggcggtttgcagatcccgttcacttgctcctgtcctttgtggtattgctgcaggtttgatacttcttaccttcttgattgtcattaccttatacgtgatatcaaaacacagagcacgcaattattatacagatacaagccagaaagaagcttttcatttagaagcacgagaagtatattctgttgatccatacaacccagccagctgatcagaagacaaactggtgtgtgcctcattgcttggaattcagcggaatattgattagaaagaaactgctctaatatcagcaagtctctttatatggcctcaagatcaatgaaatgatgtcataagcgatcacttcctatatgcacttattctcaagaagaacatctttatggtaaagatgggagcccagtttcactgccatatactcttcaaggactttctgaagcctcacttatgagatgcctgaagccaggccatggctataaacaattacatggctctaaaaagttttgccctttttaaggaaggcactaaaaagagctgtcctggtatctagacccatcttctttttgaaatcagcatactcaatgttactatctgcttttggttataatgtgtttttaattatctaaagtatgaagcattttctggggttatgatggctttacctttattaggaagtatggttttattttgatagtagcttcctcctctggtggtgttaatcatttcatttttacccttacttggtttgagtttctctcacattactgtatatactttgcctttccataatcactcagtgattgcaatttgcacaagtttttttaaattatgggaatcaagatttaatcctagagatttggtgtacaattcaggctttggatgtttctttagcagttttgtgataagttctagttgcttgtaaaatttcacttaataatgtgtacattagtcattcaataaattgtaattgtaaagaaaacatacaaaaaaaaaaaaaaaa

SEQ ID NO: 285241 - DNA, 1000 bp, Homo Sapiens
gcagacaaaatgctgctgctgctgctcctgaaatacccacccctttccactacgggtgggttcccaaggacatgggacaggcaaagtgtgagccaaaggatccttccttattcctaagcagagcatctgctctgggccctggcctccttcccttcttgggaaactgggctgcatgaggtgggccctggtagtttgtaccccaggcccctatactcttccttcctatgtccacagctgaccccaagcagccgttccccgactcctcacccctgagcctcaccctgaactccctcatcttgcaaggccataagtgttttccaagcaaaatgcctctcccatcctctctcaggaagcttctagagactttatgccctccagagctccaagatataagccctccaagggatcagaagctccaagttcctgtcttctgttttatagaaattgatcttccctgggggactttaactcttgacctgtatgcagctgttggagtaattccaggtctcttgaaaaaaaagaggaagataatggagaatgagaacatatatatatatatattaagccccaggctgaatactcagggacagcaattcacagcctgcctctggttctataaacaagtcattctacctctttgtgccctgctgtttattctgtaaggggaaggtggcaatgggacccagctccatcagacacttgtcaagctagcagaaactccattttcaatgccaaagaagaactgtaatgctgttttggaatcatcccaaggcatcccaagacaccatatcttcccatttcaagcactgcctgggcacaccccaacatcccaggctgtggtggctcctgtgggaactacctagatgaagagagtatcatttataccttctaggagctcctattgggagacatgaaacatatgtaattgactaccatgtaatagaacaaaccctgccaagtgctgctttggaaagtcatggaggtaaaagaaagaccattc

SEQ ID NO: 285242 - DNA, 1000 bp, Homo Sapiens
catcctccagttaccaatggtgatactgtcaaaggtcatggtagcggattggttaggactcagtcagaggaatctcgaccgcagtcattacaacagccagccacatccactacagaaactccggcttctccagctcacacaactccacagacccaaagtacaagtggtcgtcggagaagagcagctaacgaagatcctgatgaaaaaaggagaaagtttttagagcgaaatagagcagcagcttcaagatgccgacaaaaaaggaaagtctgggttcagtctttagagaagaaagctgaagacttgagttcattaaatggtcagctgcagagtgaagtcaccctgctgagaaatgaagtggcacagctgaaacagcttcttctggctcataaagattgccctgtaaccgccatgcagaagaaatctggctatcatactgctgataaagatgatagttcagaagacatttcagtgccgagtagtccacatacagaagctatacagcatagttcggtcagcacatccaatggagtcagttcaacctccaaggcagaagctgtagccacttcagtcctcacccagatggcggaccagagtacagagcctgctctttcacagatcgttatggctccttcctcccagtcacagccctcaggaagttgattaaaaacctgcagtacaacagttttagatactcattagtgacttcaaagggaaatcaaggaaagaccagtttccatttatgcgaaatctgtggttgtaaattttttttttttacttgaaattaaatttggctctaaagttggtgtagcagcagttgatcagactgaaaaacggtttttagtctctggaaaaagactgattttgctttttttataaatattattagatttattaatttttctgtgctcaatgtgtaaattgtattataattcattgtgatttatttcacttttaatttgctggtgttttaataaatgggggtgttactgaaaaaaaa

SEQ ID NO: 285243 - DNA, 1000 bp, Homo Sapiens
ccctttgcggcggacaaatgaccatggaaacagttgaatcccagcatgatggaagtataacagcttctttgacagagagcaagtctgctcatgtgcagactcagactggccaaaattcaatccctgctttagctcaggtagcagcaattgcagagacagatgaatctgcagaatcagaaggtgtaattgattctcataaacgtagagaaatcctttcacgaagaccctcttataggaaaatactgaatgaactgtcctctgatgtgcctggtgttcccaagattgaagaagagagatcagaggaagaaggaacaccacctagtattgctaccatggcagtaccaactagcatatatcagactagcacggggcaatacagtatgtatgctgcaattcgatatgatacagtgctagctttaagtcttctctagttatattgaagcaactcaggttttggcattaaattgttccattttaaaatgcatcattaatacctaaactgtatcatagaatgaaagtatatgttaaaaagtgagatctttgtattgacagctgtcatataattttgaaaagtaaaaattttgactgccgaatatagaagaaaattttggggtaaaaaggagaatttttcctatttacatgtttatattaatctctagtaaaacattgtttttgttgtctttatgatgcatgcgaacataaatgtctgtatttcattcttgttggcttttgttacccacaattacatactattcttactaatctgagagttttctaaagtatgttttcaatgtttcactactctctactctgttaatttgtgctacagtttttcctaaaagagaatggaaaaatgatttaattttttaaactgtagcaattggatagataattttatttgaaattttacacactgaaagctctaaataaacagatacattcacattcaaaaaaaaaaaaaaaaaaaaaaaaaaaaaaaaaaaaaaaaaaaaaaaaaaaa

SEQ ID NO: 285244 - DNA, 691 bp, Homo Sapiens
gacccctcacactcacctagccaccatggacatcgccatccaccacccctggatccgccgccccttctttcctttccactcccccagccgcctctttgaccagttcttcggagagcacctgttggagtctgatcttttcccgacgtctacttccctgagtcccttctaccttcggccaccctccttcctgcgggcacccagctggtttgacactggactctcagagatgcgcctggagaaggacaggttctctgtcaacctggatgtgaagcacttctccccagaggaactcaaagttaaggtgttgggagatgtgattgaggtgcatggaaaacatgaagagcgccaggatgaacatggtttcatctccagggagttccacaggaaataccggatcccagctgatgtagaccctctcaccattacttcatccctgtcatctgatggggtcctcactgtgaatggaccaaggaaacaggtctctggccctgagcgcaccattcccatcacccgtgaagagaagcctgctgtcaccgcagcccccaagaaatagatgccctttcttgaattgcattttttaaaacaagaaagtttccccaccagtgaatgaaagtcttgtgactagtgctgaagcttattaatgctaagggcaggcccaaattatcaagctaataaaatatcattcagcaac

SEQ ID NO: 285245 - DNA, 1000 bp, Homo Sapiens
ctctgcctgcttaattgtgctagaaataacagcatctaaagtgaagacttaagaaaaacttagtgactactagattatccttaggactctgcattaactctataatgttcttggtattaaaaaaaaagcatatttgtcacagaaatttagttaacatcttacaactgaacatgtatgtatgttgcttagataaatgtaatcactgtaaacatctatatgatctgggattttgtttttattttgaaatgggagcttttttgtttacaagttcattaaaaactaaaaactgtttctgtaaggaaatgagattttttttaaacaacaaaaaatgccttgctgactcactattaaataaaaatctccccaattttttgatagactacttcaagccatttgttacatggtattcctttgcaagtcaatttaggtttcgtgttataacttttcctctttttttaagaaaaatgaaaaaagtaattcttttgtctgaaggggaaaggcattctttcatttttttctttttttttttttttttttatgacttgcaggcacaatatctagtactgcaactgccagaacttggtattgtagctgctgcccgctgactagcagctggactgattttgaataaaaatgaaagcattaaagggtttccctacaaaacatttttctttaaaatacttttgaaatggctataagcagttgactttcacccttggagagcatcacactgtgtgaggttcagtgattgttgaccctccccagcccctcctgcttctttaagttatctgtgtgcgtgcgcttcctctcaatcttctttgcacgctcatttctttttctctgacccatgagaaaggaaaacttactgatgataatttttaaatagtgtaatttattcatttatagcatgtcaggataaattaaaagaacatttgtctggaaatgctgccgggagcctattgtgtaaatgtaggtattttgtaaaataaccttgaaattg

SEQ ID NO: 285246 - DNA, 1000 bp, Homo Sapiens
ccaaatttagttcctcatcacaaaagaacaaagataaaccagcctcaatcccggctgctgcatttaggtggagacttcttcccattcccaccattgttcctccaccgtcccacactttagggggttggtatctcgtgctcttctccagagattacaaaaatgtagcttctcaggggaggcaggaagaaaggaaggaaggaaagaaggaagggaggacccaatctataggagcagtggactgcttgctggtcgcttacatcactttactccataagcgcttcagtggggttatcctagtggctcttgtggaagtgtgtcttagttacatcaagatgttgaaaatctacccaaaatgcagacagatactaaaaacttctgttcagtaagaatcatgtcttactgatctaaccctaaatccaactcatttatacttttatttttagttcagtttaaaatgttgataccttccctcccaggctccttaccttggtcttttccctgttcatctcccaacatgctgtgctccatagctggtaggagagggaaggcaaaatctttcttagttttctttgtcttggccattttgaattcatttagttactgggcataacttactgctttttacaaaagaaacaaacattgtctgtacaggtttcatgctagagctaatgggagatgtggccacactgacttccattttaagctttctaccttcttttcctccgaccgtccccttccctcacatgccatccagtgagaagacctgctcctcagtcttgtaaatgtatcttgagaggtaggagcagagccactatctccattgaagctgaaatggtagacctgtaattgtgggaaaactataaactctcttgttacagccccgccaccccttgctgtgtgtatatatataatactttgtccttcatatgtgaaagatccagtgttggaattctttggtgtaaataaacgtttggttttatttatcaaaaaaaaaaaaaaa

SEQ ID NO: 285247 - DNA, 1000 bp, Homo Sapiens
gggaaaagattcccacccaattcaaaacattgtgccatgtcaaacaaatagtctatcttccccagacactggtttgaagaatgttaagacttgacagtggaactacattagtacacagcaccagaatgtatattaaggtgtggctttaggagcagtgggagggtaccagcagaaaggttagtatcatcagatagctcttatacgagtaatatgcctgctatttgaagtgtaattgagaaggaaaattttagcgtgctcactgacctgcctgtagccccagtgacagctaggatgtgcattctccagccatcaagagactgagtcaagttgttccttaagtcagaacagcagactcagctctgacattctgattcgaatgacactgttcaggaatcggaatcctgtcgattagactggacagcttgtggcaagtgaatttcctgtaacaagccagattttttaaaatttatattgtaaatattgtgtgtgtgtgtgtgtgtgtatatatatatatatatgtacagttatctaagttaatttaaagttgtttgtgcctttttatttttgtttttaatgctttgatatttcaatgttagcctcaatttctgaacaccataggtagaatgtaaagcttgtctgatcgttcaaagcatgaaatggatacttatatggaaattctctcagatagaatgacagtccgtcaaaacagattgtttgcaaaggggaggcatcagtgtccttggcaggctgatttctaggtaggaaatgtggtagctcacgctcacttttaatgaacaaatggcctttattaaaaactgagtgactctatatagctgatcagttttttcacctggaagcatttgtttctactttgatatgactgtttttcggacagtttatttgttgagagtgtgaccaaaagttacatgtttgcacctttctagttgaaaataaagtatattttttctaaaaaaaaaaaaaaacgacagcaacggaattc

SEQ ID NO: 285248 - DNA, 1000 bp, Homo Sapiens; identical to SEQ ID NO: 221061

SEQ ID NO: 285249 - DNA, 1000 bp, Homo Sapiens
aggccctcagcgagttcaaagctatggacagcatctaagtctgcccaggccggccgcccccacccctcggggctcctgaatatcagtcactgttcgtcactcaaatgaatttgctaaatacaacactgatactagattccacagggaaatgggcagactgaaccagtccaggtggtgaattttccaagaacatagtttaagttgattaaaaatgcttttagaatgcaggagcctacttctagctgtattttttgtatgcttaaataaaaataaaaattcataaccaaagagaatcccacattagcttgttagtaatgctctgaccaagccgagatgcccattctcttagtgatggcggcgttagggtttgagagaagggaatttggctcaacttcagttgagagggtgcagtccagacagcttgactgcttttaaatgaccaaagatgacctgtggtaagcaacctgggcatcttaggaagcagtccctggagaaggcatgttcccagaaaggtctctggagggacaaactcactcagtaaaacataatgtatcatgaagaaaactgattctctatgacatgaaatgaaaattttaatgcattgttataattactaatgtacgctgctgcaggacattaataaagttgcttttttaggctacagtgtctcgatgccataatcagaacacactttttttcctctttctcccagcttcaaatgcaaattcatcattgggctcacttctaataactgcagtgtttcccgccttgggcttgcagcagaaaaacctgacaacatagtgtttgctaaggcagtaatttagactttaccttatttgtgattactgtagtgattgattgattgattactattaactacaaggtataatttactatcaccttatttaaattttatgaattaatttgaatgttttttacactaactaacttttcccaataaagtccactatgaaaccacgacaaaaaaaaaaaaaaaaaa

SEQ ID NO: 285250 - DNA, 1000 bp, Homo Sapiens; identical to SEQ ID NO: 115684

SEQ ID NO: 285251 - DNA, 1000 bp, Homo Sapiens; identical to SEQ ID NO: 221063

SEQ ID NO: 285252 - DNA, 1000 bp, Homo Sapiens; identical to SEQ ID NO: 115686

SEQ ID NO: 285253 - DNA, 924 bp, Homo Sapiens; identical to SEQ ID NO: 29217

SEQ ID NO: 285254 - DNA, 1000 bp, Homo Sapiens; identical to SEQ ID NO: 221064

SEQ ID NO: 285255 - DNA, 1000 bp, Homo Sapiens; identical to SEQ ID NO: 115417

SEQ ID NO: 285256 - DNA, 1000 bp, Homo Sapiens
tacagtggctgactgaaaggttaactgagaggggagtgaagttcttccagcggaaagtggagtcttttgaggaggtggcaagagaaggcgcagacgtgattgtcaactgcactggggtatgggctggggcgctacaacgagaccccctgctgcagccaggccgggggcagatcatgaaggtggacgccccttggatgaagcacttcattctcacccatgacccagagagaggcatctacaattccccgtacatcatcccagggacccagacagttactcttggaggcatcttccagttgggaaactggagtgaactaaacaatatccaggaccacaacaccatttgggaaggctgctgcagactggagcccacactgaagaatgcaagaattattggtgaacgaactggcttccggccagtacgcccccagattcggctagaaagagaacagcttcgcactggaccttcaaacacagaggtcatccacaactatggccatggaggctacgggctcaccatccactggggatgtgccctggaggcagccaagctctttgggagaatcctggaagaaaagaaattgtccagaatgccaccatcccacctctgaagactccagtgactgctgcctccccccacaagaactcccttctcccctcagccaatgaatcaatgtgctccttcataagccattgcttctccctcacttctttcctcaaagaagcatgaggtgagagaaagccacaaagtcagtgcctggagaagggttcagcccaacatggggcccctctcatcactgaaatccctctaccttctctgggtctggcattataaagaacagctgaggctgtcattccatgagtcttcagaagaaaggacagctcagaaaatcaaagaggccaactgcccagagccacagaaaatggaggataattgaggctaagtaacctgattacaagttgtactaacatattaaaggttctgaaaagtcctgcaaaa

SEQ ID NO: 285257 - DNA, 1000 bp, Homo Sapiens; identical to SEQ ID NO: 221065

SEQ ID NO: 285258 - DNA, 1000 bp, Homo Sapiens
accacctggtcaccttgtgcaatggaacctatgaaggtttgctgagaagaaatcaaatgggaagaaacagcatgaaattgccaaccttaaaagacatacgagattgcctgtctctccagaagtttgacaatcctcccttcttccagaactctaccttcagtttcaggaatgctttggaagggtttgataaagcagatgggactctggattctcaagtgatgagccttcataatttggttcattccttcctgaacgggacaaacgctttgccacattcagccgccaatgatcccatttttgtggttcttcattcctttactgatgccatctttgatgagtggatgaaaagatttaatcctcctgcagatgcctggcctcaggagctggcccctattggtcacaatcggatgtacaacatggttcctttcttccctccagtgactaatgaagaactctttttaacctcagaccaacttggctacagctatgccatcgatctgccagtttcagttgaagaaactccaggttggcccacaactctcttagtagtcatgggaacactggtggctttggttggtctttttgtgctgttggcttttcttcaatatagaagacttcgaaaaggatatacacccctaatggagacacatttaagcagcaagagatacacagaagaagcctagggtgctcatgccttacctaagagaagaggctggccaagccacagttctgacgctgacaataaaggaactaatcctcactgttccttcttgagttgaagatctttgacataggttcttctatagtgatgatgatctcattcagaagatgcttagctgtagtttccgctttgcttgcttgtttaacaaacccaactaaagtgcttgaggctacctctaccttcaaataaagatagacctgacaatttgtgatatctaataataaccccccccccaatattgattaagcctcctccttttctgaaagcatttaaaaaaaa

SEQ ID NO: 285259 - DNA, 1000 bp, Homo Sapiens; identical to SEQ ID NO: 115689

SEQ ID NO: 285260 - DNA, 542 bp, Homo Sapiens
gtctgccctctctgctcgccctgcctagcttgaggatctgtcaccccagccatgaggattatcgccctcctcgctgctattctcttggtagccctccaggtccgggcaggcccactccaggcaagaggtgatgaggctccaggccaggagcagcgtgggccagaagaccaggacatatctatttcctttgcatgggataaaagctctgctcttcaggtttcaggctcaacaaggggcatggtctgctcttgcagattagtattctgccggcgaacagaacttcgtgttgggaactgcctcattggtggtgtgagtttcacatactgctgcacgcgtgtcgattaacgttctgctgtccaagagaatgtcatgctgggaacgccatcatcggtggtgttagcttcacatgcttctgcagctgagcttgcagaatagagaaaaatgagctcataatttgctttgagagctacaggaaatggttgtttctcctatactttgtccttaacatctttcttgatcctaaatatatatctcgtaacaag

SEQ ID NO: 285261 - DNA, 1000 bp, Homo Sapiens; identical to SEQ ID NO: 115690

SEQ ID NO: 285262 - DNA, 1000 bp, Homo Sapiens
tgtgcggcggcgtcctggtggcggagcagtgggtgctgagcgcggcgcactgcctggaggacgcggccgacgggaaggtgcaggttctcctgggcgcgcactccctgtcgcagccggagccctccaagcgcctgtacgacgtgctccgcgcagtgccccacccggacagccagcccgacaccatcgaccacgacctcctgctgctacagctgtcggagaaggccacactgggccctgctgtgcgccccctgccctggcagcgcgtggaccgcgacgtggcaccgggaactctctgcgacgtggccggctggggcatagtcaaccacgcgggccgccgcccggacagcctgcagcacgtgctcttgccagtgctggaccgcgccacctgcaaccggcgcacgcaccacgacggcgccatcaccgagcgcttgatgtgcgcggagagcaatcgccgggacagctgcaagggtgactccgggggcccgctggtgtgcgggggcgtgctcgagggcgtggtcacctcgggctcgcgcgtttgcggcaaccgcaagaagcccgggatctacacccgcgtggcgagctatgcggcctggatcgacagcgtcctggcctagggtgccggggcctgaaggtcagggtcacccaagcaacaaagtcccgagcaatgaagtcatccactcctgcatctggttggtctttattgagcacctactatatgcagaaggggaggccgaggtgggaggatcattggatctcaggagttcgagatcagcatgggccacgtagcgcgactccatctctacaaataaataaaaaattagctgggcaattggcgggcatggaggtgggtgcttgtagttccagctactcaggaggctgaggtgggaggatgacttgaacgcaggaggctgaggctgcagtgagttgtgattgcaccactgccctccagcctgggcaacagagtgaaaccttgtctctctctacaaaaaaaaaaaaaaaa

SEQ ID NO: 285263 - DNA, 1000 bp, Homo Sapiens
gaaaccttgaagttctgaaatttaactgcctaaaatgttctccttagatgtgagagaaagagaaatcagaaaaattaattctcttgggggaagggcttgaattgaagctttactttagaatttagccctggtttgaaattttccattacatgatcttggtttatcatcgatgggaagggtagaaaacttcaaggaaaataagtgaaattttaaaagtcagcattttcttagacctcttcagctgattgtttatttttctatgaattcctacacatggttattcccccctacttgagataatctaaatataaaccagctacttgatgtaactgagaatttgtgtggatatttatttaaacaaatgtgtaattttgagtacagaattcaacagttacctccaaaaaagaaacattgttaatataatttaacagaagttgtgaaactaaaattttctaagattaactggtagttcattgtaaatgaacataatgaacagaatttatgactccactgtggaaaatgctatcaaataactaaggaatatatatggaataagtgtacatatgtaaaatattgttactagagttagatatgtgccaaagtccatttatcccaaatcctgtctgaaaaggaggggtacattggtaaacattttggagtgcttaaaaatgccaaaaacaaaatggtaatttctactttgataaagtaaaaaagttaaatgtgtgtaaaaaagtgttctgtgtccttctactccagcatcgtctcatgtaaaataagaaagccctaaaatactattggagagaaaaaattaactaggttgctactttatttgcctaaatacttttttctattttgttagattttgcctttcttttggaaggaaggaggcgatattctggattataaaaatgaattgggaacattatcacaattccagactttctattaatatttatgtgttttaataaacgtttgaaattaaaaaaaaaaaaaaaaaaaa

SEQ ID NO: 285264 - DNA, 1000 bp, Homo Sapiens; identical to SEQ ID NO: 220407

SEQ ID NO: 285265 - DNA, 1000 bp, Homo Sapiens
gagcagcctctgtcctggctgtgcacattctcccttgattccacttgtgtggagggattgaacacaggcaaagaggtgctgctttgcttcttcaatggcaccttcattctccgttgtcattgacttcaagatgcctcttctacctcttccaggaagcacaggccaggggatctgggtgtgtgagtgggaggagagggcagaggtcccctgaggtcatgcattgtaatcatcatagaaggagagcccaggcctgccctcacgctctccatcataggctgacaccaagaagactcgtcttggcacaatctcacacagctggggctgtagcaaccctttccaacccctttgctggttgctgggcctcattctagcaccttgttcttagagcagattctagcacatcatggcagtgggaccaagcgtggtcccgaggaagggccagagcctggtagagactagggaagggaggtctcctctagactgactcacattgccttgagcttttcagttaagttgctgtaagcacctgggctgaggaggcagtttttgttccttcctgcgttatagcggggccttgtctcttcctctgcaggacacagatctggaggacgtggactggggtaggaaaccaccctgagggtgttagtacctagtggtgaaacggatgaggtcatttctaaggtgtgttgcccgtggatctgggcacaatcattggaattccttggagccactgggattcatggctttgtatccaactgcatccaggcctgaggctgctgacgtttgacaccagggccagtagagagtgcccttttgtatcttaagccaagaagtgaggcctgggggtgggggaggggggaaggggtgggagccaatactgagtgcctgcagcatctactactctgtcttcactattcagaacttgtaactaaagtatttaaagaaactgattttaaatgcaaattaaagggcagatattctcaaaaaaaaaaaaaaaaaa

SEQ ID NO: 285266 - DNA, 1000 bp, Homo Sapiens
agcctgcagctgcagcacctaaaccagcgtttccagcacacgcagtacctggcgctgcccgagagggcccagctggcagcgcagctcggcctcacccagacccaggtaaagatctggtttcagaacaaacgctccaagtataagaagctcctgaagcagaattctggggggcaggaaggggacttccctgggaggaccttctctgtgtctccctgctccccacccctcccctccctctgggatctacccaaggcagggaccctgcccaccagtggctatggcaacagctttggagcctggtatcagcatcactcctcagatgtcctggcttcgcctcagatgatgtgaatctggggaagggcgggtcaggcccacagccttcctgcaaagcccaggacccaggcagtccacctgcaccccttctgggctgggaggaaaccagctccagatgggttttctctggaggacaagcagttagaggagaaaaaggaatggagcagagcctgtacccctaaccctaacagctaaatcaaggacctcagccttatataatcattgtccccaccactaccatggactggacaccttcactccagctggacaaagactctggagagagagccattggctggagttgagactgtccccagaacccttggtcttgccactcccccactccttcttccctctctccctttctcctctccctgctttcttgaaaaggactgaatcgccactacagcctgggtgcaaaatcagcaagaaacattgagtatttttttttctttgtatgcctttggccttgcacaacccatttgtgagcaaaagcagaagtggaccaccatcagctcccacccacccagcgatttttccttggaggtcagcccgttacccccataactgatttacctacttaccatactgggaggtagaagagatgcagagaaatgtggaatttgtggacctatgggtaatttatgctttcctcctaaaaaaaaaa

SEQ ID NO: 285267 - DNA, 1000 bp, Homo Sapiens; identical to SEQ ID NO: 221066

SEQ ID NO: 285268 - DNA, 1000 bp, Homo Sapiens
ctccctgagctggtaactgcaatgccaacttcctgggcctttctgactagtatcacacttctaataaaatccacaattaaaccatgtttctcacttttcacatgtttcatagcaactgctttatatgactgatgatggcttccttgcacaccacatatacagtgcgcatgcttacagccgggcttctggagcaccagctgcagcctggctactgctttttactgcagaatgaactgcaagttcagcatagtggaggggagaggcagaactggaggagaggtgcagtgaaggttctctacagctaagcctgtttgaatgatacgtaggttccccaccaaaagcaggctttctgccctgagggacatcttcccactcccctgctccacatgagccatgcatgcttagcaatccaagtgcagagctctttgctccaggagtgaggagactgggaggtgaaatggggaaatggaagggtttggaggcagagctgaaaacagggttggaaggatttcctgaattagaagacaaacgttagcatacccagtaaggaaaatgagtgcaggggccaggggaacccgtgaggatcactctcaaatgagattaaaaacaaggaagcagagaatggtcagagaatgggattcagattgggaacttgtggggatgagagtgaccaggttgaactgggaagtggaaaaaggagtttgagtcactggcacctagaagcctgcccacgattcctaggaaggctggcagacaccctggaaccctggggagctactggcaaactctcctggattgggcctgatttttttggtgggaaaggctgccctggggatcaactttccttctgtgtgtggctcaggagttcttctgcagagatggcgctatctttcctcctcctgtgatgtcctgctcccaaccatttgtactcttcattacaaaagaaataaaaatattaacgttcactaaaaaaaaaaaaaaaaaaaaaaaaaaaaaaaaa

SEQ ID NO: 285269 - DNA, 1000 bp, Homo Sapiens; identical to SEQ ID NO: 115692

SEQ ID NO: 285270 - DNA, 1000 bp, Homo Sapiens
gctgaagtttgcctgggtcaaaaaatagatataaataaggaaattgagcagagacaaaaacctgccacagaaacaagtatgaacacagcttcacattcactctgtgagcaaactatggttaattcagagaatacctactcctctggcagtagcttcccagttccaaaatctttgcaagaagccaatgcagagaaagtaactcaggaaatagtcactgaaagatctgtgtcttctaggcaggcgcaaaaggtagctacacctcttcctgacccaatggcttctagaaatgtgatagcaacagaaacttcctatgtcacagggtccactatgccaccaaccactgtgatcctgggtcctagccagccacagagccttattgtgacagagagggtgtatgctccagcttctaccttggtagatcagccttatgctaatgaaggtacagttgtggtcactgaaagagtaatacagcctcatgggggtggatcgaatcctctggaaggcactcagcatcttcaagatgtaccttacgtcatggtgagggaaagagagagcttccttgcccccagctcaggtgtgcagcctactctggccatgcctaatatagcagtaggacagaatgtgacagtgacagaaagagttctagcacctgcttccactctgcaatccagttaccagattcccactgaaaattctatgacggctaggaacaccacggtgtctggagctggagtccctggccctctgccagattttggtttagaggaatctggtcattctaattctaccataaccacatcttccaccagagtcaccaagcatagcactgtacagcattcttactcctaaacagcagtcagccacaaactgacccagagtttaattagcagtgactaatttcatgtttccaatgtacctgatttttcatgagccttacagacacacagagacacatacacattgatcttaaaatttttctcagtcactgatatgcaaagga

SEQ ID NO: 285271 - DNA, 1000 bp, Homo Sapiens; identical to SEQ ID NO: 221067

SEQ ID NO: 285272 - DNA, 1000 bp, Homo Sapiens
ggcagtaggtttgctctgtacccatgtgtacagcctacccatgcagggactgggattcgaggacttccaggcgcatagggtagaaccaaatgatagggtaggagcatgtgttctttagggccttgtaaggctgtttccttttgcatctggaactgactatataattgtcttcaatgaagactaattcaattttgcatatagaggagccaaagagagatttcagctctgtatttgtggtatcagtttggaaaaaaaaatctgatactccatttgattattgtaaatatttgatcttgaatcacttgacagtgtttgtttgaattgtgtttgttttttcctttgatgggcttaaaagaaattatccaaagggagaaagagcagtatgccacttcttaaaacagaacaaaacaaaaaaagaaaattgtgctcttttctaatccaaagggtatatttgcagcatgcttgactttaccaattctgatgacatctttacggacactattatcactaagaccttgttatggcgaagtctttagtctttttcatgtattttcctcatgattttttctctttatgtagtttgactatgccttacctttgtaaatatttttgcttgtgttgtcgcaaaggggataatctgggaaagacaccaaatcatgggctcactttaaaaaaagaaagaataaaaaaaccttcagctgtgctaaacagtatattacctctgtataaaattcttcagggagtgtcacctcaaatgcaatactttgggttggtttctttcctttaaaaaaatttgtataaaactggaagtgtgtgtgtgtgagcatgggtacccatttgataagagaaatgcatttgattgtgaagaagggagagttaaattctccattatgttcgtggtgtaaagtttagagctggaatttattataagaatgtaaaaccttaaattattaataaataactattttggctattgaaaaaaaaaaaaaaaaaaaaaaaa

SEQ ID NO: 285273 - DNA, 1000 bp, Homo Sapiens; identical to SEQ ID NO: 115693

SEQ ID NO: 285274 - DNA, 1000 bp, Homo Sapiens
tttttcctgttcccccacctgatgacctcacacagccttcctcccagtccttgactccagtgactccacagaaatccagcatggcaactcaaaatctgcctgagcaacatgtctctgaaagaagccaggctctgcagcagacatcagctacagatatatcttcagcaggatctattagtggagatatcattgatgagttaatgtcttctgacgtgtttcctctcttaaggctttctcctaccccggcagatgactacaactttaatttagatgataacgaaggagtttgtgatctgtttgatgtccagatactaaattattagattccatggaaacttgggactgttatctacctctaactgtgtaacattttagacttcttaataacctaaatatttaaaataatgaatgtaacaccttttttagttcactgattctgaagtgttcttccctaatactttctttacttcacaaaacttcaaccataaaaacaaagggctctgattgctttaggggataagtgatttaatattcacaaacgtccccactcccaaaagtaactatattctggatttcaacttttcttctaattgtgaatccttccgttttttcttcttaaggaggaaagttaaaggacactacaggtcatcaaaaacaagttggccaaggactcattacttgtcttatatttttactgccactaaactgcctgtatttctgtatgtccttctatccaaacagacgttcactgccacttgtaaagtgaaggatgtaaacgaggatatataactgtttcagtgaacagattttgtgaagtgccttctgttttagcactttaagtttatcacattttgttgacttctgacattccactttcctaggttataggaaagatctgtttatgtagtttgtttttaaaatgtgccaatgcctgtacattaacagatttttaaaaataaaattgtataaaacattaaaaaaaaaaaaaaaaaaaaaaaaa

SEQ ID NO: 285275 - DNA, 1000 bp, Homo Sapiens; identical to SEQ ID NO: 115694

SEQ ID NO: 285276 - DNA, 1000 bp, Homo Sapiens; identical to SEQ ID NO: 115697

SEQ ID NO: 285277 - DNA, 1000 bp, Homo Sapiens
ctgtgagtacagcagaaaatcttttactagtgtgtgtgtgtatatatataaacaattgtaaatttcttttagcccatttttctagactgtctctgtggaatatatttgtgtgtgtgatatatgcatgtgtgtgatggtatgtatggatttaatctaatctaataattgtgccccgcagttgtgccaaagtgcatagtctgagctaaaatctaggtgattgttcatcatgacaacctgcctcagtccattttaacctgtagcaaccttctgcattcataaatcttgtaatcatgttaccattacaaatgggatataagaggcagcgtgaaagcagatgagctgtggactagcaatatagggttttgtttggttggttggtttgataaagcagtatttggggtcatattgtttcctgtgctggagcaaaagtcattacactttgaagtattatattgttcttatcctcaattcaatgtggtgatgaaattgccaggttgtctgatatttctttcagacttcgccagacagattgctgataataaattaggtaagataatttgttgggccatattttaggacaggtaaaataacatcaggttccagttgcttgaattgcaaggctaagaagtactgcccttttgtgtgttagcagtcaaatctattattccactggcgcatcatatgcagtgatatatgcctataatataagccataggttcacaccattttgtttagacaattgtctttttttcaagatgctttgtttctttcatatgaaaaaaatgcattttataaattcagaaagtcatagatttctgaaggcgtcaacgtgcattttatttatggactggtaagtaactgtggtttactagcaggaatatttccaatttctacctttactacatcttttcaacaagtaactttgtagaaatgagccagaagccaaggccctgagttggcagtggcccataagtgtaaaataaaagtttacagaaacctt

SEQ ID NO: 285278 - DNA, 994 bp, Homo Sapiens
ccctttcatcagtcttcccgcgtccgccgattcctcctccttggtcgccgcgtccttggctggcgtcagaaaaatggctacaaacttcctagcacatgagaagatctggttcgacaagttcaaatatgacgacgcagaaaggagattctacgagcagatgaacgggcctgtggcaggtgcctcccgccaggagaacggcgccagcgtgatcctccgtgacattgcgagagccagagagaacatccagaaatccctggctggaagctcaggccccggggcctccagcggcaccagcggagaccacggtgagctcgtcgtccggattgccagtctggaagtggagaaccagagtctgcgtggcgtggtacaggagctgcagcaggccatctccaagctggaggcccggctgaacgtgctggagaagagctcgcctggccaccgggccacggccccacagacccagcacgtatctcccatgcgccaagtggagcccccagccaagaagccagccacaccagcagaggatgacgaggatgatgacattgacctgtttggcagtgacaatgaggaggaggacaaggaggcggcacagctgcgggaggagcggctacggcagtacgcggagaagaaggccaagaagcctgcactggtggccaagtcctccatcctgctggatgtcaagccttgggatgatgagacggacatggcccagctggaggcctgtgtgcgctctatccagctggacgggctggtctggggggcttccaagctggtgcccgtgggctacggtatccggaagctacagattcagtgtgtggtggaggacgacaaggtggggacagacttgctggaggaggagatcaccaagtttgaggagcacgtgcagagtgtcgatatcgcagctttcaacaagatctgaagcctgagtgtgtgtacgtgcgcgcgtgcgtgaggccctgccacgattaaagactgagaccggcaaaaaaaaaaa

SEQ ID NO: 285279 - DNA, 1000 bp, Homo Sapiens; identical to SEQ ID NO: 115698

SEQ ID NO: 285280 - DNA, 1000 bp, Homo Sapiens; identical to SEQ ID NO: 221070

SEQ ID NO: 285281 - DNA, 1000 bp, Homo Sapiens; identical to SEQ ID NO: 115699

SEQ ID NO: 285282 - DNA, 1000 bp, Homo Sapiens; identical to SEQ ID NO: 115700

SEQ ID NO: 285283 - DNA, 1000 bp, Homo Sapiens
taggtttgttgtttaagaagacaccttctgagtattctcataggagactgcgtcaagcaatcgagatttgggagctgaaccaaagcctcttcaaaaagcagagtggactgcatttaaatttgatttccatcttaatgttactcagatataagagaagtctcattcgcctttgtcttgtacttctgtgttcatttttttttttttttttggctagagtttccactatcccaatcaaagaattacagtacacatccccagaatccataaatgtgttcctggcccactctgtaatagttcagtagaattaccattaattacatacagattttacctatccacaatagtcagaaaacaacttggcatttctatactttacaggaaaaaaaattctgttgttccattttatgcagaagcatattttgctggtttgaaagattatgatgcatacagttttctagcaattttctttgtttctttttacagcattgtctttgctgtactcttgctgatggctgctagattttaatttatttgtttccctacttgataatattagtgattctgatttcagtttttcatttgttttgcttttgtttttttcctcatgtaacattggtgaaggatccaggaatatgacacaaaggtggaataaacattaattttgtgcattctttggtaattttttttgttttttgtaactacaaagctttgctacaaatttatgcatttcattcaaatcagtgatctatgtttgtgtgatttcctaaacataattgtggattataaaaaatgtaacatcataattacattcctaactagaattagtatgtctgtttttgtatctttatgctgtattttaacactttgtattacttaggttattttgctttggttaaaaatggctcaagtagaaaagcagtcccattcatattaagacagtgtacaaaactgtaaataaaatgtgtacagtgaattgtcttttaaaaaaaaaaaaaaaaaa

SEQ ID NO: 285284 - DNA, 1000 bp, Homo Sapiens; identical to SEQ ID NO: 115702

SEQ ID NO: 285285 - DNA, 1000 bp, Homo Sapiens; identical to SEQ ID NO: 221073

SEQ ID NO: 285286 - DNA, 1000 bp, Homo Sapiens; identical to SEQ ID NO: 221074

SEQ ID NO: 285287 - DNA, 1000 bp, Homo Sapiens; identical to SEQ ID NO: 115704

SEQ ID NO: 285288 - DNA, 1000 bp, Homo Sapiens; identical to SEQ ID NO: 115705

SEQ ID NO: 285289 - DNA, 1000 bp, Homo Sapiens; identical to SEQ ID NO: 221077

SEQ ID NO: 285290 - DNA, 1000 bp, Homo Sapiens
ggcctcgcggcgctgaaaccgtgaggcccggaccacaggctccagatggaccctgggaaggacaaagagggggtgccccagccctcagggccgccagcaaggaagaaatttgtgatacccctcgacgaggatgaggtccctcctggagtggccaagcccttattccgatctacacagagccttcccactgtggacacctcggcccaggcggcccctcagacctacgccgaatatgccatctcacagcctctggaaggggctggggccacgtgccccacagggtcagagcccctggcaggagagacgcccaaccaggccctgaaacccggggcaaaatccaacagcatcattgtgagccctcggcagaggggcaatcccgtactgaagttcgtgcgcaatgtgccctgggaatttggcgacgtaattcccgactatgtgctgggccagagcacctgtgccctgttcctcagcctccgctaccacaacctgcacccagactacatccatgggcggctgcagagcctggggaagaacttcgccttgcgggtcctgcttgtccaggtggatgtgaaagatccccagcaggccctcaaggagctggctaagatgtgtatcctggccgactgcacattgatcctcgcctggagccccgaggaagctgggcggtacctggagacctacaaggcctatgagcagaaaccagcggacctcctgatggagaagctagagcaggacttcgtctcccgggtgactgaatgtctgaccaccgtgaagtcagtcaacaaaacggacagtcagaccctcctgaccacatttggatctctggaacagctcatcgccgcatcaagagaagatctggccttatgcccaggcctgggccctcagaaagcccggaggctgtttgatgtcctgcacgagcccttcttgaaagtaccctgatgaccccagctgccaaggaaacccccagtgtaataataaatcgtcctcccaggccaggctc

SEQ ID NO: 285291 - DNA, 1000 bp, Homo Sapiens
gggcatccagaagaaccggccagccatgaattacgacaagctgagccgctcgctccgatactattatgagaaaggcatcatgcagaaggtggctggtgagcgttacgtgtacaagtttgtgtgtgagcccgaggccctcttctctttggccttcccggacaatcagcgtccagctctcaaggctgagtttgaccggcctgtcagtgaggaggacacagtccctttgtcccacttggatgagagccccgcctacctcccagagctggctggccccgcccagccatttggccccaagggtggctactcttactagcccccagcggctgttccccctgccgcaggtgggtgctgccctgtgtacatataaatgaatctggtgttggggaaaccttcatctgaaacccacagatgtctctggggcagatccccactgtcctaccagttgccctagcccagactctgagctgctcaccggagtcattgggaaggaaaagtggagaaatggcaagtctagagtctcagaaactcccctgggggtttcacctgggccctggaggaattcagctcagcttcttcctaggtccaagccccccacaccttttccccaaccacagagaacaagagtttgttctgttctgggggacagagaaggcgcttcccaacttcatactggcaggagggtgaggaggttcactgagctccccagatctcccactgcggggagacagaagcctggactctgccccacgctgtggccctggagggtaccggtttgtcagttcttggtgctctgtgttcccagaggcaggcggaggttgaagaaaggaacctgggatgaggggtgctgggtataagcagagagggatgggttcctgctccaagggaccctttgcctttcttctgccctttcctaggcccaggcctgggtttgtacttccacctccaccacatctgccagaccttaataaaggcccccacttctcccaaaaaaaaaaaaaaa

SEQ ID NO: 285292 - DNA, 1000 bp, Homo Sapiens; identical to SEQ ID NO: 115706

SEQ ID NO: 285293 - DNA, 1000 bp, Homo Sapiens
gctcctcactctccatcggctctatcatctccaagtccccgctcgcctccccggccccccagagcaccagtttcttctctcccagcttctctctcgggctcggtgatgacagcttccctatcgccgggatctatgacacaaccacagacaacaagtgcagcatcaagacggccgtggccaagaacatgctggaccccatcactgggcagaagctactggaggcccaggcggccacagggggcatcgtggacctgctcagccgtgagcgctactctgtgcacaaggcgatggagaggggcctgatcgagaacacctccacacagaggctgcttaacgcccagaaggccttcaccggcatcgaggaccccgtcaccaagaagaggctctcggtgggcgaggccgtccagaagggctggatgccccgggagagcgtgctcccacacctgcaggtgcagcacctgaccggggggctcatcgaccccaagaggacaggccgcatccccatccagcaggccctcctctccgggatgatcagtgaagagctggcccagctcctgcaggacgagtccagctacgagaaggatttgacagaccccatctccaaggaacggctgagctacaaggaggccatgggccgctgccgcaaagaccccctgagcggcctgctgctcctgccagcggcactggaggggtaccgctgctaccgctccgcctcccccaccgtcccgcgctcccttcgctgacacgggccaaggagccagtggggaagtgcgtgtgttgggccaggtaggatacgtacacctcttgcctcagagcagcctcatcccaggcagtgggtcttccctctgtccaaccactgttttattattttactaacatggtgatgggctccctcccctaaccttggtgcctgatccatccccagaccaggacagcagccactcagttcttcctccacctccacccagtgatcccaataaacgaattctgtctccccgtg

SEQ ID NO: 285294 - DNA, 1000 bp, Homo Sapiens; identical to SEQ ID NO: 221080

SEQ ID NO: 285295 - DNA, 1000 bp, Homo Sapiens; identical to SEQ ID NO: 221081

SEQ ID NO: 285296 - DNA, 1000 bp, Homo Sapiens
aggaggtaatgaccatgaaagacttctctacccatcttaaaaacaacgaaagaaggcatggacttctggatgcccatccactgggtgtaaacacatctagtagttgttctgaaatgtcagttctgatatggaagcacccattatgcgctgtggccactccaataggtgctgagtgtacagagtggaataagacagagacctgccctcaagagcaaagtagatcatgcatagagtgtgatgtatgtgtaataaatatgtttcacacaaacaaggcctgtcagctaaagaagtttgaacatttgggttactatttcttgtggttataacttaatgaaaacaatgcagtacaggacatatattttttaaaataagtctgatttaattgggcactatttatttacaaatgttttgctcaatagattgctcaaatcaggttttcttttaagaatcaatcatgtcagtctgcttagaaataacagaagaaaatagaattgacattgaaatctaggaaaattattctataatttccatttacttaagacttaatgagactttaaaagcattttttaacctcctaagtatcaagtatagaaaatcttcatggaattcacaaagtaatttggaaattaggttgaaacatatctcttatcttacgaaaaaatggtagcattttaaacaaaatagaaagttgcaaggcaaatgtttatttaaaagagcaggccaggcgcggtggctcacgcctgtaatcccagcactttgggaggctgaggcgggtggatcacgaggtcaggagatcgagaccatcctggctaacacggtgaaacccgtctctactaaaaatgcaaaaaaaattagccgggcgtggtggcaggcacctgtagtcccagctactcgggaggctgaggcaggagactggcgtgaacccaggaggcggaccttgtagtgagccgagatcgcgccactgtgctccagcctgggcaacagagcaagactccatctc

SEQ ID NO: 285297 - DNA, 1000 bp, Homo Sapiens; identical to SEQ ID NO: 115707

SEQ ID NO: 285298 - DNA, 1000 bp, Homo Sapiens
aataatgagaattgtaagcatcctcctgttgtaatgaatggggctgttgcagacgggatattggcaagctatgcaacaggatcctcagtggaatatagatgcaatgaatattacttactgaggggatcaaaaatatctcgttgcgaacaaggaaaatggtcatccccacctgtttgcttggaaccatgtactgttaatgtggattacatgaacagaaataacatagaaatgaagtggaaatatgaagggaaagtcttacatggagatttaatagattttgtatgtaaacagggatatgacttatctccattaaccccattgtctgaattatctgtgcagtgcaacagaggagaagtgaaatatcctttatgtactagaaaagaatctaaaggaatgtgcacatctcctcctcttattaaacatggagtcattattagttcaacagtagacacctatgaaaatggctcttcagtagaatacagatgttttgatcaccatttcctagaaggatctagggaggcctattgtttagatggaatgtggactacaccaccattgtgtttagagccatgcacattatcttttactgaaatggaaaagaataatttacttctgaaatgggattttgacaacagaccacacattttgcatggtgaatatattgagtttatttgtagaggagatacttatccagctgaattatatattactggatctatacttagaatgcaatgtgacagagggcagttaaaatatccaagatgtattccaagacaaagcactctgtcttatcaagaacccttaagaacatagaaatgaatggcagaaagaggagtcatatttcaatacatcatgaaattccttataaaatataattttgaggaaataagttaaaaacttcggagtttttccttgcttaaatatttgaatctaaattatttgtgctgaacatttcattatttataaatgaaaaccaataaatgtctaatttttagtttgt

SEQ ID NO: 285299 - DNA, 1000 bp, Homo Sapiens
attcgtaagggttacgaaactcatgttcttctccagtcccctgtggtttctgttggagcataaggtttccagtaagcgggagggcagatccaactcagaaccatgcagataaggagcctctggcaaatgggtgctcatcagaacgcgtggattctctttcatggcagaatgctcttggactcggttctccaggcctgattccccgactccatcctttttcaggggttatttaaaaatctgccttagattctatagtgaagacaagcatttcaagaaagagttacctggatcagccatgctcagctgtgacgcctgaataactgtctactttatcttcactgaaccactcactctgtgtaaaggccaacagatttttaatgtggttttcatatcaaaagatcatgttgggattaacttgcctttttccccaaaaaataaactctcaggcaagcatttctttaaagctattaagggagtatatacttgagtacttattgaaatggacagtaataagcaaatgttcttataatgctacctgatttctatgaaatgtgtttgacaagccaaaattctaggatgtagaaatctggaaagttcatttcctgggattcacttctccagggattttttaaagttaatttgggaaattaacagcagttcactttattgtgagtctttgccacatttgactgaattgagctgtcatttgtacatttaaagcagctgttttggggtctgtgagagtacatgtattatatacaagcacaacagggcttgcactaaagaattgtcattgtaataacactacttggtagcctaacttcatatatgtattcttaattgcacaaaaagtcaataatttgtcaccttggggttttgaatgtttgctttaagtgttggctatttctatgttttataaaccaaaacaaaatttccaaaaacaatgaaggaaaccaaaataaatatttctgcatttcaggtgaaaaaaaaaaaaaaaaaa

SEQ ID NO: 285300 - DNA, 1000 bp, Homo Sapiens; identical to SEQ ID NO: 115709

SEQ ID NO: 285301 - DNA, 1000 bp, Homo Sapiens; identical to SEQ ID NO: 221083

SEQ ID NO: 285302 - DNA, 1000 bp, Homo Sapiens
gccaaggagggagaactttctctgccacagcaccaaagtggggaacacccggccaacttctctttgggtcctgtggacctcaatgtctcagggatctacaggtgctacggttggtacaacaggagcccctacctgtggtccttccccagtaatgccttggagcttgtggtcacagactccatccaccaagattacacgacgcagaacttgatccgcatggccgtggcaggactggtcctcgtggctctcttggccatactggttgaaaattggcacagccatacggcactgaacaaggaagcctcggcagatgtggctgaaccgagctggagccaacagatgtgtcagccaggattgacctttgcacgaacaccaagtgtctgcaagtaaacacctggaggtgaaggcagagaggagccaggactgtggagtccgacaaagctacttgaaggacacaagagagaaaagctcactaagaagcttgaatctacttttttttttttttgagacagagtctggctctgtcacccaggctggagtgcagtggagcaatctcggctcattgaacctcttgggttcaagtgattcttgtgcctcagcctcccaagtagctggaattacaggcacataccactgcacccagctaatttttgtatttttagtagagatggggtttcactgtgttggccaggctggtctcgaactcctgacctcaggtgatccacccaccttggcctcccaaagtgctgagattataggcatgagccaccacgcctggccagatgcatgttcaaaccaatcaaatggtgttttcttatgcaggactgatcgatttgcacccacctttctgcacataagttatggttttccatcttatctgtcttctgattttttatatcctgtttaatttcttccttcattgttcttctctttttttatttattttatttatttttatttttatttttatttgagacagagtctcactctgttgcccagg

SEQ ID NO: 285303 - DNA, 1000 bp, Homo Sapiens
aggtcctggagtacaatgccattggaggcaagtataaccggggtttgacggtggtagtagcattccgggagctggtggagccaaggaaacaggatgctgatagtctccagcgggcctggactgtgggctggtgtgtggaactgctgcaagctttcttcctggtggcagatgacatcatggattcatcccttacccgccggggacagatctgctggtatcagaagccgggcgtgggtttggatgccatcaatgatgctaacctcctggaagcatgtatctaccgcctgctgaagctctattgccgggagcagccctattacctgaacctgatcgagctcttcctgcagagttcctatcagactgagattgggcagaccctggacctcctcacagccccccagggcaatgtggatcttgtcagattcactgaaaagaggtacaaatctattgtcaagtacaagacagctttctactccttctaccttcctatagctgcagccatgtacatggcaggaattgatggcgagaaggagcacgccaatgccaagaagatcctgctggagatgggggagttctttcagattcaggatgattaccttgacctctttggggaccccagtgtgaccggcaaaattggcactgacatccaggacaacaaatgcagctggctggtggttcagtgtctgcaacgggccactccagaacagtaccagatcctgaaggaaaattacgggcagaaggaggctgagaaagtggcccgggtgaaggcgctatatgaggagctggatctgccagcagtgttcttgcaatatgaggaagacagttacagccacattatggctctcattgaacagtacgcagcacccctgcccccagccgtctttctggggcttgcgcgcaaaatctacaagcggagaaagtgacctagagattgcaagggcggggagaggaggctctcaataaataatcgtgtaaccttaaaaaaaaaaaaaaaaaaaaa

SEQ ID NO: 285304 - DNA, 1000 bp, Homo Sapiens
ttctcatagtttaattccaacaacaatattagtcgtatccaaaataacctttaatgctaaactttactgatgtatatccaaagcttctccttttcagacagattaatccagaagcagtcataaacagaagaataggtggtatgttcctaatgatattatttctactaatggaataaactgtaatattagaaattatgctgctaattatatcagctctgaggtaatttctgaaatgttcagactcagtcggaacaaattggaaaatttaaatttttattcttagctataaagcaagaaagtaaacacattaatttcctcaacatttttaagccaattaaaaatataaaagatacacaccaatatcttcttcaggctctgacaggcctcctggaaacttccacatatttttcaactgcagtataaagtcagaaaataaagttaacataactttcactaacacacacatatgtagatttcacaaaatccacctataattggtcaaagtggttgagaatatattttttagtaattgcatgcaaaatttttctagcttccatcctttctccctcgtttcttctttttttgggggagctggtaactgatgaaatcttttcccaccttttctcttcaggaaatataagtggttttgtttggttaacgtgatacattctgtatgaatgaaacattggagggaaacatctactgaatttctgtaatttaaaatattttgctgctagttaactatgaacagatagaagaatcttacagatgctgctataaataagtagaaaatataaatttcatcactaaaatatgctattttaaaatctatttcctatattgtatttctaatcagatgtattactcttattatttctattgtatgtgttaatgattttatgtaaaaatgtaattgcttttcatgagtagtatgaataaaattgattagtttgtgttttcttgtctcccgaaaaaaaaaaaaaaaaaaaaaaaaaaaaaa

SEQ ID NO: 285305 - DNA, 1000 bp, Homo Sapiens; identical to SEQ ID NO: 221085

SEQ ID NO: 285306 - DNA, 1000 bp, Homo Sapiens; identical to SEQ ID NO: 115712

SEQ ID NO: 285307 - DNA, 1000 bp, Homo Sapiens; identical to SEQ ID NO: 115715

SEQ ID NO: 285308 - DNA, 1000 bp, Homo Sapiens
gggcaagaggaaggcggtccagggcgcccaacagcccagcctctaccagatccgcaccaacggcagcgccctctgcacccggtgcatccagatcaacaccgactccagcctcctcaactccgagttctgcttcatcctcaaggttccctttgagagtgaggacaaccagggcatcgtgtatgcctgggtgggccgggcatcagaccctgacgaagccaagttggcagaagacatcctgaacaccatgtttgacacctcctacagcaagcaggttatcaacgaaggtgaggagcctgagaacttcttctgggtgggcattggggcacagaagccctatgatgacgatgccgagtacatgaaacacacacgtctcttccggtgctccaacgagaagggctactttgcagtgactgagaaatgctccgacttttgccaagatgacctggcagatgatgacatcatgttgctagacaatggccaagaggtctacatgtgggtggggacccagactagccaggtggagatcaagctgagcctgaaggcctgccaggtatatatccagcacatgcggtccaaggaacatgagcggccgcgccggctgcgcctggtccgcaagggcaatgagcagcacgcctttacccgctgcttccacgcctggagcgccttctgcaaggccctggcctaagacaggctggcacagccccaggcttggtgaggaagaggaaggggcctcatccactgtctgctagcaaagaatgtactcaggtgacaccacctgctccagccacgtccagtgccacagtccccagtagcctcaagcagcaccaatggggatgaccctgacaggtgccctcaggggtctgggaaatccaactctctccacagtgtgagtgcacgtgtgaagccccctcactcttccgctagggataaagcagatgtggatgccctttaagagatattaaatgcttttattttcaatattaaaaaaaaaaaaaaaaaa

SEQ ID NO: 285309 - DNA, 1000 bp, Homo Sapiens
ccgggagaaggcatgagaaagaatttgagacgcaccatgtgggcacggagggggacggggctcagcaatgccatttcagtggcttcccagctctgacccttctacatttgagggcccagccaggagcagatggacagcgatgaggggacattttctggattctgggaggcaagaaaaggacaaatatcttttttggaactaaagcaaattttagacctttacctatggaagtggttctatgtccattctcattcgtggcatgttttgatttgtagcactgagggtggcactcaactctgagcccatacttttggctcctctagtaagatgcactgaaaacttagccagagttaggttgtctccaggccatgatggccttacactgaaaatgtcacattctattttgggtattaatatatagtccagacacttaactcaatttcttggtattattctgttttgcacagttagttgtgaaagaaagctgagaagaatgaaaatgcagtcctgaggagagttttctccatatcaaaacgagggctgatggaggaaaaaggtcaataaggtcaagggaagaccccgtctctataccaaccaaaccaattcaccaacacagttgggacccaaaacacaggaagtcagtcacgtttccttttcatttaatggggattccactatctcacactaatctgaaaggatgtggaagagcattagctggcgcatattaagcactttaagctccttgagtaaaaaggtggtatgtaatttatgcaaggtatttctccagttgggactcaggatattagttaatgagccatcactagaagaaaagcccattttcaactgctttgaaacttgcctggggtctgagcatgatgggaatagggagacagggtaggaaagggcgcctactcttcagggtctaaagatcaagtgggccttggatcgctaagctggctctgtttgatgctatttatgcaagttagggtctatgtattta

SEQ ID NO: 285310 - DNA, 1000 bp, Homo Sapiens; identical to SEQ ID NO: 115716

SEQ ID NO: 285311 - DNA, 1000 bp, Homo Sapiens
aagatggccaggcctcactgtacaagtatatcttccctgcacatctgcaaaagccaaccctggccattattggcctcatcaaacccttgggctccatgatacctacaggagaaacacaagctcggtgggctgttcgagtcctgaaaggtgtaaataagttaccaccaccaagtgtcatgatagaggaaattaatgcaaggaaagaaaacaagcccagttggtttggcttgtgctactgcaaggctttacaatcagattatatcacatacatagatgaactcctgacctatatcaatgcaaaacccaacctgttctctatgctcctaacggatccacatctggctctgaccgtcttctttggcccatgctcaccataccagttccgcttgactggcccaggaaaatgggaaggagccagaaatgccatcatgacccagtgggaccgaacattcaaggtcatcaaagctcgagttgtacaagagtctccatctccctttgaaagttttcttaaagtctttagctttctggctttgcttgtggctatttttctgattttcctataagtaaaagatctcctaaatggaagatgcacagagtagatttacaatgctccaattcctctcttacagcaatattgccttcacagttataaactgtattcaaatagtaaaggccaccctctcgcttccctggctggccccagggctaccactggtattcctgagcctctcccagctccacttctaatgctagagaatgataactaagacttctgtgcatttgaaggttgttggaaagttacaggttcattttagaaagaaagctgttcttgacagcactctgagccatcatacctctttcccatataaactattttcacagatctcaactaaaaccccttacttcacaaatgattgtgttgtgctgaaatggtgctcttatagtactggcttattaaaagtaaaaaataaacctaaaaattgattgttttaaaaaaaaa

SEQ ID NO: 285312 - DNA, 1000 bp, Homo Sapiens; identical to SEQ ID NO: 115718

SEQ ID NO: 285313 - DNA, 1000 bp, Homo Sapiens; identical to SEQ ID NO: 221088

SEQ ID NO: 285314 - DNA, 1000 bp, Homo Sapiens
atgggattttagctttcccttcttgaaaaacattattttacagttccaggaggccctggttacattactatatgaaggcagtgatttgaaatgaaaattcctttcctcttggaagctttggtcataatatcatggttcaattaaacggattccaccggactttgtgatgaaaaaggctctgttaaaatccaattgagtttccaagaggaaattgtagtaggtcaagatgcatgagagggaagatggaggccacctcagctggagaacatgagctgagttgagccctcagtgttgaagttgacttgctccaagctgcagtctaaaaccctggggcccgtgcctggcctatgctccctcccaagtaagtagaggagcagaaccatcaggaacagcctgcctggctcctatgaagaaaacttcctgacgtcctgtccccaaaggaagaccctttccccaagggcaccccaggtggccattaaattgtgatgatcattcagaaagtgcccccttggctttatgagaatccaattagtcttctgaaccaccttttcttgggtgcagatttccaacattcatgctcattgcagatccaccaactgtcactgttcttaacaagcatgctcgtcttgtcagaatttcagtaagttccaatttcctgtacagaccagggtaaactgttctaaaatcaatcaattaatgaaatgttatctggtttttaaaagctggtttcatgtgctttatgtgtataaaactatatctgcctgtgtggctttgcatttcaaatgtgtggcgcacaagcgttttgttggtgctttgttctcagtacagtaactctgtgtacaaacattttaatgtggttttgttgttttccaacaagatgtctctgtaaaaatgatattggctgagctggtgcgttggtttctctcatagaggcattaactatactgccaatgcattgaattatttaaaaatgcaaaataaaatttttatgaaaatctca

SEQ ID NO: 285315 - DNA, 1000 bp, Homo Sapiens
ccacttgcacgccaccattcagtcaccagactgggtgccctccgatgggtggaataagtctgcttcatgccaaggctgggctttgggtcccaccaagatgagttctctgtaagactgtggtggagttgcaccaggaggtgcctctgcctctcgacttgcaccctggtcatttgtaagggaaaagagctggaggtggggagagaaagatctccttcagttgggagtccttccacttcaacactggagaactgagccttgcatctctccagggtccaaggccacgcttggtgcacaggcaagacttgcttcagccccaggtgtggtgacttagacctaggaaaccaattatgagtggaaagtgaccctctagttcaactgtgccagaggaaacagccctccagtgcccacctgcctcactcctccctatcatgtaccgtgaaaaccccctctgatggcctcaaggcagtgcctgcaggccgaggcccttctgggggtttctatctttcttccaccagactccaagcccactctcctccaagactgtgttgtcttttctcaccaagagtattaacactactaagtctttcaccttaacttatgactcaggatttattcacgtcctgcccactctaggctcacaggaataaaatcaagtgctagacacactggctgctactaaggcactagcctctgtagctggtggtggcagcgtggggtgccgcccagcgtgctgggtcctggcagtgcctctgctgtgctgcacattgagccctttctcagtcagtggagtatcaagttgggccatctgtctactgacctggccttcatgtaagcagctgtgggctgcgggcagacaggagctcagagatgcagcatgaggcgcttagaaaaacctggccatttgctgcctctaattcccttttgctttgccatattgggctatgtattacctccttgaaataataaaagaataacattttctaaaaaaaaaaaaaaaaaa

SEQ ID NO: 285316 - DNA, 1000 bp, Homo Sapiens
cttcatggtcaggaaggccatgggaggacattggcctttcggctggttcctgtgcaaattcgtctttaccatagtggacatcaacttgttcggaagtgtcttcctgatcgccctcattgctctggaccgctgtgtttgcgtcctgcatccagtctggacccagaaccaccgcaccgtgagcctggccaagaaggtgatcattgggccctgggtgatggctctgctcctcacattgccagttatcattcgtgtgactacagtacctggtaaaacggggacagtagcctgcacttttaacttttcgccctggaccaacgaccctaaagagaggataaatgtggccgttgccatgttgacggtgagaggcatcatccggttcatcattggcttcagcgcacccatgtccatcgttgctgtcagttatgggcttattgccaccaagatccacaagcaaggcttgattaagtccagtcgtcccttacgggtcctctcctttgtcgcagcagccttttttctctgctggtccccatatcaggtggtggcccttatagccacagtcagaatccgtgagttattgcaaggcatgtacaaagaaattggtattgcagtggatgtgacaagtgccctggccttcttcaacagctgcctcaaccccatgctctatgtcttcatgggccaggacttccgggagaggctgatccacgcccttcccgccagtctggagagggccctgaccgaggactcaacccaaaccagtgacacagctaccaattctactttaccttctgcagaggtggagttacaggcaaagtgaggagggagctgggggacactttcgagctcccagctccagcttcgtctcaccttgagttaggctgagccacaggcatttcctgcttattttaggattacccactcatcagaaaaaaaaaaaaaagcctttgtgtcccctgatttggggagaataaacagatatgagtttaaaaaaaaaaaaaaaaaa

SEQ ID NO: 285317 - DNA, 1000 bp, Homo Sapiens; identical to SEQ ID NO: 221089

SEQ ID NO: 285318 - DNA, 1000 bp, Homo Sapiens; identical to SEQ ID NO: 221090

SEQ ID NO: 285319 - DNA, 1000 bp, Homo Sapiens
cgtccacctcgcaggtgcgccagaactaccaccaggactcagaggccgccatcaaccgccagatcaacctggagctctacgcctcctacgtttacctgtccatgtcttactactttgaccgcgatgatgtggctttgaagaactttgccaaatactttcttcaccaatctcatgaggagagggaacatgctgagaaactgatgaagctgcagaaccaacgaggtggccgaatcttccttcaggatatcaagaaaccagactgtgatgactgggagagcgggctgaatgcaatggagtgtgcattacatttggaaaaaaatgtgaatcagtcactactggaactgcacaaactggccactgacaaaaatgacccccatttgtgtgacttcattgagacacattacctgaatgagcaggtgaaagccatcaaagaattgggtgaccacgtgaccaacttgcgcaagatgggagcgcccgaatctggcttggcggaatatctctttgacaagcacaccctgggagacagtgataatgaaagctaagcctcgggctaatttccccatagccgtggggtgacttccctggtcaccaaggcagtgcatgcatgttggggtttcctttaccttttctataagttgtaccaaaacatccacttaagttctttgatttgtaccattccttcaaataaagaaatttggtacccaggtgttgtctttgaggtcttgggatgaatcagaaatctatccaggctatcttccagattccttaagtgccgttgttcagttctaatcacactaatcaaaaagaaacgagtatttgtatttattaaactcattagtttgggcagtatactaaggtgtggctgtcttggattcagatagaactaagggttcccgactctgaatccagagtctgagttaaatgtttccaatggttcagtctagctttcacagtttttatgaataaaaggcattaaaggctgaaaaaaaaaaaaaaaaaa

SEQ ID NO: 285320 - DNA, 1000 bp, Homo Sapiens; identical to SEQ ID NO: 115719

SEQ ID NO: 285321 - DNA, 1000 bp, Homo Sapiens
gacgccttcatccacgtggacgacttccagagccccaaggacctggcccggtacctgcaggagctggacaaggaccacgcccgctacctgagctactttcactggcgggagacgctgcggcctcgctccttcagctgggcactggctttctgcaaggcctgctggaagctgcagcaggaatctaggtaccagacggtgcgcagcatagcggcttggttcacctgagaggccggcatggggcctgggctgccgggacctcactttcccagggcctcacctacctagggtctcactagtcgggggatttacctacctggggcctcggctgcctggggcctcggctgcctggggtctcacctgcctggggcctcacctgctggagtctttggtggccaggcatgtgacttacctgggatttcacttgccgggcttcactgccaggagcctcccctgctggggaccttgccagctggggctggggatggtgcctactggggaccttgctttctggaggctgcacctactgaggatctcggctgttggggactttacctgctgggacctgctcccagagaccttgccacactgaatgtcacctgctaggagcctcacccgctgggaggcacagggcccaagggagctggatgtgttgcccaaggtgtgcagggcaggtcagggaagggcagggtcccctaaggaggagggcgaagggtatgtgtgtgaccatcagcagtggtgtgcacatggctgggggacactcggtttgaccgccagcggatgggtgtcacaaatgcatcactatgggtgtgacctcggcgtgactctgatagtgcctgtggatgtgttgcgatgcctcaccctggagggcactgggccctgagaacgggtgcccttgaggccctgcccccgggcgatggtgcaggctggtttgcttgtggttttattgctgttgttaaccacccatgaggggtgcaaacagataatgctgttaacattttca

SEQ ID NO: 285322 - DNA, 1000 bp, Homo Sapiens
gaaggaagagctctgaaattaccaaatcttgtggacatggcagcacaggtggctgcaggaatggcttacatcgagcgcatgaattatatccatagagatctgcgatcagcaaacattctagtggggaatggactcatatgcaagattgctgacttcggattggcccgattgatagaagacaatgagtacacagcaagacaaggtgcaaagttccccatcaagtggacggcccccgaggcagccctgtacgggaggttcacaatcaagtctgacgtgtggtcttttggaatcttactcacagagctggtcaccaaaggaagagtgccatacccaggcatgaacaaccgggaggtgctggagcaggtggagcgaggctacaggatgccctgcccgcaggactgccccatctctctgcatgagctcatgatccactgctggaaaaaggaccctgaagaacgccccacttttgagtacttgcagagcttcctggaagactactttaccgcgacagagccccagtaccaacctggtgaaaacctgtaaggcccgggtctgcggagagaggccttgtcccagaggctgccccacccctccccattagctttcaattccgtagccagctgctccccagcagcggaaccgcccaggatcagattgcatgtgactctgaagctgacgaacttccatggccctcattaatgacacttgtccccaaatccgaacctcctctgtgaagcattcgagacagaaccttgttatttctcagactttggaaaatgcattgtatcgatgttatgtaaaaggccaaacctctgttcagtgtaaatagttactccagtgccaacaatcctagtgctttccttttttaaaaatgcaaatcctatgtgattttaactctgtcttcacctgattcaactaaaaaaaaaaaagtattattttccaaaagtggcctctttgtctaaaacaataaaattttttttcatgttttaacaaaaaccaa

SEQ ID NO: 285323 - DNA, 1000 bp, Homo Sapiens
caggtaacaaatagacagcaagaaaggttttgcaccatcctcttacggcctagagagttgacaagttgcttgtagttttaaaaaaataataaagtatacccttctggtatatcatcaagagcttaagaatcttggctttcatatttaaaatgcttttggggagacatatattaaaattttagccaagatgatagacatgtctcaattatatatgtgtgtgtatgtttttaaagctaaaaacattacttttagatccctagaatgaaaatttttttctcatctatgcaattcccatatggtttttttttaaatcatattttattcattttctccctttagcaattttcattttatttctcataatttgaacagagacagttctcatacatgatcagatgctttttttttcttcttaccatcatttatgcatgacataggtaatgtgactaatttctccagttgattcaagaaactcattactttgcctcaaattatatgtaaaatatttgttttacttaggttacagttatcagaaaggtagtttttttcttctattaaaatataacattgtgaaagaaaataaaatttatgctattctttgctttgtttttataaatgaatttttcatagaatttacagtatattcaaaggaagaaagataaaattattggtcatcatttgtaccttagaagtacaagaatttaagtaaaagaaatgttcatttttgttttaaaatttgttttccatgtgaagtttttattgagccaactttcatacatatcttgctagcctaaagtctaaatatttgtgttggcatcagaaaaacaaatgaggcagaattgctatgtgtggttgatcttcagataaattgactgatcacagttatttttgtatcagtctatgttattaggaaaaattgtttagttgttttctcccctgattaatggtgatattcaagtatgatacaaaaagaattgtaccaccaaaaaaaaaaaaaaaa

SEQ ID NO: 285324 - DNA, 1000 bp, Homo Sapiens
acggtgctgaccatgtccaccatcatcacgggcgtgaatgcctccatgccgcgcgtctcctacatcaaggccgtggacatctacctctgggtcagctttgtgttcgtgttcctctcggtgctggagtatgcggccgtcaactacctgaccactgtgcaggagaggaaggaacagaagctgcgggagaagcttccctgcaccagcggattacctccgccccgcactgcgatgctggacggcaactacagtgatggggaggtgaatgacctggacaactacatgccagagaatggagagaagcccgacaggatgatggtgcagctgaccctggcctcagagaggagctccccacagaggaaaagtcagagaagcagctatgtgagcatgagaatcgacacccacgccattgataaatactccaggatcatctttccagcagcatacattttattcaatttaatatactggtctattttctcctagatgcttgtaattctacaaatttcacatttccatggcatgcactacagaaataactgtataatgaaaaagtatttaaggatatggttaaaaaaaaatcccaggacccacccatgttttcactatcccttctgcagctttccaaagctacattgacgagacacttactggtttaatttgcacttattaaccatctattgaatacacagcattatattaggtgctgcaggaaatacgacactgtagcgactgatgttagttgttacccagatcccctggaaaagcacactaccagtgttgtgggcacatttagttccacccgttagacccttgatgctattcacatgaataatttattttcctcaagtgtcattacattgttcaggctacgtgaacttggaagcacctacaggccatttgcatgaaattcacatgcacctaaatcctcactttgacagaaactcatgcttcagtttataacctattacctattttgtatgcgactccacctccgcatgtt

SEQ ID NO: 285325 - DNA, 1000 bp, Homo Sapiens; identical to SEQ ID NO: 221091

SEQ ID NO: 285326 - DNA, 1000 bp, Homo Sapiens; identical to SEQ ID NO: 115721

SEQ ID NO: 285327 - DNA, 1000 bp, Homo Sapiens
gatcgttcctgttatgacctctcctgtcatgcacgagccaccaaagtcccacttgtagctgagaaacctctgaaagaacccaaaacagtcaatgttgttcagtttgaacccagtaagggagcaattggtaaggcatataagaaggatgcaaaactggtgatggagtatcttgccatttgtgatgagtgctacattacagaaatggagatgctgctgaatgagaaaggggaattcacaattgaaactgaagggaaaacatttcagttaacaaaagacatgatcaatgtgaagagattccagaaaacactatatgtggaagaagttgttccgaatgtaattgaaccttccttcggcctgggtaggatcatgtatacggtatttgaacatacattccatgtacgagaaggagatgaacagagaacattcttcagtttccctgctgtagttgctccattcaaatgttccgtcctcccactgagccaaaaccaggagttcatgccatttgtcaaggaattatcggaagccctgaccaggcatggagtatctcacaaagtagacgattcctctgggtcaatcggaaggcgctatgccaggactgatgagattggcgtggcttttggtgtcaccattgactttgacacagtgaacaagaccccccacactgcaactctgagggaccgtgactcaatgcggcagataagagcagagatctctgagctgcccagcatagtccaagacctagccaatggcaacatcacatgggctgatgtggaggccaggtatcctctgtttgaagggcaagagactggtaaaaaagagacaatcgaggaatgaggacaattttgacaacttttgaccacttgcgctaataaaaaaaaaaaaactactcttatgtccactttacaaaagaaaacagcattgtgattactcccagggaccgtattttatcttcagtggctgcctgattttacccccacaattaaagttgaaggaatcctga

SEQ ID NO: 285328 - DNA, 1000 bp, Homo Sapiens
atttgaagggttgggaaggaggaattatatttgcaaaggggctgtctattagcatatttcctttgagggggcaaaaaaaagtgccagtatcgacttttacagattgtggccagtgaggatattataatcctatgtaaacagaaaagtcccacttaccgattcattctttcactgtttgtatctgcgcccagaattctcagtgacgtgggggtgagggtgggtggcgattgccttagagggaacccctaaattggttttggataagtttgagcccttgaccttaatttcattgctaccactctgatctcttagcacatttcttaggattaagggtccaaaaatgctgatctaaggggttgccatggtgttgaacaatgcaactttttatttaaaaaagctctgcactgccatgtatgaaagtctctttatgatgtttgtttttttgtcatttttgttctttacatcaagaaattttatgtttaaatatgcggagaatgtatattgcctctgctcctatcagggttgctaaaccctggtacatcgtatataaaatgtattaaaactggggtttgttaccagttgctgtactttgtatatagaatttttataaattgtatgcttcagaaataatttatttttaaaaagaaattaaaagttttaaactcacatccatattacacctttcccccctgaaatgtatagaatccatttgtcatcaggaatcaaaacccacagtccattgtgaagtgtgctatatttagaacagtcttaaaatgtacagtgtattttatagaattgaagttaacattcttattttcaagagaatttatggacgttgtagaaatgtacaaatgcatttccaaactgccttaaacgttgtatttttatagacatgtttttttaaaaatcctaagtttttaaataactatggatttgtgtattttttttggttatttgttttattaaaacatgtacatcagtaaagagttttaaacaatga

SEQ ID NO: 285329 - DNA, 1000 bp, Homo Sapiens
gacagagcggctgagcccagacctcctgaccctgggacctgcactgccttcatcactccctgtccccaatagtgcttatgggggccctgacttttccagtaccttcttttctcccaccgggagccccctcaattcagcagcctattcctctcccaagcttcgtggaactctccccctgcctccctgtgaggccagggagtgtgtgaactgcggagcaacagccactccactgtggcggagggacaggacaggccactacctatgcaacgcctgcggcctctatcacaagatgaatgggcagaacaggcccctcatccggcccaagaagcgcctgattgtcagtaaacgggcaggtactcagtgcaccaactgccagacgaccaccacgacactgtggcggagaaatgccagtggggatcccgtgtgcaatgcctgcggcctctactacaagctacaccaggtgaaccggccactgaccatgcggaaggatggtattcagactcgaaaccgcaaggcatctggaaaagggaaaaagaaacggggctccagtctgggaggcacaggagcagccgaaggaccagctggtggctttatggtggtggctgggggcagcggtagcgggaattgtggggaggtggcttcaggcctgacactgggccccccaggtactgcccatctctaccaaggcctgggccctgtggtgctgtcagggcctgttagccacctcatgcctttccctggacccctactgggctcacccacgggctccttccccacaggccccatgccccccaccaccagcactactgtggtggctccgctcagctcatgagggcacagagcatggcctccagaggaggggtggtgtccttctcctcttgtagccagaattctggacaacccaagtctctgggccccaggcaccccctggcttgaaccttcaaagcttttgtaaaataaaaccaccaaagtcctgaaaaaaaaaaaaaaaaaaaaaaaa

SEQ ID NO: 285330 - DNA, 1000 bp, Homo Sapiens; identical to SEQ ID NO: 115722

SEQ ID NO: 285331 - DNA, 1000 bp, Homo Sapiens
atttgtaatgctggtacaaggcagctggcaacgttcccttcaagacacagaggagaaatccagatcattctcagcttcccaggcagacccactcagtgatcctgatcagatgaacgaggacaagcgccattcacagggcacattcaccagtgactacagcaagtatctggactccaggcgtgcccaagattttgtgcagtggttgatgaataccaagaggaacaggaataacattgccaaacgtcacgatgaatttgagagacatgctgaagggacctttaccagtgatgtaagttcttatttggaaggccaagctgccaaggaattcattgcttggctggtgaaaggccgaggaaggcgagatttcccagaagaggtcgccattgttgaagaacttggccgcagacatgctgatggttctttctctgatgagatgaacaccattcttgataatcttgccgccagggactttataaactggttgattcagaccaaaatcactgacaggaaataactatatcactattcaagatcatcttcacaacatcacctgctagccacgtgggatgtttgaaatgttaagtcctgtaaatttaagaggtgtattctgaggccacattgctttgcatgccaataaataaattttcttttagtgttgtgtagccaaaaattacaaatggaataaagttttatcaaaatattgctaaaatatcagctttaaaatatgaaagtgctagattctgttattttcttcttattttggatgaagtaccccaacctgtttacatttagcgataaaattatttttctatgatataatttgtaaatgtaaattattccgatctgacatatctgcattataataataggagaatagaagaactggtagccacagtggtgaaattggaaagagaactttcttcctgaaacctttgtcttaaaaatactcagctttcaatgtatcaaagatacaattaaataaaattttcaagcttcttta

SEQ ID NO: 285332 - DNA, 1000 bp, Homo Sapiens
agttgctggctttccaccttgctgtgctgagaggctatgatgttgatttcccacggaatcttgccaaatctgtgactgtagagtgaggaatatctatacaaaatgtacgaaactgtatgattaagcaacacaagacaccttttgtatttaaaaccttgatttaaaatatcaccccttgaagcctttttttagtaaatccttatttatatatcagttataattattccactcaatatgtgatttttgtgaagttacctcttacattttcccagtaatttgtggaggactttgaataatggaatctatattggaatctgtatcagaaagattctagctattattttctttaaagaatgctgggtgttgcatttctggaccctccacttcaatctgagaagacaatatgtttctaaaaattggtacttgtttcaccatacttcattcagaccagtgaaagagtagtgcatttaattggagtatctaaagccagtggcagtgtatgctcatacttggacagttagggaagggtttgccaagttttaagagaagatgtgatttattttgaaatttgtttctgttttgtttttaaatcaaactgtaaaacttaaaactgaaaaattttattggtaggatttatatctaagtttggttagccttagtttctcagacttgttgtctattatctgtaggtggaagaaatttaggaagcgaaatattacagtagtgcattggtgggtctcaatccttaacatatttgcacaattttatagcacaaactttaaattcaagctgctttggacaactgacaatatgattttaaatttgaagatgggatgtgtacatgttgggtatcctactactttgtgttttcatctcctaaaagtgttttttatttccttgtatctgtagtcttttattttttaaatgactgctgaatgacatattttatcttgttctttaaaatcacaacacagagctgctattaaattaatattgatat

SEQ ID NO: 285333 - DNA, 1000 bp, Homo Sapiens
ggagagcgtggagacccccgagcagaagggcctgacgtaccaccgcatcgtagaggctttccggtttgcctacgccaagaggaccctgcttggggaccccaagtttgtggatgtgactgaggtggtccgcaacatgacctctgagttcttcgctgcccagctccggtcccagatctctgaccacaccactcacccgatctcctactacaagcccgagttctacacgccggatgacgggggcactgctcacctgtctgtcgtcgcagaggacggcagtgctgtgtccgccaccagcaccatcaacctctactttggctccaaggtctgctccccggtcagtgggatcctgttcaataatgaatggacgacttcagctctcccagcattcaccaatgagtttggggcacccccctcacctgccaatttcatccagccagggaagcagccgctcttgtccatgtgcctgacgatcatggtgggccaggacggccaggtccggatggtggtgggagctgctgggggcacgcagatcaccacagacactgcactggccatcatctacaacctctggttcggctatgacgtgaagagggccgtggaggagccccggctgcacaacaagcttctgcccaacgtcacgacagtggagagaaacattgaccaggcagtgactgcagccctggagacccggcaccatcacacccagatcgcgtccaccttcatcgctgtggtgcaagccatcgtccgcacggctggtggctgggcagctgcctcggactccaggaaaggcggggaacctgctggctactgattgctccaggcagacaaggctgacaagcaatccagggacaagatactcaccaggatgaggaagaggactttgggggacgggcttcccctgtgagcagcagagcagcataataaatgaggccactgtgccaggctccaggtggcctccctggcctgtctccacaaaaaaaaaaaaaaaaaaaaaaaaaaa

SEQ ID NO: 285334 - DNA, 1000 bp, Homo Sapiens; identical to SEQ ID NO: 115723

SEQ ID NO: 285335 - DNA, 1000 bp, Homo Sapiens
agttcttaagggctgtttgccttttggtccttttggtttggtttggctttgactaattctggtactgaaaagttagctatacacacacacacacacacacacacacacacacacacacacacacaaacttcaaaaatgcttaaccatctgaccatagtgactagcctatagtgagtcgaggaccaaactttttcaggaaaatgctgcctcgtttttaaaacaagcctcctaagctatgttctttacaatgtctgtaattagtgtttcacttgagaaagccttttgtgggtcgtaaattatttctacttatccagtaaataacaatgacaaaataaacaccaatgacagaaaaatttctactttactgtccatataggtgtgcattttaatatttttctttccaagataaaattttgaaacttaaattgtgtattgtgtaattaatttgatagtgtaccctcttaataaatgcccactttattttatatccaagttagtgcattatatatatatttttgctttggctatatttacacgtgactttaatcgcccaactgtgactagtcattgcagctactcagctacagtatttatggagatggtgtgtcctgaacagtgtagctcaggtcagcttgaactttccatttctgctctcattgtaggtgtaactactagtcctaatgtcaactgacccatgatttctactgtcagtcaatataagtgaacattgttttaaatatccttaactaacttaaagaattttaaaattgtactgtgattttcataacccgttgcctttttggtaccagagctacgtggtttgaattctggctacatgttttaagtaagaaaaaaaaagacgtatttttgcttactcagataaaagacaacctgtaaaaatataataattaaattttacatgtgctgtacaaggggttattttaaaaagcatttgttaaatttcaataaagctaagtgtgccacaaaaaaaaaaaaaaaa

SEQ ID NO: 285336 - DNA, 1000 bp, Homo Sapiens; identical to SEQ ID NO: 221093

SEQ ID NO: 285337 - DNA, 1000 bp, Homo Sapiens
atttctgtggaaaacaatttgcataatactaatttattgccgtcctggactctgtgtgagcgtgtccacagagtttgtagtaaatattatgattttatttaaactattcagaggaaaaacagaggatgctgaagtacagtcccagcacatttcctctctatcttttttttaggcaaaaccttgtgactcagtgtattttaaattctcagtcatgcactcacaaagataagacttgtttctttctgtctctctctctttttcttttctatggagcaaaacaaagctgatttcccttttttcttcccccgctaattcatacctccctcctgatgtttttcccaggttacaatggcctttatcctagttccattcttggtcaagtttttctctcaaatgatacagtcaggacacatcgttcgatttaagccatcatcagcttaatttaagtttgtagtttttgctgaaggattatatgtattaatacttacggttttaaatgtgttgctttggatacacacatagtttcttttttaatagaatatactgtcttgtctcactttggactgggacagtggatgcccatctaaaagttaagtgtcatttcttttagatgtttaccttcagccatagcttgattgctcagagaaatatgcagaaggcaggatcaaagacacacaggagtcctttcttttgaaatgccacgtgccattgtctttcctcccttctttgcttctttttcttaccctctctttcaattgcagatgccaaaaaagatgccaacagacactacattaccctaatggctgctacccagaacctttttataggttgttcttaatttttttgttgttgttgttcaagcttttcctttcttttttttcttagtgtttgggccacgattttaaaatgacttttattatgggtatgtgttgccaaagctggctttttgtcaaataaaatgaatacgaacttaaaaaataaaaaaaaaaaaaaaaaaaaa

SEQ ID NO: 285338 - DNA, 1000 bp, Homo Sapiens; identical to SEQ ID NO: 115726

SEQ ID NO: 285339 - DNA, 1000 bp, Homo Sapiens
tgggcagcagaagactgtatttgtgggacacacgggtgactgcatgagcctggctgtgtctcctgacttcaatctcttcatttcgggggcctgtgatgccagtgccaagctctgggatgtgcgagaggggacctgccgtcagactttcactggccacgagtcggacatcaacgccatctgtttcttccccaatggagaggccatctgcacgggctcggatgacgcttcctgccgcttgtttgacctgcgggcagaccaggagctgatctgcttctcccacgagagcatcatctgcggcatcacgtccgtggccttctccctcagtggccgcctactattcgctggctacgacgacttcaactgcaatgtctgggactccatgaagtctgagcgtgtgggcatcctctctggccacgataacagggtgagctgcctgggagtcacagctgacgggatggctgtggccacaggttcctgggacagcttcctcaaaatctggaactgaggaggctggagaaagggaagtggaaggcagtgaacacactcagcagccccctgcccgaccccatctcattcaggtgttctcttctatattccgggtgccattcccactaagctttctcctttgagggcagtggggagcatgggactgtgcctttgggaggcagcatcagggacacaggggcaaagaactgccccatctcctcccatggccttccctccccacagtcctcacagcctctcccttaatgagcaaggacaacctgcccctccccagccctttgcaggcccagcagacttgagtctgaggccccaggccctaggattcctcccccagagccactacctttgtccaggcctgggtggtatagggcgtttggccctgtgactatggctctggcaccactagggtcctggccctcttcttattcatgctttctcctttttctacctttttttctctcctaagacacctgcaataaagtgtagcaccctggta

SEQ ID NO: 285340 - DNA, 1000 bp, Homo Sapiens; identical to SEQ ID NO: 115728

SEQ ID NO: 285341 - DNA, 1000 bp, Homo Sapiens; identical to SEQ ID NO: 221094

SEQ ID NO: 285342 - DNA, 1000 bp, Homo Sapiens
ccgtttgaagaaatatgaaaagaatgtatatgcaacaactgtggggacaccttacaaaggtggcaatttgtaccatacggatgtctcactctttggagaacctaccgaatttgagtatttgcgaaaagtgctttttgagtatatgatgggtcgtgagactaagaccatggcaaaagttataaccaccgtactgaagttccctgatgatcagactcagaaaattttggaaagagaagatgctcggctgatgtttacttcacctcgcagtggtatcttctgagtaaaccatcagtctgtgcttagttaacatgtgtcatggctccgatcttcatcttgaagaagagtgacattgggtgactgctgcttggaaaactgtccacacttgctactctttgagaatgaagttgtcattcagggcccctcatgtagccaaaagaccaagaaaaatctggcccacagataagttgcagactgcctttaaaatagattttatcagtggagaaatggtgatagttttttcttcagttttctcttgggaagagttttatgttgtttaaaagatattttgataacttaacctgctttatgggcttacataatattcctttcatccattctttttaaagaacggcttacctttcctatttatttttagggtgattttttaaaaagacttgtgcaatacattttgaggtgaaacttagtggattttttctgataaattagagcatttaattgactattttattcaggttgatctgttgaatatttgctaaagaccagttctttaagctaagacatgtaaaaaatcccaaatggcagtacctcattgtttacttagcttttgtacttatatttttcagaggaaaaaacactactgtaaattgtgaatagccaatacataactgtattgtatgcaaatctgtgattgttggcagtgtcatctctgagaaacagataaataaagtttatttactatataacaaaaaaaaaaaaaaaa

SEQ ID NO: 285343 - DNA, 1000 bp, Homo Sapiens
cagggcaggccttgctggggtccagggctgttggaggaccccgagggctgaggagcagccaggacccgcctgctcccatcctcacccagatcaggaaccagggcctccctgttcacggtgacacaggtcagggctcagagtgaccctcggctgtcacctgctcacagggatgctggtggctggtgagaccccgcactgcacacgggaatgcctaggtcccttcccgacccagccagctgcactgcagggcacggggacctggatagttaagggcttttccaaacatgcatccatttactgacacttcctgtccttgttcatggagagctgttcgctcctcccagatggcttcggaggcccgcagggcccaccttggaccctggtgacctcctgtcactcactgaggccatcagggccctgccccaggcctggacgggccctccttccctcctgtgccccagctgccaggtggccctggggaggggtggtgtggtgttgggaaggggtcctgcagggggaggaggacttggagggtctgggggcagctgtcctgaaccgactgaccctgaggaggccgcttagtgctgctttgcttttcatcaccgtcccgcacagtggacggaggtccccggttgctggtcaggtccccatggcttgttctctggaacctgactttagatgttttgggatcaggagcccccaacacaggcaagtccaccccataataaccctgccagtgccagggtgggctggggactctggcacagtgatgccgggcgccaggacagcagcactcccgctgcacacagacggcctaggggtggcgctcagaccccaccctacgctcatctctggaaggggcagccctgagtggtcactggtcagggcagtggccaagcctgctgtgtccttcctccacaaggtccccccaccgctcagtgtcagcgggtgacgtgtgttcttttgagtccttgtatgaataaaaggctggaaacctaaa

SEQ ID NO: 285344 - DNA, 1000 bp, Homo Sapiens; identical to SEQ ID NO: 115729

SEQ ID NO: 285345 - DNA, 1000 bp, Homo Sapiens
ctggtggggccagatggtatacccatcatgcgctggcaccaccggaccacggtcagcaacgtcaagatggacatcctgtcctacatgaggcggcaggcagccctgggggtcaagaggaagtaactgaaggccgtctcatcccatgtccaccatgtaggggagggactttgttcaggaagaaatccgtgtctccaaccacactatctacccatcacagacccctttcctatcactcaaggccccagcctggcacaaatggatgcatacagttctgtgtactgccaggcatgtgggtgtgggtgcaatgtgggtgtttacacacatgcctacaggtatgcgtgattgtgtgtgtgtgcatgggtgtacagccacgtgtctacctatgtgtctttctgggaatgtgtaccatctgtgtgcctgcagctgtgtagtgctggacagtgacaaccctttctctccagttctccactccaatgataatagttcacttatacctaaacccaaaggaaaaaccagctctaggtccaattgttctgctctaactgatacctcaaccttggggccagcatctcccactgcctccaaatattagtaactatgactgacgtccccagaagtttctgggtctaccacactccccaaccccccactcctacttcctgaagggccctcccaaggctacatccccaccccacagttctccctgagagagatcaacctccctgagatcaaccaaggcagatgtgacagcaagggccacggaccccatggcaggggtggcgtcttcatgagggaggggcccaaagcccttgtgggcggacctcccctgagcctgtctgaggggccagcccttagtgcattcaggctaaggcccctgggcagggatgccacccctgctccttcggaggacgtgccctcacccctcactggtccactggcttgagactcaccccgtctgcccagtaaaagcctttctgcagcaaaaaaaaaaaaaaaaaaa

SEQ ID NO: 285346 - DNA, 1000 bp, Homo Sapiens
ccccggctcctgcgggtggcgctgctgctcctgctcctggtggccgccagccggcgcgcagcaggagcgcccctggccactgaactgcgctgccagtgcttgcagaccctgcagggaattcacctcaagaacatccaaagtgtgaaggtgaagtcccccggaccccactgcgcccaaaccgaagtcatagccacactcaagaatgggcagaaagcttgtctcaaccccgcatcgcccatggttaagaaaatcatcgaaaagatgctgaaaaatggcaaatccaactgaccagaaggaaggaggaagcttattggtggctgttcctgaaggaggccctgccttacaggaacagaagaggaaagagagacacagctgcagaggccacctggcttgcgcctaatgtgtttgagcatacttaggagaagtcttctatttatttatttatttatttatttgtttgttttagaagattctatgttaatattttatgtgtaaaataaggttatgattgaatctacttgcacactctcccattatatttattgtttattttaggtcaaacccaagttagttcaatcctgattcatatttaatttgaagatagaaggtttgcagatattctctagtcatttgttaatatttcttcgtgatgacatatcacatgtcagccactgtgatagaggctgaggaatccaagaaaatggccagtaagatcaatgtgacggcagggaaatgtatgtgtgtctattttgtaactgtaaagatgaatgtcagttgttatttattgaaatgatttcacagtgtgtggtcaacatttctcatgttgaagctttaagaactaaaatgttctaaatatcccttggcattttatgtctttcttgtaagatactgccttgtttaatgttaattatgcagtgtttccctctgtgttagagcagagaggtttcgatatttattgatgttttcacaaagaacaggaaaataaaatatttaaaaatat

SEQ ID NO: 285347 - DNA, 1000 bp, Homo Sapiens
cccacgccacgctctccgccgcccccagcaatccccggctcctgcgggtggcgctgctgctcctgctcctggtggccgccagccggcgcgcagcaggagcgtccgtggtcactgaactgcgctgccagtgcttgcagacactgcagggaattcacctcaagaacatccaaagtgtgaatgtaaggtcccccggaccccactgcgcccaaaccgaagtcatagccacactcaagaatgggaagaaagcttgtctcaaccccgcatcccccatggttcagaaaatcatcgaaaagatactgaacaaggggagcaccaactgacaggagagaagtaagaagcttatcagcgtatcattgacacttcctgcagggtggtccctgcccttaccagagctgaaaatgaaaaagagaacagcagctttctagggacagctggaaaggacttaatgtgtttgactatttcttacgagggttctacttatttatgtatttatttttgaaagcttgtattttaatattttacatgctgttatttaaagatgtgagtgtgtttcatcaaacatagctcagtcctgattatttaattggaatatgatgggttttaaatgtgtcattaaactaatatttagtgggagaccataatgtgtcagccaccttgataaatgacagggtggggaactggagggtggggggattgaaatgcaagcaattagtggatcactgttagggtaagggaatgtatgtacacatctattttttatactttttttttaaaaaaagaatgtcagttgttatttattcaaattatctcacattatgtgttcaacatttttatgctgaagtttcccttagacattttatgtcttgcttgtagggcataatgccttgtttaatgtccattctgcagcgtttctctttcccttggaaaagagaatttatcattactgttacatttgtacaaatgacatgataataaaagttttatgaaaaaaaaaaaaaaa

SEQ ID NO: 285348 - DNA, 1000 bp, Homo Sapiens; identical to SEQ ID NO: 115731

SEQ ID NO: 285349 - DNA, 1000 bp, Homo Sapiens; identical to SEQ ID NO: 115732

SEQ ID NO: 285350 - DNA, 1000 bp, Homo Sapiens; identical to SEQ ID NO: 115733

SEQ ID NO: 285351 - DNA, 1000 bp, Homo Sapiens; identical to SEQ ID NO: 221097

SEQ ID NO: 285352 - DNA, 1000 bp, Homo Sapiens
gcacacgggggagagaccatttgtttgtgactatgaagggtgtggcaaggccttcatcagggactaccatctgagccgccacattctgactcacacaggagaaaagccgtttgtttgtgcagccaatggctgtgatcaaaaattcaacacaaaatcaaacttgaagaaacattttgaacgcaaacatgaaaatcaacaaaaacaatatatatgcagttttgaagactgtaagaagacctttaagaaacatcagcagctgaaaatccatcagtgccagaataccaatgaacctctattcaagtgtacccaggaaggatgtgggaaacactttgcatcacccagcaagctgaaacgacatgccaaggcccacgagggctatgtatgtcaaaaaggatgttcctttgtggcaaaaacatggacggaacttctgaaacatgtgagagaaacccataaagaggaaatactatgtgaagtatgccggaaaacatttaaacgcaaagattaccttaagcaacacatgaaaactcatgccccagaaagggatgtatgtcgctgtccaagagaaggctgtggaagaacctatacaactgtgtttaatctccaaagccatatcctctccttccatgaggaaagccgcccttttgtgtgtgaacatgctggctgtggcaaaacatttgcaatgaaacaaagtctcactaggcatgctgttgtacatgatcctgacaagaagaaaatgaagctcaaagtcaaaaaatctcgtgaaaaacgggagtttggcctctcatctcagtggatatatcctcccaaaaggaaacaagggcaaggcttatctttgtgtcaaaacggagagtcacccaactgtgtggaagacaagatgctctcgacagttgcagtacttacccttggctaagaactgcactgctttgtttaaaggactgcagaccaaggagtcgagctttctctcagagcatgcttttctttattaaaattactgatgcag

SEQ ID NO: 285353 - DNA, 1000 bp, Homo Sapiens; identical to SEQ ID NO: 115734

SEQ ID NO: 285354 - DNA, 1000 bp, Homo Sapiens; identical to SEQ ID NO: 115735

SEQ ID NO: 285355 - DNA, 1000 bp, Homo Sapiens
gtagctgctccatacattgaaaaatacagaatggagcatattccagaatcaagacctctttctccaacagccttttcactgcaatttctgcacaagaaatccaccaaaatcccggagtctgaggacctttaatgggctttgtcatgaagtagcagatgagagggcagtcagtttagcacaaagcaatactaggctgaaggagagacctgagaactttcctaggtagatcaatccattgtatcattcagttcttctaaagcctacgttggttaggctgatggcagtattatagttgctaaattcagcactgtgttcctgttgtcgtggttcaagacccaccaggtattttcagattataaaacttttctttctttcttaacagtttcaacaggccactcactcttaagggtgagaagaataaccacaattgtatgtgcctgttttttactcttagcattagatgaattcaaatttggaaacagattgatagcaattttttctaaaaacattagacttttgttaacctttttttttttttttaaatttgcttcaacaagctctccaccagttgactttctttggctaattttactttgcatgatatgccttaatatgccttcataaataaccattttaagtcataatttgtccttaagctgcttttttcttctattaattggatcatagtaaagagtagtcaatagggtcttcagctattaattgtagaggtgattaaaaccaacaaggagtttcatgtgcaaaggagataaggaatgaatataaagattgctatttgggtggctcttattaaactgtgtattttgtacttatcactacacgtatcccccaaatgcttacatgggagtttgaggttagtattttcacttccttggtgttagtactctattcacattcttattgtaaccttcctcatttcacagataaggaatctttggggattaaccaacctcctttctgtaatggtaatcattaaaataag

SEQ ID NO: 285356 - DNA, 1000 bp, Homo Sapiens; identical to SEQ ID NO: 115737

SEQ ID NO: 285357 - DNA, 1000 bp, Homo Sapiens; identical to SEQ ID NO: 221101

SEQ ID NO: 285358 - DNA, 1000 bp, Homo Sapiens; identical to SEQ ID NO: 115738

SEQ ID NO: 285359 - DNA, 1000 bp, Homo Sapiens
aaatcattttggactcgcataacatgcacagaagaaggatggtcaccaacaccaaagtgtctcagactgtgtttctttccttttgtggaaaatggtcattctgaatcttcaggacaaacacatctggaaggtgatactgtgcaaattatttgcaacacaggatacagacttcaaaacaatgagaacaacatttcatgtgtagaacggggctggtccacccctcccaaatgcaggtccactgacacttcctgtgtgaatccgcccacagtacaaaatgcttatatagtgtcgagacagatgagtaaatatccatctggtgagagagtacgttatcaatgtaggagcccttatgaaatgtttggggatgaagaagtgatgtgtttaaatggaaactggacggaaccacctcaatgcaaagattctacgggaaaatgtgggccccctccacctattgacaatggggacattacttcattcccgttgtcagtatatgctccagcttcatcagttgagtaccaatgccagaacttgtatcaacttgagggtaacaagcgaataacatgtagaaatggacaatggtcagaaccaccaaaatgcttacatccgtgtgtaatatcccgagaaattatggaaaattataacatagcattaaggtggacagccaaacagaagctttatttgagaacaggtgaatcagctgaatttgtgtgtaaacggggatatcgtctttcatcacgttctcacacattgcgaacaacatgttgggatgggaaactggagtatccaacttgtgcaaaaagatagaatcaatcataaaatgcacacctttattcagaactttagtattaaatcagttcttaatttaatttttaagtattgttttactcctttttattcatacgtaaaattttggattaatttgtgaaaatgtaattataagctgagaccggtggctctcttcttaaaagcaccatattaaaacttggaaaactggaaaact

SEQ ID NO: 285360 - DNA, 1000 bp, Homo Sapiens; identical to SEQ ID NO: 115739

SEQ ID NO: 285361 - DNA, 1000 bp, Homo Sapiens
ctgcatctccttcaacaaggatctgctgacctgctgggatccagaggagaataagatggccccttgcgaatttggggtgctgaatagcttggcgaatgtcctctcacagcacctcaaccaaaaagacaccctgatgcagcgcttgcgcaatgggcttcagaattgtgccacacacacccagcccttctggggatcactgaccaacaggacacggccaccatctgtgcaagtagccaaaaccactccttttaacacgagggagcctgtgatgctggcctgctatgtgtggggcttctatccagcagaagtgactatcacgtggaggaagaacgggaagcttgtcatgcctcacagcagtgcgcacaagactgcccagcccaatggagactggacataccagaccctctcccatttagccttaaccccctcttacggggacacttacacctgtgtggtagagcacattggggctcctgagcccatccttcgggactggacacctgggctgtcccccatgcagaccctgaaggtttctgtgtctgcagtgactctgggcctgggcctcatcatcttctctcttggtgtgatcagctggcggagagctggccactctagttacactcctcttcctgggtccaattattcagaaggatggcacatttcctagaggcagaatcctacaacttccactccaagtgagaaggagattcaaactcaatgatgctaccatgcctctccaacatcttcaaccccctgacattatcttggatcctatggtttctccatccaattctttgaatttcccagtctcccctatgtaaaacttagcaacttgggggacctcattcctgggactatgctgtaaccaaattattgtccaaggctatatttctgggatgaatataatctgaggaagggagttaaagaccctcctggggctctcagtgtgccatagaggacagcaactggtgattgtttcagagaaataaactttggtgga

SEQ ID NO: 285362 - DNA, 1000 bp, Homo Sapiens
ctctgatgcagccatcctggaccttggctgtggtctggtaactggaacccagtgacgtaatcaggtgccatcgggggtcatgggaaagggggatccccaaggtctgaggtggactaggaaggctttctgaagaacctgggtctgttagggcatcagccaatcaaggtacaagtaaatagaggcaaaatgagggtttgaactgtgagcagttggtcctggaaaagaaagaaaccaagagattatggggactcaatgggcttcttaagagagaataagttgaaatcaatgaccagaagaccctgatggaagtggaggagaatcatctcaggcaaactttttgtgtgccagtaacagaaaccctctttgtgtgatcacatgcaaagtataggatatttgcaatatagccatggggaggagtgcagggcccaagggtagattttagccaggcctcccaggaacagaactcggatccgaaaagcccagagaagctagagctgcccctccaacactctcggatccacatggtctgtgttctctagacccccctgcatgttagcggtgttctctctctgtggactgactgtccttctcagtgaacatgtccacccgacagctcctgagtttatatcatctcaaccctcacaacccacagaggctgtgtctcctagtcacagctttaaattactggaaaaataaatgactggccaaacttggagcaggtgtccatcccagccctgtgtagttagagcaggaatcaagatctcaacacaaatgtggctgccaagcactcagccccggggcgaggggtcaagttcttctcagagaaagaggaataagttggttctcagaagacatcacaagatacgtgtgtacccaacaatctctgatctctgctgatcttttgcttagacgttaacttgatgcatcattggaaaggtgtttctctcatctctgtcctaaggcttgataaagtcattaaaattgtgttcttttgactaaa

SEQ ID NO: 285363 - DNA, 1000 bp, Homo Sapiens
ccggctggatctcttggagaggagcagacaggccgtggatggggtctgtagacacaactacaggctgggcgcacccttcactgtggggagaaaagtgcaaccagaggtgacagtgtacccagagaggaccccactcctgcaccagcataatctgctgcactgctctgtgacaggcttctatccaggggatatcaagatcaagtggttcctgaatgggcaggaggagagagctggggtcatgtccactggccctatcaggaatggagactggacctttcagactgtggtgatgctagaaatgactcctgaacttggacatgtctacacctgccttgtcgatcactccagcctgctgagccctgtttctgtggagtggagagctcagtctgaatattcttggagaaagatgctgagtggcattgcagccttcctacttgggctaatcttccttctggtgggaatcgtcatccagctaagggctcagaaaggatatgtgaggacgcagatgtctggtaatgaggtctcaagagctgttctgctccctcagtcatgctaaggtcctcactgaagcttctctctctggagcctgaagtagtgatgagtagtctgggccctgggtgaggtaaaggacattcatgaggtcaatgttctgggaataactctcttccctgatccttggaggagcccgaactgattctggagctctgtgttctgagatcatgcatctcccacccatctgcccttctcccttctacgtgtacatcattaatccccattgccaagggcattgtccagaaactcccctgagaccttactccttccagccccaaatcatttacttttctgtggtccagccctactcctataagtcatgatctccaaagctttctgtcttccaactgcagtctccacagtcttcagaagacaaatgctcaggtagtcactgtttccttttcactgtttttaaaaaccttttattgtcaaataaaatggagataca

SEQ ID NO: 285364 - DNA, 1000 bp, Homo Sapiens
atttctacccaggcagcattcaagtccgatggttcctgaatggacaggaggaaacagctggggtcgtgtccaccaacctgatccgtaatggagactggaccttccagatcctggtgatgctggaaatgaccccccagcagggagatgtctacacctgccaagtggagcacaccagcctggatagtcctgtcaccgtggagtggaaggcacagtctgattctgcccggagtaagacattgacgggagctgggggcttcgtgctggggctcatcatctgtggagtgggcatcttcatgcacaggaggagcaagaaagttcaacgaggatctgcataaacagggttcctgagctcactgaaaagactattgtgccttaggaaaagcatttgctgtgtttcgttagcatctggctccaggacagaccttcaacttccaaattggatactgctgccaagaagttgctctgaagtcagtttctatcattctgctctttgattcaaagcactgtttctctcactgggcctccaaccatgttcccttcttcttagcaccacaaataatcaaaacccaacatgactgtttgttttcctttaaaaatatgcaccaaatcatctctcatcacttttctctgagggttttagtagacagtaggagttaataaagaagttcattttggtttaaacataggaaagaagagaaccatgaaaatggggatatgttaactattgtataatggggcctgttacacatgacactcttctgaattgactgtatttcagtgagctgcccccaaatcaagtttagtgccctcatccatttatgtctcagaccactattcttaactattcaatggtgagcagactgcaaatctgcctgataggacccatattcccacagcactaattcaacatataccttactgagagcatgttttatcattaccattaagaagttaaatgaacatcagaatttaaaatcataaatataatctaatacacttt

SEQ ID NO: 285365 - DNA, 1000 bp, Homo Sapiens; identical to SEQ ID NO: 115740

SEQ ID NO: 285366 - DNA, 1000 bp, Homo Sapiens
aaattaaaattttatgacagtatcgaggcttgtgatgacgaatcctgctctaaaatacacaaggagctttcttgtttcttattaggcctcagaaagaagtcagttaacgtcacccaaaagcacaaaatggattttagtcaaatatttattggatgatacagtgttttttaggaaaagcatctgccacaaaaatgttcacttcgaaattctgagttcctggaatggcacgttgctgccagtgccccagacagttcttttctaccctgcgggcccgcacgttttatgaggttgatatcggtgctatgtgtttggtttataatttgatagatgtttgactttaaagatgattgttcttttgtttcattaagttgtaaaatgtcaagaaattctgctgttacgacaaagaaacattttatgctagattaaaatatcctttcatcaatgggattttctagtttcctgccttcagagtatctaatcctttaatgatctggtggtctcctcgtcaatccatcagcaatgcttctctcatagtgtcatagacttgggaaacccaaccagtaggatatttctacaaggtgttcattttgtcacaagctgtagataacagcaagagatgggggtgtattggaattgcaatacattgttcaggtgaataataaaatcaaaaacttttgcaatcttaagcagagataaataaaagatagcaatatgagacacaggtggacgtagagttggcctttttacaggcaaagaggcgaattgtagaattgttagatggcaatagtcattaaaaacatagaaaaatgatgtctttaagtggagaattgtggaaggattgtaacatggaccatccaaatttatggccgtatcaaatggtagctgaaaaaactatatttgagcactggtctctcttggaattagatgttatatcaaatgagcatctcaaatgttttctgcagaaaaaaataaaaagattctaacaaaaaaaaaaaaaaaa

SEQ ID NO: 285367 - DNA, 1000 bp, Homo Sapiens; identical to SEQ ID NO: 115741

SEQ ID NO: 285368 - DNA, 1000 bp, Homo Sapiens
aaacacccggactcttccgtcaatttcgcggaattctccaagaagtgttcggagagatggaagaccatgtctgcaaaggagaagtcgaagtttgaagatatggcaaaaagtgacaaagctcgctatgacagggagatgaaaaattacgttcctcccaaaggtgataagaaggggaagaaaaaggaccccaatgctcctaaaaggccaccatctgccttcttcctgttttgctctgaacatcgcccaaagatcaaaagtgaacaccctggcctatccattggggatactgcaaagaaattgggtgaaatgtggtctgagcagtcagccaaagataaacaaccatatgaacagaaagcagctaagctaaaggagaaatatgaaaaggatattgctgcatatcgtgccaagggcaaaagtgaagcaggaaagaagggccctggcaggccaacaggctcaaagaagaagaacgaaccagaagatgaggaggaggaggaggaagaagaagatgaagatgaggaggaagaggatgaagatgaagaataaatggctatcctttaatgatgcgtgtggaatgtgtgtgtgtgctcaggcaattattttgctaagaatgtgaattcaagtgcagctcaatactagcttcagtataaaaactgtacagatttttgtatagctgataagattctctgtagagaaaatacttttaaaaaatgcaggttgtagctttttgatgggctactcatacagttagattttacagcttctgatgttgaatgttcctaaatatttaatggtttttttaatttctgtgtgtatggtagcacagcaaacttgtaggaattagtatcaatagtaaattttgggttttttaggatgttgcatttcgtttttttaaaaaaaattttgtaataaaattatgtatattatttctattgtctttgtcttaatatgctaagttaattttcactttaaaaaagccatttgaagaccaaaaaaaaaaaaa

SEQ ID NO: 285369 - DNA, 1000 bp, Homo Sapiens
gatgttattggaggtgtggatgagggagtttgttgttgcagtccttctttgcaccttattttaaagaataaatgaaacatttttctggttacttttttaaaaatttaaaatggaagggaagaataggggcagggcattattaggctatttctgatgcttcagtgttataaattcaacatagaggctgacaacctaaattcatggtgtaacacagctcttttccttttccttttttttttttttttttggtatctgttcaatgaaaataaggtatgacccaagtttttacctagtctgactagaagtattccacttcaaggtctgaagtaggacttttaccttaaaaaacaacaacaaacaaaactatcacacaggatagataagaagattggttaaacagttttgtgtagatctttttggtgctgaactatgacatgagccttatagattgtaaaatagggatagttggaactaatgtacagaactaaattttttaaactttatttgctgttaaattctgtgaagtttcagttatctaaaataaatatacacaaatatgaaatataatgtttcagattgcaaggtaatatgtaatagtagtgtttgtaagatactcttgtctaatattaactagtagtattttgatttgtacagtcataatttgttaaaatgacttcatttaacattcactgatgtagattaataatgtaagttctgatttaaagaatggtggcaaaatggtgcatgtaatacttttgcaagtgttggggagatcggtatgttttgaaaagagtaatttaacttttgggtgccaggaaatgggttttctcaaagtccattgccggcaatgggcaggcctgcaaatactggcacagagcattaatcatacaccttattaacggtgaggtgaataactttgaaataaagttttagagaaatgtttcaaaaaaaaaaaaaaaaaaaaaaaaaaaaaaaaaaaaaaaaaaaaaaaaaaaaaaaa

SEQ ID NO: 285370 - DNA, 1000 bp, Homo Sapiens
gcccagctctggcgagggcctggccttcttcaccttccccaacattgccagtgccaccaagttcaagcagctctaccgctcccgcatgaactccctggagatgactcccgcagtcaggcagagggtgatagaagaggccaagactgcgttcctgctcaacatccagctctttgaggagttgcaggagctgctgacccatgacaccaaggaccagagcccctcacgggcaccagggcttcgccagcgggccagcaacaaagtgcaagattctgcccccgtggagactcccagagggaagcccccactcaacacccgctcccaggctccgcttctccgatgggtccttacactcagctttctggtggcgacagttgctgtagggctttatgccatgtgaatgcaggcatgctggctcccagggccatgaactttgtccggtggaaggccttctttctagagagggaattctcttggctggcttccttaccgtgggcactgaaggctttcagggcctccagccctctcactgtgtccctctctctggaaaggaggaaggagcctatggcatcttccccaacgaaaagcacatccaggcaatggcctaaacttcagagggggcgaaggggtcagccctgcccttcagcatcctcagttcctgcagcagagcctggaagacaccctaatgtggcagctgtctcaaacctccaaaagccctgagtttcaagtatccttgttgacacggccatgaccactttccccgtgggccatggcaatttttacacaaacctgaaaagatgttgtgtcttgtgtttttgtcttatttttgttggagccactctgttcctggctcagcctcaaatgcagtatttttgttgtgttctgttgtttttatagcagggttggggtggtttttgagccatgcgtgggtggggagggaggtgtttaacggcactgtggccttggtctaacttttgtgtgaaataataaacaacattgtctg

SEQ ID NO: 285371 - DNA, 1000 bp, Homo Sapiens
cagttctacctgtttgagaatgtggacaatgcccagcagttcaagcagctctaccgggccaggatgaacgccctggacctgaacatgaagaccaaagagaggatcgtggaggaggccaacaaggcttttgagtataacatgcagatattcaatgaactggaccaggccggctccacactggccagagagaccttggaggatgggttccctgtacacgatgggaaaggagacatgcgtaaatgccctttctacgctgctgaacaagacaaaggtgccctggagggcagcagctgtcccttccgaacagctatggctgtgctgaggaagcccagcctccagttcatcctggccgctggtgtggccctagctgctggactcttggcctggtactacatgtgaagcacccatcatgccacaccggtaccctcctcccgactgaccactggcctacccctttctccagccctgactaaactaccacctcaggtgactttttaaaaaatgctgggtttaagaaaggcaaccaataaaagagatgctagagcctcgtctgacagcatcctctctatgggccatattccgcactgggcacaggccgtcaccctgggagcagtcggcacagtgcagcaagcctggcccccgacccagctctactccaggcttccacacttctgggccctaggctgcttccggtagtccctgtttttgcagtacatgggtgactatctcccctgttggaggtgagtggcctgtaagtccaagctgtgcgagggggccttgctggatgctgctgtacaacttctgggcctctcttggaccctgggagtgagggtgggtgtgggtggaagcctcagaggccttgggagctcatccctctcacccagaatccctctaacccttgggtgcggtttgctcagccccagcttatctcctcctccgcctgtgtaaatgctccagcactcaataaagtgggctttgcaagctaaaaaaaaaaaaaaaa

SEQ ID NO: 285372 - DNA, 1000 bp, Homo Sapiens
cgagatcgcccacacgctctgtttgtctgagcgccaggtcaagatctggtttcagaaccggaggatgaagtggaagaaagaccacaaactgcccaacaccaagatgcgatcctccaattcggcctcggcctctgccggcccaccagggaaagcacaaactcagagcccacacctccatccccacccccacccgagcacctccacacccgttccctcctccatataatcttctagagatcttaaccagtttctatcccttacctgcttttctcttctcttctcctgctccgttcctcatccacccctccccatctggaccataatagacaccaaaacaaacccaaattggtaaaaagaataatcaaaaagaagacattatccggttaagagtctgtgctggttgccacccaagagagaacagttgtccaggatgctggctggtggaacaacctgctggcccgaaacaaggctgccaggtgtggaacagcccatgctgactggggacatacacttgcatctttgttgaaagcagaagaagacagaccctttccccaccttccttacctcctcttcccccattaaggcagctcatccaagcttgtatttaactgaataaatgagtagacattgtggacctcacaagattatttaattcttaagatgtgtagaccttgatggtaggtgtgacatgttagtttttcttacttgcatttatttaagacactgttacagagatactgttgtcaccttctggggcacggtctttggggagaggggagtgcatttagacttatgtggaactgtacaaattgtgatgtggctacatagaaagccatgtgctaagaataaactccatttaaaaaacattaaaaatctaagattcatgtgttttctaagcttttcattaagaaaacaaaagtcctctggattgagatacttgaccttgcatgtaaaaaccttgtagatagcttgagctggattcacttggattctgacggct

SEQ ID NO: 285373 - DNA, 1000 bp, Homo Sapiens
ccgtgatgaagatgccggaggacgagtcgaccccggaaaagaggactgagaaaatcttccgccaaatggacacaaacaacgacggcaagctgtccttggaggagttcatccgcggggccaaaagcgacccgtccatcgtgcgtctgctgcagtgcgaccccagcagcgcctcccagttctgagaggagccaggttccccttcctccctcccttcaccggccccctcccggctcttagcttccactcccttgtgtgtattctggctgggggccagattggggaagcccttctccccgggtctgccctgtggggggcttccggaaaagggaaccctgcggtacccccaggccaaagcaagtaagcggttagcaccccccaatcccagaggcaacaatagagacacaggctgggttggtctgcccctcagtcaggcccccttacccacccaccagccccaaggcccgacccctcccccaaaggggcagtccccttcttgcaggtctcagcttgcggggtggggggagtcatgcccaggggaggagactttttatctggaggggagagaaggattctaggggtgtggagttggagaaagaggcttccttgagccacccttcccaccccagcccttgctggtccctaggccaagccaccaagtgaaaccttccaggatactagcccgccagctgtgggccccagaaagccagcctgccttttagcacttggatacacacagacccacggagctctctgtgtttggcctctcacacacacacaggcccatagacagatgggcagatgcacccagagccccatgcacagtgtcctgcgtgggaaagagacacggtccccctggctgagcccctgtcctcccctctgtccccccaaccgccccccctgcatgcagccaaatggagcatctctgttctttttaataatttcagaataaagtctcatttcagtgcaaaaaaaaaaaaaaaaaaaaaaaaaaaaaaaaaaa

SEQ ID NO: 285374 - DNA, 1000 bp, Homo Sapiens; identical to SEQ ID NO: 115744

SEQ ID NO: 285375 - DNA, 1000 bp, Homo Sapiens; identical to SEQ ID NO: 221104

SEQ ID NO: 285376 - DNA, 1000 bp, Homo Sapiens; identical to SEQ ID NO: 115745

SEQ ID NO: 285377 - DNA, 1000 bp, Homo Sapiens; identical to SEQ ID NO: 115746

SEQ ID NO: 285378 - DNA, 1000 bp, Homo Sapiens; identical to SEQ ID NO: 115747

SEQ ID NO: 285379 - DNA, 1000 bp, Homo Sapiens; identical to SEQ ID NO: 221108

SEQ ID NO: 285380 - DNA, 1000 bp, Homo Sapiens
cctttgctgtctatgacaagttcagcgtgggagatgccaagactcgctacaagctgaaggtggaggggtacagtgggacagcaggtgactccatggcctaccacaatggcagatccttctccacctttgacaaggacacagattcagccatcaccaactgtgctctgtcctacaaaggggctttctggtacaggaactgtcaccgtgtcaacctgatggggagatatggggacaataaccacagtcagggcgttaactggttccactggaagggccacgaacactcaatccagtttgctgagatgaagctgagaccaagcaacttcagaaatcttgaaggcaggcgcaaacgggcataaattggagggaccactgggtgagagaggaataaggcggcccagagcgaggaaaggattttaccaaagcatcaatacaaccagcccaaccatcggtccacacctgggcatttggtgagaatcaaagctgaccatggatccctggggccaacggcaacagcatgggcctcacctcctctgtgatttctttctttgcaccaaagacatcagtctccaacatgtttctgttttgttgtttgattcagcaaaaatctcccagtgacaacatcgcaatagttttttacttctcttaggtggctctgggatgggagaggggtaggatgtacaggggtagtttgttttagaaccagccgtattttacatgaagctgtataattaattgtcattatttttgttagcaaagattaaatgtgtcattggaagccatccctttttttacatttcatacaacagaaaccagaaaagcaatactgtttccattttaaggatatgattaatattattaatataataatgatgatgatgatgatgaaaactaaggatttttcaagagatctttctttccaaaacatttctggacagtacctgattgtattttttttttaaataaaagcacaagtacttttgaaaaaaaaccggaattc

SEQ ID NO: 285381 - DNA, 1000 bp, Homo Sapiens; identical to SEQ ID NO: 221109

SEQ ID NO: 285382 - DNA, 993 bp, Homo Sapiens
attccacgttcttaactgttccattttccgtatctgcttcgggcttccacctcatttttttcgctttgcccattctgtttcagccagtcgccaagaatcatgaaagtcgccagtggcagcaccgccaccgccgccgcgggccccagctgcgcgctgaaggccggcaagacagcgagcggtgcgggcgaggtggtgcgctgtctgtctgagcagagcgtggccatctcgcgctgcgccgggggcgccggggcgcgcctgcctgccctgctggacgagcagcaggtaaacgtgctgctctacgacatgaacggctgttactcacgcctcaaggagctggtgcccaccctgccccagaaccgcaaggtgagcaaggtggagattctccagcacgtcatcgactacatcagggaccttcagttggagctgaactcggaatccgaagttggaacccccgggggccgagggctgccggtccgggctccgctcagcaccctcaacggcgagatcagcgccctgacggccgaggcggcatgcgttcctgcggacgatcgcatcttgtgtcgctgaagcgcctcccccagggaccggcggaccccagccatccagggggcaagaggaattacgtgctctgtgggtctcccccaacgcgcctcgccggatctgagggagaacaagaccgatcggcggccactgcgcccttaactgcatccagcctggggctgaggctgaggcactggcgaggagagggcgctcctctctgcacacctactagtcaccagagactttagggggtgggattccactcgtgtgtttctattttttgaaaagcagacattttaaaaaatggtcacgtttggtgcttctcagatttctgaggaaattgctttgtattgtatattacaatgatcaccgactgaaaatattgttttacaatagttctgtggggctgtttttttgttattaaacaaataatttagatggtgaaaaaaaaaa

SEQ ID NO: 285383 - DNA, 1000 bp, Homo Sapiens
gacctgcagatcgccctggactcgcatcccactattgtcagcctgcatcaccagagacccgggcagaaccaggcgtccaggacgccgctgaccaccctcaacacggatatcagcatcctgtccttgcaggcttctgaattcccttctgagttaatgtcaaatgacagcaaagcactgtgtggctgaataagcggtgttcatgatttcttttattctttgcacaacaacaacaacaacaaattcacggaatcttttaagtgctgaacttatttttcaaccatttcacaaggaggacaagttgaatggacctttttaaaaagaaaaaaaaaatggaaggaaaactaagaatgatcatcttcccagggtgttctcttacttggactgtgatattcgttatttatgaaaaagacttttaaatgccctttctgcagttggaaggttttctttatatactattcccaccatggggagcgaaaacgttaaaatcacaaggaattgcccaatctaagcagactttgccttttttcaaaggtggagcgtgaataccagaaggatccagtattcagtcacttaaatgaagtcttttggtcagaaattacctttttgacacaagcctactgaatgctgtgtatatatttatatataaatatatctatttgagtgaaaccttgtgaactctttaattagagttttcttgtatagtggcagagatgtctatttctgcattcaaaagtgtaatgatgtacttattcatgctaaactttttataaaagtttagttgtaaacttaacccttttatacaaaataaatcaagtgtgtttattgaatggtgattgcctgctttatttcagaggaccagtgctttgatttttattatgctatgttataactgaacccaaataaatacaagttcaaatttatgtagactgtataagattataataaaacatgtctgaagtcaaaaaaaaaaaaaaaaaaaaaaaaaaaaaaaaaaaaaaaa

SEQ ID NO: 285384 - DNA, 1000 bp, Homo Sapiens; identical to SEQ ID NO: 115749

SEQ ID NO: 285385 - DNA, 963 bp, Homo Sapiens
caaggttatccatctcaagtagcctagcaatatttgcaacatcccaatggccctgtccttttctttacttatggccgtgctggtgctcagctacaaatccatctgttctctgggctgtgatctgcctcagacccacagcctcggtaataggagggccttgatactcctgggacaaatgggaagaatctctcctttctcctgcctgaaggacagacatgatttccgaatcccccaggaggagtttgatggcaaccagttccagaaggctcaagccatctctgtcctccatgagatgatccagcagaccttcaatctcttcagcacagaggactcatctgctgcttgggaacagagcctcctagaaaaattttccactgaactttaccagcaactgaatgacctggaagcatgtgtgatacaggaggttggggtggaagagactcccctgatgaatgaggactccatcctggctgtgaggaaatacttccaaagaatcactctttatctaatagagaggaaatacagcccttgtgcctgggaggttgtcagagcagaaatcatgagatccctctcgttttcaacaaacttgcaaaaaagattaaggaggaaggattgaaaactggttcaacatggcaatgatcctgattgactaatacattatctcacactttcatgagttcttccatttcaaagactcacttctataaccacgacgcgttgaatcaaaattttcaaatgttttcagcagtgtaaagaagtgtcgtgtatacctgtgcaggcactagtcctttacagatgaccattctgatgtctctgttcatcttttgtttaaatatttatttaattatttttaaaatttatgtaatatcatgagtcgctttacattgtggttaatgtaacaatatatgttcttcatatttagccaatatattaatttcctttttcattaaatttttactatac

SEQ ID NO: 285386 - DNA, 1000 bp, Homo Sapiens
aaacagaataattcgtaatttaagaaagcccttatcccggtaacatgaatgttgatgaacaaatgtaaaattatatcctatatttaagtacccataataaatcatttccctctataagtgttattgattattttaaattgaaaaaagtttcacttggatgaaaaaagtagaaaagtaggtcattcttggatctacttttttttagccttattaatatttttccctattagaaaccacaattactccctctattaacccttcacttactagaccagaaaagaacttattccagataagctttgaatatcaattcttacataaactttaggcaaacagggaatagtctagtcaccaaaggaccattctcttgccaatgctgcattccttttgcacttttggattccatatttatcccaaatgctgttgggcacccctagaaataccttgatgttttttctatttatatgcctgcctttggtacttaattttacaaatgctgtaatataaagcatatcaagtttatgtgatacgtatcattgcaagagaatttgtttcaagatttttttttaatgttccagaagatggccaatagagaacattcaagggaaatggggaaacataatttagagaacaagaacaaaccatgtctcaaatttttttaaaaaaaattaatggttttaaatatatgctatagggacgttccatgcccaggttaacaaagaactgtgatatatagagtgtctaattacaaaatcatatacgatttatttaattctcttctgtattgtaacttagatgattcccaaggactctaataaaaaatcacttcattgtatttggaaacaaaaacatcattcattaattacttattttctttccataggttttaatattttgagagtgtcttttttatttcattcatgaacttttgtatttttcatttttcatttgatttgtaaatttacttatgttaaaaataaaccatttattttcagctttg

SEQ ID NO: 285387 - DNA, 1000 bp, Homo Sapiens; identical to SEQ ID NO: 115750

SEQ ID NO: 285388 - DNA, 1000 bp, Homo Sapiens
ttgcccagtggtcacctcacactcctccaaggcacaattttaattcaaaagatcaaatgtattcagatggcaatttcactgatgtaagtgttgtggaaatagaagcaaatgacaaaaagccttttccagaagatctgaaatcattggacctgttcaaaaaggaaaaaattaatactgaaggacacagcagtggtattggggggtcttcatgcatgtcatcttctaggccaagcatttctagcagtgatgaaaatgaatcttcacaaaacacttcgagcactgtccagtattctaccgtggtacacagtggctacagacaccaagttccgtcagtccaagtcttctcaagatccgagtctacccagcccttgttagattcagaggagcggccagaagatctacaattagtagatcatgtagatggcggtgatggtattttgcccaggcaacagtacttcaaacagaactgcagtcagcatgaatccagtccagatatttcacattttgaaaggtcaaagcaagtttcatcagtcaatgaggaagattttgttagacttaaacagcagatttcagatcatatttcacaatcctgtggatctgggcaaatgaaaatgtttcaggaagtttctgcagcagatgcttttggtccaggtactgagggacaagtagaaagatttgaaacagttggcatggaggctgcgactgatgaaggcatgcctaaaagttacttaccacagactgtacggcaaggcggctacatgcctcagtgaaggactagtagttcctgctacaacttcagcagtacctataaagtaaagctaaaatgattttatctgtgaattcagattttaaaaagtcttcactctctgaagatgatcatttgcccttaaggacaaaaatgaactgaagtttcacatgagctatttccattccagaatatctgggattctactttaagcactacataaactgactttatcctcagaaaaaaaaaaaaaaa

SEQ ID NO: 285389 - DNA, 1000 bp, Homo Sapiens; identical to SEQ ID NO: 221111

SEQ ID NO: 285390 - DNA, 1000 bp, Homo Sapiens
tttcatactcttatgacctgatccatcaggatcagtccctattatgcaaaatgtgaatttaattttatttgtactgacaacttttcaagcaaggctgcaagtacatcagttttatgacaatcaggaagaatgcagtgttctgataccagtgccatcatacacttgtgatggatgggaacgcaagagatacttacatggaaacctgacaatgcaaacctgttgagaagatccaggagaacaagatgctagttcccatgtctgtgaagacttcctggagatggtgttgataaagcaatttagggccacttacacttctaagcaagtttaatctttggatgcctgaattttaaaagggctagaaaaaaatgattgaccagcctgggaaacataacaagaccccgtctctacaaaaaaaatttaaaattagccaggcgtggtggctcatgcttgtggtcccagctgttcaggaggatgaggcaggaggatctcttgagcccaggaggtcaaggctatggtgagccgtgattgtgccactgcataccagcctaggtgacagaatgagaccctgtctcaaaaaaaaaaatgattgaaattaaaattcagctttagcttccatggcagtcctcacccccacctctctaaaagacacaggaggatgacacagaaacaccgtaagtgtctggaaggcaaaaagatcttaagattcaagagagaggacaagtagttatggctaaggacatgaaattgtcagaatggcaggtggcttcttaacagccctgtgagaagcagacagatgcaaagaaaatctggaatccctttctcattagcatgaatgaacctgatacacaattatgaccagaaaatatggctccatgaaggtgctacttttaagtaatgtatgtgcgctctgtaaagtgattacatttgtttcctgtttgtttatttatttatttatttttgcattctgaggctgaactaataaaaactcttctttgtaatc

SEQ ID NO: 285391 - DNA, 1000 bp, Homo Sapiens; identical to SEQ ID NO: 224335

SEQ ID NO: 285392 - DNA, 1000 bp, Homo Sapiens
taccaggcctgctctgcctggctcgatgtctgcttcttcccagcctgggatccttcgtgcttcaaggcctggggagcctgtccttccatgcccttgtcgagggaaagagacccagaaaggacacaacccgtcagagacctgggagcaggggcaatgaccgtttgactgtttgtggcttgggcctctgacatgacttatgtgtgtgtgtgtttttggggtggggagggagggagagaagagggggctaaatttgatgctttaactgatctccaacagttgacaggtcatccttgccagttgtataactgaaaaaggacttttctaccaggtatgaccttttaagtgaaaatctgaattgttctaaatggaaagaaaaaaagttgcaatctgtgcccttcattggggacattcctctaggactggtttggggacgggtgggaatgacccctaggcaaggggatgagaccgcaggaggaaatggcggggaggtggcattcttgaactgctgaggatggggggtgtcccctcagcggaggccaagggaggggagcagcctagttggtcttggagagatggggaaggctttcagctgatttgcagaagttgcccatgtgggcccaaccatcagggctggccgtggacgtggcccctgcccactcacctgcccgcctgcccgcccgcccgcatagcacttgcagacctgcctgaacgcacatgacatagcacttgccgatctgcgtgtgcccagaagtggcccttggccgagcgccgaactcgctcgccctctagatgtccaagtgccacgtgaactatgcaatttaaagggttgacccacactagacgaaactggactcgtacgactctttttatattttttatacttgaaatgaaatcctttgcttcttttttaagcgaatgattgcttttaatgtttgcactgatttagttgcatgattagtcagaaactgccatttgaaaaaaaagttatttttatagcagc

SEQ ID NO: 285393 - DNA, 1000 bp, Homo Sapiens; identical to SEQ ID NO: 115752

SEQ ID NO: 285394 - DNA, 1000 bp, Homo Sapiens
ttaagcctctgactctccgcggtggttgttggggcttcttggctttgttttgttgtttgtttgtattttatttttttctctctgacacctattttagacaaatctaagggaaaaagccttgacaatagaacattgattgctgtgtccaactccagtacctggagcttctctttaactcaggactccagcccattggtagacgtgtgtttctagagcctgctggatctcccagggctactcactcaagttcaaggaccaacaagggcagtggaggtgctgcattgcctgcggtcaaggccagcaaggtggagtggatgcctcagaacggacgagataatgtgaactagctggaattttttattcttgtgaatatgtacataggcagcactagcgacattgcagtctgcttctgcaccttatcttaaagcacttacagataggccttcttgtgatcttgctctatctcacagcacactcagcacccccttctctgcccattccccagcctctcttcctatcccatcccatcccatcccatcccatcccatcccatcccgctcttttcctacttttccttccctcaaagcttccattccacatccggaggagaagaaggaaatgaatttctctacagatgtcccattttcagactgctttaaaaaaaatccttctaatctgctatgcttgaatgccacgcggtacaaaggaaaaagtatcatggaaatattatgcaaattcccagatttgaagacaaaaatactctaattctaaccagagcaagcttttttattttttatacaggggaatattttattcaaggtaaaattctaaataaaatataattgttttttatcttttctacagcaaatttataattttaagattccttttcttgtttatcagcagttgttattacatccttgtggcacatttttttttaattttgtaaaggtgaaaaaagcttttatgagctcatctagcaatcagattttcctgtgga

SEQ ID NO: 285395 - DNA, 1000 bp, Homo Sapiens; identical to SEQ ID NO: 115754

SEQ ID NO: 285396 - DNA, 1000 bp, Homo Sapiens; identical to SEQ ID NO: 115755

SEQ ID NO: 285397 - DNA, 1000 bp, Homo Sapiens; identical to SEQ ID NO: 221115

SEQ ID NO: 285398 - DNA, 1000 bp, Homo Sapiens; identical to SEQ ID NO: 221116

SEQ ID NO: 285399 - DNA, 1000 bp, Homo Sapiens
accctcgtggccttccccagcctcttctagagccgtgatgcctccctgttgaagctctggtgacaccagcctttctcccaggccaggctccttcctgtcttcctgcattcacccagacagctccctctgcctgaaccttccatctcgcccacccctccttccttgaccagcagatcccagctcacgtcacacacttggttgggtcctcacatctttcacacttccaccaccctgcactactccctcaaagcacacgtcatgtttcttcatccggcagcctggatgttttttccctgtttaatgattgacgtacttagcagctatctctcagtgaactgtgagggtaaaggctatacttgtcttgttcaccttgggatgacgccgcatgatatgtcagggcgtgggacatctagtaggtgcttgacataatttcactgaattaatgacagagccagtgggaagatacagaaaaagagggccggggctgggcgcggtggttcacgcctgtaatcccagcactttgggaggccaaggagggtggatcacctgaggtcaggagttagaggccagcctggcgaaaccccatctctactaaaaatacaaaatccaggcgtggtggcacacacctgtagtcccagctactcaggaggttgaggtaggagaattgcttgaacctgggaggtggaggttgcagtgagccaagattgcgccattgcactccagcctgggcaacacagcgagactccgtctcaaggaaaaaataaaaataaaaagcgggcacgggcccggacatccccacccttggaggctgtcttctcaggctctgccctgccctagctccacaccctctcccaggacccatcacgcctgtgcagtggcccccacagaaagactgagctcaaggtgggaaccacgtctgctaacttggagccccagtgccaagcacagtgcctgcatgtatttatccaataaatgtgaaattctgtccaaaaaaaaaaaa

SEQ ID NO: 285400 - DNA, 1000 bp, Homo Sapiens; identical to SEQ ID NO: 115756

SEQ ID NO: 285401 - DNA, 1000 bp, Homo Sapiens; identical to SEQ ID NO: 115758

SEQ ID NO: 285402 - DNA, 1000 bp, Homo Sapiens; identical to SEQ ID NO: 221118

SEQ ID NO: 285403 - DNA, 1000 bp, Homo Sapiens; identical to SEQ ID NO: 221119

SEQ ID NO: 285404 - DNA, 1000 bp, Homo Sapiens
gtggtgaccaagcctgaggacaacgaggatgagagggccattgccgacaagcctggggaagatgcagaagccacaccggtgagccccgccatgtcctacctgaccagctaccagcctcctcaaaacccctactactatgtggacggggatccccacttcatcatccaaattccggagaaagacgatgccctctgcttcaacatcgatgaagccccaggcacagtgctgcgccttattcaggatgcagtcacaggcctcacagttaatgggcagatcactggcgacaagagaggcagccctgactccaagaccagaaagacttactttggaaaactgggcatcgccaatgctcagatggacttccaggtggaggtgacaacggagaagatcaccctgtggaacagggccgtgccgagcactttcagctggctggacacagtcacagtcacgcaggatgggctgtccatgatgatcaacaggaagaacatggtggtctcctttggagatggggttaccttcgtggtcgtcctacaccaggtgtggaagaaacatcctgtccaccgtgactttctaggcttctacgtggtggacagtcaccggatgtcagcacagacgcatgggctgctggggcaattcttccaaccctttgactttaaagtgtctgacatccggccaggctctgaccccacaaagccagatgccacattggtggtgaagaaccatcagctgattgtcaccaggggctcccagaaagactacagaaaggatgccagcatcggcacgaaggttgtctgctggttcgtccacaacaacggagaagggctgattgatggtgtccacactgactacattgtccccaacctgttttgagtagacacaccagctcctgttgggatggatggcccggattttatggcatctggaacatgggcacagagaggggcctgtgggaggggctgggaaaataaagtccaaggtcgagaccagaaaaaaaaaaaaa

SEQ ID NO: 285405 - DNA, 1000 bp, Homo Sapiens
gtaattagaattgttggcatgatgacatttcatttgtgccaaaaatattaaaaatgccttttttggaaggactaacagaaagcacctgatttgcacttgaaccagattatagatttaaaagtatatgacatgtattttgtatttaaaactagaatagccagtatttatgttttttataaaactgtgcaatacgaattatgcaatcacaatacatttgtagctcccgagtgtcctaaagggagtgcacttctttgaagctggtgtgttaatactatgtaataaatggttaactttcaaatgatgctgctgccaaaattatattaatagtgagtttcaggcccctgggcattttgtaccatgtaattatcctctggtgatgctgtttctcgttagtggcagtagtgcctccgtctcctagtgataatgctccaagtctatgaactgttaaatcagcattcattttaagaaaagcaactttagtttcaaagatacttttaagcttctaaattgatcatttaaactatttctttaaataagagagccaaattagaggctcatactttagcttgtgaagaagataatgaattttttaaagggaactttctatgcaatgttcaggataaatcgatactgctggccaatcagtgtcatctcctgggtaaattttgatgtcgcattataaagacatgcataattgatggtttctagattatctagtccaaacaatagagtttattttttcttcatctgaaccaacatgctacagtagctaagaagtattaaaactatatacatccatataaagatgaaatatgaactatctcattagaagtcatagttgaccacagacatgttattcttctgaaagagccacattttggttttatttcttgtcacatgatttcttttcttgatggatgaaaaatatgaaatgaaatcttttatatctgttgcctagttttgtacatggatctcattttacaagagaatctctctgcta

SEQ ID NO: 285406 - DNA, 1000 bp, Homo Sapiens; identical to SEQ ID NO: 221120

SEQ ID NO: 285407 - DNA, 1000 bp, Homo Sapiens; identical to SEQ ID NO: 115759

SEQ ID NO: 285408 - DNA, 1000 bp, Homo Sapiens; identical to SEQ ID NO: 221121

SEQ ID NO: 285409 - DNA, 1000 bp, Homo Sapiens; identical to SEQ ID NO: 115760

SEQ ID NO: 285410 - DNA, 1000 bp, Homo Sapiens
aggcctttcttccgagccatcatgagagacattaataagcttgaagagcagaatccagatattgtttccagaaaaaaaaaccagccaactgaagtggaccccacacattttgagaagcgcttcctaaagaggatccgtgacttgggagagggccactttgggaaggttgagctctgcaggtatgaccccgaagacaatacaggggagcaggtggctgttaaatctctgaagcctgagagtggaggtaaccacatagctgatctgaaaaaggaaatcgagatcttaaggaacctctatcatgagaacattgtgaagtacaaaggaatctgcacagaagacggaggaaatggtattaagctcatcatggaatttctgccttcgggaagccttaaggaatatcttccaaagaataagaacaaaataaacctcaaacagcagctaaaatatgccgttcagatttgtaaggggatggactatttgggttctcggcaatacgttcaccgggacttggcagcaagaaatgtccttgttgagagtgaacaccaagtgaaaattggagacttcggtttaaccaaagcaattgaaaccgataaggagtattacaccgtcaaggatgaccgggacagccctgtgttttggtatgctccagaatgtttaatgcaatctaaattttatattgcctctgacgtctggtcttttggagtcactctgcatgagctgctgacttactgtgattcagattctagtcccatggctttgttcctgaaaatgataggcccaacccatggccagatgacagtcacaagacttgtgaatacgttaaaagaaggaaaacgcctgccgtgcccacctaactgtccagatgaggtttatcagcttatgagaaaatgctgggaattccaaccatccaatcggacaagctttcagaaccttattgaaggatttgaagcacttttaaaataagaagcatgaataacatttaaattccacagattatcaa

SEQ ID NO: 285411 - DNA, 1000 bp, Homo Sapiens; identical to SEQ ID NO: 115761

SEQ ID NO: 285412 - DNA, 1000 bp, Homo Sapiens
gcagctactccccagcctctgcgtcctcgggaggcgccggggctgccgtcgggaccgggagctcgtacccgacgaccaccatcagctacctcccacacgcgccgcccttcgccggtggccacccggcgcagctgggcttgggccgcggcgcctccaccttcaaggaggaaccgcagaccgtgccggaggcgcgcagccgggacgccacgccgccggtgtcccccatcaacatggaagaccaagagcgcatcaaagtggagcgcaagcggctgcggaaccggctggcggccaccaagtgccggaagcggaagctggagcgcatcgcgcgcctggaggacaaggtgaagacgctcaaggccgagaacgcggggctgtcgagtaccgccggcctcctccgggagcaggtggcccagctcaaacagaaggtcatgacccacgtcagcaacggctgtcagctgctgcttggggtcaagggacacgccttctgaacgtcccctgcccctttacggacaccccctcgcttggacggctgggcacacgcctcccactggggtccagggagcaggcggtgggcacccaccctgggacctaggggcgccgcaaaccacactggactccggccctcctaccctgcgcccagtccttccacctcgacgtttacaagcccccccttccacttttttttgtatgttttttttctgctggaaacagactcgattcatattgaatataatatatttgtgtatttaacagggaggggaagagggggcgatcgcggcggagctggccccgccgcctggtactcaagcccgcggggacattgggaaggggacccccgccccctgccctcccctctctgcaccgtactgtggaaaagaaacacgcacttagtctctaaagagtttattttaagacgtgtttgtgtttgtgtgtgtttgttctttttattgaatctatttaagtaaaaaaaaaattggttctttaaaaaaaaaaaaaaaaa

SEQ ID NO: 285413 - DNA, 1000 bp, Homo Sapiens
ttccccaagcacggtgtgccctggcctgccttcttcttgtgtctttggtggggatggggaggcctattcctgctggccccttctgggggtggtgggcaggtgacacggagtggcttgagcttctggggatgcaggtccaccgagcccctgacccctgtctgtccccgctcccctaacaggtgcggttcctcatctgagaggctctccgtgcaggcgatggggcaagacagaaaagtgcctgagctggggaagccggggtgtaacttcctgctgcaccctgcgcctccagaggtcctccgtagggtctttcttgggatagtgttctgctcctgcttttctgtcctgggcatgggtccagggcctgacaccccctccccgcccctgtggccctggccactaaagcttcagactcaagtacccattctgttttcccccagcaacgcccctccaaacctccagcctccctgtctccagctgcctgggcccggaagggctttggttccttctctgggtctgattttctcactgaactccaccgaccaactgccctaagcccccagggcctccagggcccaggttcgagacccaaacccccaaaatccaaaacttctcttgaaaagttcagggaccgtccaggggagatggggaggagatatggagtgagtcacctgctccagaagatgccagcttctctctccagggtgcttagttggctttgcccacccctcactccccagggagctccggggacagcttcctcacacccctgtcccacccacacagctgccctagctgaccccgagaagtgctcttggctgacccctctggtgtgtggtgaggggctttctcttccccttcctgtttcagacccccccatttcccgcacatggtgtggggggctgggggaggtccaagcagagtgttttattattatcgctttatgtttttggttattggtttttttgtatagaccaaagcaaagaaaataaaaataacacag

SEQ ID NO: 285414 - DNA, 1000 bp, Homo Sapiens
cggggctggacagaggagtccagcggaaggtcagcgggagcaggggatccttctgcaaggctggggggaccctggagaatgcagacagtgcccgaaggggcagctgccccctagagaagtgtaacgtcaaggccaagagcaacgtggacttgcggaggtccctttatgccctctgcctggacaccagccgggaaacagatttgtgaaaggagattcaggcagactggtggcagtggagtagggaatgggaggcttgctgaacatggatatctacattataccgcagagtatttgaagtcacactgtaacctcagtctacccctctcctttcactcctttcctccctccctcgatccccccattttctctattctttccatgacacccaagggtcgcctatttttaaaaagtaccacattccatgacgcaggagctgtggaaatggtgagcgctgtgagatggatgtatttgtagccagtctcctatacccagcagagggataacccaaacaaaaatgactctaaatagcccagatcccaagagattatgtaactcctccatccatgtgttccaaatttgctttacatatgattgtatttgtgtataggggaaaatattatttttatgcctggtaagtggctttttgtactgtagttcagatagagatattttgggtatattttcaagatacatgttgtatttatggaagaaagagttgtcctgatgtttttctgtgttacttatattagagtcagagatcttggtatgggctgttctgtttcctgtgtctccaagcctctgtcttttctgggatgtggtattggtgctttgtgtctagggcagagtatgttcttgaagaaaggcaaatctgactttttctgtgcgccttaaacaattcttgtaactttcttcaaaaagcattttaatgatattggaggaatacttctgataatttattgtctttatttttatcccaggaaataaaaggttaccttgttga

SEQ ID NO: 285415 - DNA, 1000 bp, Homo Sapiens
tgtgcaagtgccttcctgagcagaagaactggagaaagggaaccacagagccaggaggaatgtctgagcagagtcaagcaactggcttgaccacagtctgaagcaaggtgccacttaaacagatactgttttctcaaaggggcagaggaatcgtgttgcagatggcagccttttctccttcattttccccacattttctctggccctctaccttgcttcctgggagtttgatttaggattgctgttgaaggcttcctcaggcaaactccagcttaaagccctagacaggtaaaagcacacattggatggcagcatgggtttcttcccattttatgggcatgaaatatgtggtttagaataaggaacaagcattattcctttgccaacagcctcactctaagaggcttttttgctgagtcaagcaaacacttgcctgctctgccccttggagctgcatttgacctgctctcactggtaaggtgacttggtggcgttcccacttgatttagccattttcttccattgtgagaccactgccatctatccacctgcccacctccccttttgtttctcagtaacattgccatttgttttttgcctttgataaactgtgatgtactgttctgagatcttttgggtgcagttctgaaactgaaaggactgttaacatgtttttaattttatatctatgctttcagactctttgatgataattttttttttaaaaattattctctcgaagagcaacttacgagaggacagccttatgagggtttgcttgagaggcagtgtggcttctgtgactgccagctctaaatctcgatcttgccataactttacagggtaacttgggtccacagtcactctttgtgcctcagtttacccacccattaaatgggaacattactgtcttcccctccctacctcatggggaatgtctgggaagctggggacattgctatgcaaatgtgtgaatcttagtcatggatttgatttttag

SEQ ID NO: 285416 - DNA, 1000 bp, Homo Sapiens
cctactacatcacgctgctggtggacggcgccgccgcaggccgtcgcaagcccggcgcgggcaacagctacctggacaaggtggggctggtgctgcgcgtgctgcgggcgctgcgcatcctgtacgtgatgcgcctggcgcgccactccctggggctgcagacgctggggctcacggcccgccgctgcacccgcgagttcgggctcctgctgctcttcctctgcgtggccatcgccctcttcgcgcccctgctctacgtcatcgagaacgagatggccgacagccccgagttcaccagcatccctgcctgctactggtgggctgtcatcaccatgacgacggtgggctatggcgacatggtccccaggagcaccccgggccaggtagtggccctgagcagcatcctgagcggcatcctgctcatggccttcccagtcacctccatcttccacaccttctcccgctcctacctggagctcaagcaggagcaagagagggtgatgttccggagggcgcagttcctcatcaaaaccaagtcgcagctgagcgtgtcccaggacagtgacatcttgttcggaagtgcctcctcggacaccagagacaataactgagcgcggaggacacgcctgccctgcctgccatctgtggcccgaagccattgccatccactgcagacgcctggagagggacaggccgcttccgagtgcagtcctggcgcagcaccgactcccacgcacccggggaaggacaccctcactcccacaccccgggaagaacactagaacatcagcagaggggccctgcccctccgcctgcagccgtgaaaggaagctgggtcatcagcccagccccgcccaccccagcccctatgtgtgtttccctcaataaggagatgccttgttcttttcaccatgcaaataacatgcccagcaaaaacttgctttatgggtctgcctggagaaaaaaaaaaaaaatacaaacagcagaaacagcaaaaaaa

SEQ ID NO: 285417 - DNA, 1000 bp, Homo Sapiens
aaggaagttattaacgggcatgtattatcacatcaagcatgcaataatgtgcaaattttgcatttagttttatggcatgatttatatatggcatatttatattgtatattctggaaaaaaaatatatatatatatttaaaggggagatactctccctgacatttctaacatatgtattaagccaaacatgagtgaatagctttcagggcgataaaactaaatatatgtctgtgtgtgtgtgtgtatgtatacacacatatacatatatatatacacatacatacacatacatacatacatacatatatatctgataaaattgtgatgttttgttcaaagttgtagttcttgtgcatgtttactttattagagtaggaaggctactggcattaattattaataccaaatattttagccttaaatttttgtcattttaaaatctgatttaatgttttctgctgtttaaggtcttgggaggctttcaattgtattttatatgagagaatcacacaagtttgtgctatctatggccctgcaaaaatataaccattacatgtttaaattgtaaattttagagcataccagtactcagtatagcattgaacatttcttatgatttttaaaagttgctagtactggggagaaataattgttgattaatttgagaattattcctttcctagactaattaaaatctggaaatctgttttgtatatgatctaatacaaagatgagctctgaacaaacactgaatcatgttaatagacagtagccaagttatattgaatatatcagaatctgtgtgaagttacacaattaattgtccctgtttcaaactgagtaaattggaaacattttctttctttttctggaaattttgtccattttaaaaaccaatcattttaagaagacatgacaatgcaatgaaacagatgataaatatttatgcttaaaatatgtatgtctaattgagtctcttttttattctgttttcttgttt

SEQ ID NO: 285418 - DNA, 1000 bp, Homo Sapiens
atgacatgccaagctcgaagctcctacatcaccagtgagatcctgtggggttaccggttcacacctgtcctgaccctggaggacgggttctacgaagttgactacaacagcttccatgagacctatgagaccagcaccccatcccttagtgccaaagagctggccgagttagccagcagggcagagctgcccctgagttggtctgtatccagcaaactcaaccaacatgcagaactggagactgaagaggaagaaaagaacctcgaagagcaaacagaaagaaatggtgatgtggcaaacctggagaatgaatccaaagtttagtgccctagctgggcaaacccttctcttctccccccaacacaatctttccttgtctctcattctctttctttttctgtctctcttgctttgttctttatttgtttatatttaatttttacatgaccagaaaacaaatcttcaaggtgtaaaatatctacctgccctctctcagttattcagattgacaaggtagacatggatttgatgaaagtgcaaagtgccctcatttgtggcccaagcctggtctcctcccaaaatactacacatccaactcctggagatttcagttacttacctgcatgtgttgtacaataccagatcactcaaaaaggtgtgtcaaagattttacctgggatatgacaagcaaggtttctggtgcctatttattcattcagtgagacacagagtggagccctcagttttatggatcccaattcatttcatctactacagggtgaggtgcttgcccccatgtgggtgtggcagttacagggcccaggtgagctgaagacaaaccactgtacatatatatgccttatgtaattattttctttttgtaattagtaataaaacccagcatgtacaaaagtaccatagaacagaactgctaaatactgtacatagatgtatcattaatgtaggtttagatatataactttagaaataagaagcaaaa

SEQ ID NO: 285419 - DNA, 1000 bp, Homo Sapiens
ggtgattcatctaaatgacttctagcaacctaagtaaagacattcccctcctatgtatgattcatttgatcatataaaacatcatgatggctctaattcataaatacaaaaatatatttaagtctttatagatataaagctttacttagatataacttgagtgagtagggaaaaaaatctacagtagataaagcaaaagataattaggcaacaaagcattttcaaactcaaattcctgtttccaacttcaaatagttttttctataaacacaaaatcagtgtttattcaccagtaggaggttggactagatgaactctattatttctttctaaatctaatagtctataaaaattatgtttcctctgttttttattttatctatgctaaaatgagccctttcccttatgtccagtttaagatgatcatttgcatgattttcatttcaataaaaaaaagagaaactgtccttaaaacaaaacaaaaaccaaaaaagtcaccctatcaggtttcaaacagatttgtggctgttcttttctgaaatttcccttattcaggtttctgtgggaaaaatgaaagattaaccttccccactggtgatgacctaggcaggaatcatctcttgaaataaatactagctgagtaaaggcaagcaggtgtgaagagcagggctcagcagcaagtcacatttttctactatttgaccaaaaggaaaagaaaataaagaagaactctggagtggtctaagactgataatagcagaagaatatcaagaacacagaaacttaattattgtgaacttttgctgtttgaaaatcttagacattcattcttaagtagaaatcagaccaacagattttcccaacccaagactattgtaacacataaagacagcaagaattcttatttctataataaattaacaagattcacctaacctttgaaaataaagtagtattgaagacttaaaaaaaaaaaaaaaaaaaataaaaaaaaaaaaaa

SEQ ID NO: 285420 - DNA, 1000 bp, Homo Sapiens
taaaacatgctctttttgttcaagcaggaaaaatattatatctaattatgtctatgtggtaatacctaaaaagaggtagagagactctatgttcacaaaatatagtaatttcatttttacctttcttcagtggactgaattgtatggaaggaaattgatcagatctgtaattcacaactgtggaaacctacacaaatggggctgatgccattgtttcctctattttattttatttatttttgaatccactatctctttccattcaaaatatttccattcaaaatgtggttcacagacccgccacatcagcaccatccgagagcttattagtaatgtgtagattctcatgtcccagccagacttacagaattggggtctgtatcttaacaagaaccccagatgatttgtgtacaaatgaaagttcgaaagctgtgctctggacagtgttctcaaagcaactttctgaagccgtgtggaaaactgactctgtgtgggtcccgtatccctgtggcatccagacctggcctctcttcatttcattattattggccaatatttctttcagccatttcatttcttatctattaaaatggcttgcccataaaggaactgcataggattatcccctgacattccaagagcaaaataaagctcttgagagtaattgttgtctcagtcatgcttgctgattacagttagcacaaaagaaaaattcagctgcctgacaatacaggaaatgttctcagatgctgatgtttgtaaggtccggtggggccatgaggaagaagaggagctgaaggtaagaaactcataaacaagatgactctttgatgcatgaacaagatttgaaaatctcaagcctgtaaagaatacccctgctatttaaataaagctcataccaagaggtaacattttgccccgggccaaattcaggggtctagtgccctgcattcctttgaggcaaaaaataaatgggctatgactggttaaatgtccaaaa

SEQ ID NO: 285421 - DNA, 1000 bp, Homo Sapiens; identical to SEQ ID NO: 115762

SEQ ID NO: 285422 - DNA, 1000 bp, Homo Sapiens
ctttgaaaatctaagaagctcccagtcctcagagaccctgctggtaccacaccccaccttcggaggggacttcatgttccgtgtacgtttgcatctctatttatacctctgtcctgctaggtctcccaccttcccttggttccaaaagccagggtgtctatgtccaagtcacccctactcagccccactccccttcctcatccccagctgtgtctcccaacctcccttcgtgttgttttgcatggctttgcagttatggagaaagtggaaacccagcagtccctaaagctggtccccagaaagcaggacagaaagaaggagggacaggcaggcagcaggaggggcgagctgggaggcaggaggcagcggcctgtcagtctgcagaatggtcgcactggaggttcaagctaactggcctccagccacattctcatagcaggtaggacttcagccttccagacactgcccttagaatctggaacagaagacttcagactcaccataattgctgataattacccactcttaaatttgtcgagtgatttttagcctctgaaaactctatgctggccactgattcctttgagtctcacaaaaccctacttaggtcatcagggcaggagttctcactcccattttacagatgagaatactgaggcctggacaggtgaagtgaccagagagcaaaaggcaaaggggtgggggctgggtgcagtggctcacacctgtattcccaacacttttggaggctgaggttggaggattgcttgagcccaggaattcgagaccagcctaggtgacatagtgagaccccatctctacaaaaaataaaaaattaaccaggtgtggtggcacgtgcctgggagtcccagcgacttgggaggctgaggtgggaggattgtttgagcctgggaggtcgaggctgtagtgagccctgattgcaccactgtactccagcctgggtgacagggcaagaccctgtctcaaaaaaaaaaaaaaa

SEQ ID NO: 285423 - DNA, 1000 bp, Homo Sapiens
ggtatagttatttttttcttcttttgttttctttcttttttaacacttagtaagcatgagaggagaggtagaaaaatacccttttttcaacatatagttgtcagatgctttgtgcatgcaaatcatgctttaggcagtgcggtatttcttaaaaactggccaattcaccataaccaatttcccttatggatggactaggctggtatatacatatttgaaaagttttacttcaaagaattccatcgaatagaataggggtaaaagggaggaggaaaacatgtcacagctgtaccatctctaaaaaggtgtttttatggtgaatgttttggatttagattttggatcccccgtcccctcaagcatgatagttttggatatttgcttgctgtgtgaattgacaagcacttttactgacaaatggtgaggctcagtcagaacctccaccctcccccacaccaaagacaggggcagcgtagtattcaaaccagtattgtggtggggaataattgtatacatgtaaattatcaagccctatgagtggaagaattttttcaaattatttttgtccctctatatattgatttatattatgtataactatctctttatataaactatatataattatatatatataactatataattatatatatataactatatatataactatatatatgtatcccctagtattggatcatgaagagctcttcatgcattctttgcaaaggaggttataaagttacgccctcagaacatttataactataagaatgtgccagttaaagtgctcaacaggaaatatgacagtttaaaagcattgtaaaactcacatagcttacttctctctctaaagtgcaacaaggatgaatagaatgggccaaggtatgacaattaatggttctgcatgacctagccactgctgggggttttcttctataacgttgtccttgtgaaaacttttgtgaaattaaaaaaaaaggagttacaaatttta

SEQ ID NO: 285424 - DNA, 1000 bp, Homo Sapiens
atgaagttgggcttctgcttctcttcctctctgtgggcatttccattttctctgtgcttatctactccgtggagaaagatgaccacacatccagcctcaccagcatccccatctgctggtggtgggccaccatcagcatgacaactgtgggctatggagacacccacccggtcaccttggcgggaaagctcatcgccagcacatgcatcatctgtggcatcttggtggtggcccttcccatcaccatcatcttcaacaagttttccaagtactaccagaagcaaaaggacattgatgtggaccagtgcagtgaggatgcaccagagaagtgtcatgagctaccttactttaacattagggatatatatgcacagcggatgcacaccttcattaccagtctctcttctgtaggcattgtggtgagcgatcctgactccacagatgcttcaagcattgaagacaatgaggacatttgtaacaccacctccttggagaattgcacagcaaaatgagcgggggtgtttgtgcctgtttctcttatcctttcccgacattaggttaacacagctttataaacctcagtgggttcgttaaaatcatttaattctcagggtgtacctttcagccatagttggacattcattgctgaattctgaaatgatagaattgtctttatttttctctgtgaggtcaattaaatgccttgttctgaaatttattttttacaagagagagttgtgatatagtttggaatataagataaatggtattgggtggggtttgtggctacagcttatgcatcattctgtgtttgtcatttactcacattgagctaactttaaattactgacaagtagaatcaaaggtgcagctgactgagacgacatgcatgtaagatccacaaaatgagacaatgcatgtaaatccatgctcatgttctaaacatggaaactaggagcctaataaacttcctaattcagtatggaaaaaaaaaaaaaaa

SEQ ID NO: 285425 - DNA, 1000 bp, Homo Sapiens; identical to SEQ ID NO: 221123

SEQ ID NO: 285426 - DNA, 1000 bp, Homo Sapiens; identical to SEQ ID NO: 221124

SEQ ID NO: 285427 - DNA, 874 bp, Homo Sapiens
agttcctccacctgctggcccctggacacctctgtcaccatgtggttcctggttctgtgcctcgccctgtccctgggggggactggtgctgcgcccccgattcagtcccggattgtgggaggctgggagtgtgagcagcattcccagccctggcaggcggctctgtaccatttcagcactttccagtgtgggggcatcctggtgcaccgccagtgggtgctcacagctgctcattgcatcagcgacaattaccagctctggctgggtcgccacaacttgtttgacgacgaaaacacagcccagtttgttcatgtcagtgagagcttcccacaccctggcttcaacatgagcctcctggagaaccacacccgccaagcagacgaggactacagccacgacctcatgctgctccgcctgacagagcctgctgataccatcacagatgctgtgaaggtcgtggagttgcccaccgaggaacccgaagtggggagcacctgtttggcttccggctggggcagcatcgaaccagagaatttctcatttccagatgatctccagtgtgtggacctcaaaatcctgcctaatgatgagtgcaaaaaagcccacgtccagaaggtgacagacttcatgctgtgtgtcggacacctggaaggtggcaaagacacctgtgtgggtgattcagggggcccgctgatgtgtgatggtgtgctccaaggtgtcacatcatggggctacgtcccttgtggcacccccaataagccttctgtcgccgtcagagtgctgtcttatgtgaagtggatcgaggacaccatagcggagaactcctgaacgcccagccctgtcccctacccccagtaaaatcaaatgtgcatcc

SEQ ID NO: 285428 - DNA, 1000 bp, Homo Sapiens; identical to SEQ ID NO: 116801

SEQ ID NO: 285429 - DNA, 1000 bp, Homo Sapiens; identical to SEQ ID NO: 115764

SEQ ID NO: 285430 - DNA, 1000 bp, Homo Sapiens
ttatccattggggggtgtatttactgtgatgaagatgagacagatgccatcagagctttgtgaatcagctggggtgttttcactgataaacaacacatagcaggtgtgcattcattacaaatatatgtatctgccaaggtggagccactttaaagagtgagttttgtcttgtatctaaagtggatacaagcgtatgtttaaactgcaagatttttacttgctagagaatctgttttaatatagtggtttggcctctgattatttataggttttataaattttagaatcaatttctctttaaggtggctcagatttttcaactcttgtgcacataaaattgagttgaagttcattgtgcctttttttctttatccaaattttgagttaaagcttcatatggtaactgcatcctgttcggacactatagtctaaatttttgaaactgtgtggtgttcgctaaaagtaggaataacaacgtaaaagctaattaaggtcacaaacttcggtgaaacccttaaaagtccaaatcttcttgatattgtgaaccgtaccccttccagtttagtttcttctggactttccttacttaactgacagttaccttttaaaatttgcacacattatgattaaaattgggcctctactgtgatgattcctatttcctctcatgttttaaagtgcaaactaacatttaagtgaacattagcatcaagtagtgcagacacttgtatgcatttccttgattcaatttgtgaccttaccagttttgaattggaattgcaccatttcgtagataaaggaaactaagtatattgctgcacttttaagttttcaaaacagtgtttaaaaattgcattgttatttttttttaaactcagtttaaaaagactaaaacgttctttcaaaagaggcatctaaatgtgttcctaattttgtatatgggcttaggttttgtaaccaataaaaaaagctgctatcaaatatgaaaaaaaaaaaaaaa

SEQ ID NO: 285431 - DNA, 1000 bp, Homo Sapiens; identical to SEQ ID NO: 115766

SEQ ID NO: 285432 - DNA, 1000 bp, Homo Sapiens
ttgagtagcccaaaggagtcaattagaaaagaagcctgctggactgtttctaacatcactgctggaaatagagctcagattcaggctgttatagatgcaaatatttttcctgttttgattgagattcttcagaaagcagagtttcgtaccagaaaagaagcagcttgggctataactaatgcaacatcaggaggtactccagagcaaataaggtatttggtagctttaggctgcattaaaccactttgtgatcttttgactgttatggactccaaaatagtccaagtggctttaaatggacttgaaaatattttacgtcttggagaacaagaatctaagcagaatggaataggcattaatccatactgtgctctcattgaagaagcatatggtctggataaaattgagtttttgcaaagccatgaaaatcaggaaatttaccagaaggcatttgatctgattgaacattactttggtgtagaagaagatgaccccagcattgtacctcaggtggatgaaaaccaacaacagtttatatttcagcagcaggaagcaccaatggatggatttcaactttaacttactggaggaaaaaaaatttatggctaaaaagggtagcttcagaaatgacagactttttcattgaatgatgaggacacagcagccatattatgccaagaggaaaaatatcatgatcatattgaaagatcaagcatgagcttccatggtgaagtcttctgtaccaatgcaccagagaatgcctaccatccaaaaaagcagtcagctgatggaaaagaagattattaaacctttgttctgggatttactgttaaaaaacaaacaaaaaacaacaaaaaagcggtgacaggaaacagttaaggaaatgatttaactgaagggaagcaagatttttttaaagcattgttcttaatccccatgactgtccttcagtcacaattccagaataaaagaatctactttgtgtaaaaaaaaaaaaaaa

SEQ ID NO: 285433 - DNA, 1000 bp, Homo Sapiens
tttggagctttatagcctgtattccttgggagaaaaaaatgggaattggagtaaaaagtgtgtcaagacaacccctttctgctttcttatgtagcatctgcaaagccgattcatgtactgatgccaatcagctagagcaatgtaggctttttttaatttaaattattactacactttattactacacttgcagaaaagaaacatgttaaaatcatggcacacctgcagaatttcagatgacagtgtggtcagaagatgttttttgggagaacctagtgtttgctgggcactatgctaagcactttgggagcaagaacctcctaccttccagtttaaacactagtggtattgtcagatgccgttagtatctgagatgtacttacagcagggttctaagagctctgaaagaagcgctctgttagatgcagactggcagcatcctccttgataaaagcagaaaagcaaagaggtaattggagttgaatcaagttaatagggaaggttggtagtaaatgctgttagtgtgacatgattctgaaacccagagctcagaactaactgtgagatgtaccatgaactaacaattctttgaaaggacctgcagaagcatttttaatacctcattctgtctatgcaagatgaaaatccatggagttttttcttggcttttgtaccaaatttaggggtcttgcatgtcagcaagtgatatatattgtttataaatgcaagctatttctggaggggaaaaatgtgtgtggctcttacgttttctgggaattttgtaacaagttacacgcacaagtgttagaaactttggcataactcaatttggagtattttttaaatgctgtatctttaaagaaaagtaaaattgtcttaaatctaattgacacttctgtaatgagaggcaaccttataactctggagttgtagtttgacagaaccatcagtaaagacataagcaaataaatggtcttggtgcaaaaaaaaaaaaaaaaaa

SEQ ID NO: 285434 - DNA, 1000 bp, Homo Sapiens; identical to SEQ ID NO: 115767

SEQ ID NO: 285435 - DNA, 1000 bp, Homo Sapiens; identical to SEQ ID NO: 115768

SEQ ID NO: 285436 - DNA, 1000 bp, Homo Sapiens
ggccgagtcctggtaccgcagcaagtgtgaggagatgaaggccacggtgatcaggcacggggagaccctgcgccgcaccaaggaggagatcaatgagctgaaccgcatgatccaaaggctgacggccgaggtggagaatgccaagtgccagaactccaagctggaggccgcggtggctcagtctgagcagcagggtgaggcagccctcagtgatgcccgctgcaagctggccgagctggagggcgccctgcagaaggccaagcaggacatggcctgcctgatcagggagtaccaggaggtgatgaactccaagctgggcctggacatcgagatcgccacctacaggcgcctgctggagggcgaggagcagaggctatgtgaaggcattggggctgtgaatgtctgtgtcagcagctcccggggcggggtcgtgtgcggggacctctgcgtgtcaggctcccggccagtgactggcagtgtctgcagcgctccgtgcaacgggaacgtggcggtgagcaccggcctgtgtgcgccctgcggccaattgaacaccacctgcggagggggttcctgcggcgtgggctcctgtggtatcagctccctgggtgtggggtcttgcggcagcagctgccggaaatgttaggcaccccaactcaagtcccaggccccaggcatctttgcctgccctgccttgcttggcccagtcagtcaggcgcctggagaagtgctcagctacttctcctgcactttgaaagacccctcccactcctggcctcacatttctctgtgtgatcccccacttctgggctctgccaccccacagtgggaaaggccaccctagaaagaagtccgctggcacccataggaaggggcctcaggagcaggaagggccaggaccagaaccttgcccacggcaactgccttcctgcctctccccttcctcctctgctcttgatctgtgtttcaataaattaatgtagccaaaaaaaaaaaaaaaaaa

SEQ ID NO: 285437 - DNA, 1000 bp, Homo Sapiens; identical to SEQ ID NO: 284739

SEQ ID NO: 285438 - DNA, 1000 bp, Homo Sapiens; identical to SEQ ID NO: 221128

SEQ ID NO: 285439 - DNA, 714 bp, Homo Sapiens
aacagaacagaaagctctccctcttgtgtgaggcagttgctgtggaaaccccacgggcaggaggcccccggccagcacatcctgtctgcttgtgtctgctgcagagttctgggaccggggccatgtctccacacctcactgctctcctgggcctagtgctctgcctggcccagaccatccacacgcaggagggggcccttcccagaccctccatctcggctgagccaggcactgtgatctccccggggagccatgtgactttcatgtgccggggcccggttggggttcaaacattccgcctggagagggaggatagagccaagtacaaagatagttataatgtgtttcgacttggtccatctgagtcagaggccagattccacattgactcagtaagtgaaggaaatgccgggctttatcgctgcctctattataagccccctggatggtctgagcacagtgacttcctggagctgctggtgaaagaaagctctggaggcccggactccccggacacagagcccggctcctcagctgggactgtgccaggcactgaagcctccggatttgatgcaccatgaatgaggagaaatggcctcccgtcttgtgaacttcaatggggagaaataattagaatgagcaatagaaatgcacagatgcctatacatacatatacaaataaaaagatacgattcgcaaaaaaaaaaaaaaaaa

SEQ ID NO: 285440 - DNA, 1000 bp, Homo Sapiens
gctgagaaatctaatcaagcaaatcagaaactttttgacccaggatagtgctgatttggacagcattgaagcagttgctaatgaagtattgaaaatggagatgcctagcaccccacagcagttacagaacttgacagaagatatacgtgaacgagttgaaagcctttctcaagtagaggttattcttcagcatagtgctgctgacattgccagagctgagatgttgttagaagaagctaaaagagcaagcaaaagtgcaacagatgttaaagtcactgcagatatggtaaaggaagctctggaagaagcagaaaaggcccaggtcgcagcagagaaggcaattaaacaagcagatgaagacattcaaggaacccagaacctgttaacttcgattgagtctgaaacagcagcttctgaggaaaccttgttcaacgcgtcccagcgcatcagcgagttagagaggaatgtggaagaacttaagcggaaagctgcccaaaactccggggaggcagaatatattgaaaaagtagtatatactgtgaagcaaagtgcagaagatgttaagaagactttagatggtgaacttgatgaaaagtataaaaaagtagaaaatttaattgccaaaaaaactgaagagtcagctgatgccagaaggaaagccgaaatgctacaaaatgaagcaaaaactcttttagctcaagcaaatagcaagctgcaactgctcaaagatttagaaagaaaatatgaagacaatcaaagatacttagaagataaagctcaagaattagcaagactggaaggagaagtccgttcactcctaaaggatataagccagaaagttgctgtgtatagcacatgcttgtaacagaggagaataaaaaatggctgaggtgaacaaggtaaaacaactacattttaaaaactgacttaatgctcttcaaaataaaacatcacctatttaatgtttttaatcacattttgtatgagttaaataaagccc

SEQ ID NO: 285441 - DNA, 1000 bp, Homo Sapiens
acaggccaaccaggaacttcaagaacttatccagagtgtgaaggacttcctcaaccaggagggggctgatcctgatagcattgaaatggtggccacacgggtgctagagctctccatcccagcttcagctgagcagatccagcacctggcgggcgcgattgcagagcgagtccggagcctggcagatgtggatgcgatcctggcacgtactgtaggagatgtgcgtcgtgccgagcagctactgcaggatgcacggcgggcaaggagctgggctgaggatgagaaacagaaggcagagacagtacaggcagcactggaggaggcccagcgggcacagggtattgcccagggtgccatccggggggcagtggctgacacacgggacacagagcagaccctgtaccaggtacaggagaggatggcaggtgcagagcgggcactgagctctgcaggtgaaagggctcggcagttggatgctctcctggaggctctgaaattgaaacgggcaggaaatagtctggcagcctctacagcagaagaaacggcaggcagtgcccagggtcgtgcccaggaggctgagcagctgctacgcggtcctctgggtgatcagtaccagacggtgaaggccctagctgagcgcaaggcccaaggtgtgctggctgcacaggcaagggcagaacaactgcgggatgaggctcgggacctgttgcaagccgctcaggacaagctgcagcggctacaggaattggaaggcacctatgaggaaaatgagcgggcactggagagtaaggcagcccagttggacgggttggaggccaggatgcgcagcgtgcttcaagccatcaacttgcaggtgcagatctacaacacctgccagtgacccctgcccaaggcctaccccagttcctagcactgccccacatgcatgtctgcctatgcactgaagagctcttggcccggcagggcccccaataaaccagtgtgaacccccaaaaaaaaa

SEQ ID NO: 285442 - DNA, 1000 bp, Homo Sapiens; identical to SEQ ID NO: 221129

SEQ ID NO: 285443 - DNA, 1000 bp, Homo Sapiens; identical to SEQ ID NO: 115771

SEQ ID NO: 285444 - DNA, 1000 bp, Homo Sapiens
gggaagaaacagacctcaatgacactgcaaggatctactaccttcggacttacatcaatgaggccctcaaagctgtgcaggacaaggtggaccttcgaggatacacagtttggagtgcgatggacaattttgagtgggccacaggcttttcagagagatttggtctgcattttgtgaactacagtgacccttctctgccaaggatccccaaagcatcagcgaagttctacgcctctgtggtccgatgcaatggcttccctgaccccgctacagggcctcacgcttgtctccaccagccagatgctggacccaccatcagccccgtgagacaggaggaggtgcagttcctggggctaatgctcggcaccacagaagcacagacagctttgtacgttctcttttctcttgtgcttcttggagtctgtggcttggcatttctgtcatacaagtactgcaagcgctctaagcaagggaaaacacaacgaagccaacaggaattgagcccggtgtcttcattctgatgagttaccacctcaagttctatgaagcaggcctagtttcttcatctatgtttaccggccaccaaacaccttagggtcttagactctgctgatactggacttctccataaagtcctgctgcaccgttagagatgactttaatcttgaatgatttcgacttgctgagtaaaatggaaatatctccatcttgctccagtatcagagttcatttgggcatttgagaagcaagtagctcttgcggaaacgtgtagatactggtctagtgggtctgtgaaccacttaattgaacttaacagggctgttttaagtttcagagttgttaagggttgttaagggagcaaaaaccgtaaaaatccttcctataagaagaaatcaactccattgcatagactgcaatatcatctcctgcccttctgcaagctctccctagcttcacatcttgtgttttccagaaaataaaaacagcagactgtcctttc

SEQ ID NO: 285445 - DNA, 1000 bp, Homo Sapiens
gtggcagataaagattattctgtgaccgccaattctaagattgtagtggtaactgcaggagtccgtcagcaagaaggggagagtcggctcaatctggtgcagagaaatgttaatgtcttcaaattcattattcctcagatcgtcaagtacagtcctgattgcatcataattgtggtttccaacccagtggacattcttacgtatgttacctggaaactaagtggattacccaaacaccgcgtgattggaagtggatgtaatctggattctgctagatttcgctaccttatggctgaaaaacttggcattcatcccagcagctgccatggatggattttgggggaacatggcgactcaagtgtggctgtgtggagtggtgtgaatgtggcaggtgtttctctccaggaattgaatccagaaatgggaactgacaatgatagtgaaaattggaaggaagtgcataagatggtggttgaaagtgcctatgaagtcatcaagctaaaaggatataccaactgggctattggattaagtgtggctgatcttattgaatccatgttgaaaaatctatccaggattcatcccgtgtcaacaatggtaaaggggatgtatggcattgagaatgaagtcttcctgagccttccatgtatcctcaatgcccggggattaaccagcgttatcaaccagaagctaaaggatgatgaggttgctcagctcaagaaaagtgcagataccctgtgggacatccagaaggacctaaaagacctgtgactagtgagctctaggctgtagaaatttaaaaactacaatgtgattaactcgagcctttagttttcatccatgtacatggatcacagtttgctttgatcttcttcaatatgtgaatttgggctcacagaatcaaagcctatgcttggtttaatgcttgcaatctgagctcttgaacaaataaaattaactattgtagtgcgaaaaaaaaaaaaaaaaaaaaaaaaaaaaa

SEQ ID NO: 285446 - DNA, 1000 bp, Homo Sapiens; identical to SEQ ID NO: 115772

SEQ ID NO: 285447 - DNA, 526 bp, Homo Sapiens
atctctctcgggtggagtccttctgacagctggtgcgcctgcccgggaacatcctcctggactcaatcatggcttgtggtctggtcgccagcaacctgaatctcaaacctggagagtgccttcgagtgcgaggcgaggtggctcctgacgctaagagcttcgtgctgaacctgggcaaagacagcaacaacctgtgcctgcacttcaaccctcgcttcaacgcccacggcgacgccaacaccatcgtgtgcaacagcaaggacggcggggcctgggggaccgagcagcgggaggctgtctttcccttccagcctggaagtgttgcagaggtgtgcatcaccttcgaccaggccaacctgaccgtcaagctgccagatggatacgaattcaagttccccaaccgcctcaacctggaggccatcaactacatggcagctgacggtgacttcaagatcaaatgtgtggcctttgactgaaatcagccagcccatggcccccaataaaggcagctgcctctgctcccctg

SEQ ID NO: 285448 - DNA, 1000 bp, Homo Sapiens; identical to SEQ ID NO: 221131

SEQ ID NO: 285449 - DNA, 1000 bp, Homo Sapiens; identical to SEQ ID NO: 221133

SEQ ID NO: 285450 - DNA, 1000 bp, Homo Sapiens
aggagggattggaggggctggtgctgaaggatgtgaagggtacatatgagcctgggaagcggcactggctgaaagtgaagaaagactatttgaacgagggggccatggccgacacagctgacctggtggtccttggagccttctatgggcaagggagcaaaggcggcatgatgtcaatcttcctcatgggctgctacgaccctggcagccagaagtggtgcacagtcaccaagtgtgcaggaggccatgatgatgccacgcttgcccgcctgcagaatgaactagacatggtgaagatcagcaaggaccccagcaaaatacccagctggttgaaggtcaacaagatctactatcctgacttcatcgtcccagacccaaagaaagctgccgtgtgggagatcacaggggctgaattctccaaatcggaggctcatacagctgacgggatctccatccgattccctcgctgcacccgaatccgagatgataaggactggaaatctgccactaaccttccccaactcaaggaactgtaccagttgtccaaggagaaggcagacttcactgtagtggctggagatgaggggagctccactacagggggtagcagtgaagagaataagggtccctcagggtctgctgtgtcccgcaaggcccccagcaagccctcagccagtaccaagaaagcagaagggaagctgagtaactccaacagcaaagatggcaacatgcagactgcaaagccttccgctatgaaggtgggggagaagctggccacaaagtcttctccagtgaaagtaggggagaagcggaaagctgctgatgagacgctgtgccaaacaaagaggcggccagccagtgagcagagaggaagaactgtgccagcaggcaggagatagaacagcccggcctagccaggagagactgcagggactcactcagctgctggccccaagtcaaaatttacattaaagggaaaagaccagtctgggtgtgggaa

SEQ ID NO: 285451 - DNA, 1000 bp, Homo Sapiens; identical to SEQ ID NO: 115773

SEQ ID NO: 285452 - DNA, 1000 bp, Homo Sapiens; identical to SEQ ID NO: 221134

SEQ ID NO: 285453 - DNA, 1000 bp, Homo Sapiens
ccacgtacgtgcagaagatgtccatgtacaacctgagatgcgcggcggaggaaaactgtctggccagtacagcatacagggcagatgtcagagattatgatcacagggtgctgctcagatttccccaaagagtgaaaaaccaagggacatcagatttcttacccagccgaccaagatattcctgggaatggcacagttgtcatcaacattaccacagtatggatgagtttagccactatgacctgcttgatgccaacacccagaggagagtggctgaaggccacaaagcaagtttctgtcttgaagacacatcctgtgactatggctaccacaggcgatttgcatgtactgcacacacacagggattgagtcctggctgttatgatacctatggtgcagacatagactgccagtggattgatattacagatgtaaaacctggaaactatatcctaaaggtcagtgtaaaccccagctacctggttcctgaatctgactataccaacaatgttgtgcgctgtgacattcgctacacaggacatcatgcgtatgcctcaggctgcacaatttcaccgtattagaaggcaaagcaaaactcccaatggataaatcagtgcctggtgttctgaagtgggaaaaaatagactaacttcagtaggatttatgtattttgaaaaagagaacagaaaacaacaaaagaatttttgtttggactgttttcaataacaaagcacataactggattttgaacgcttaagtcatcattacttgggaaatttttaatgtttattatttacatcactttgtgaattaacacagtgtttcaattctgtaattacatatttgactctttcaaagaaatccaaatttctcatgttccttttgaaattgtagtgcaaaatggtcagtattatctaaatgaatgagccaaaatgactttgaactgaaacttttctaaagtgctggaactttagtgaaacataataataatgggtttata

SEQ ID NO: 285454 - DNA, 1000 bp, Homo Sapiens; identical to SEQ ID NO: 115774

SEQ ID NO: 285455 - DNA, 1000 bp, Homo Sapiens; identical to SEQ ID NO: 115775

SEQ ID NO: 285456 - DNA, 1000 bp, Homo Sapiens; identical to SEQ ID NO: 115776

SEQ ID NO: 285457 - DNA, 1000 bp, Homo Sapiens; identical to SEQ ID NO: 221136

SEQ ID NO: 285458 - DNA, 1000 bp, Homo Sapiens
gggatctaagttagtggacagcaagcctgtggctacggggtggtgatgttcctcttccagctgtcccctcagctaaggggcttagtttccatgtgggatgccatcacttggttcatgctcattcacacaaagggcacgtgtctcagcctggtatcagggaaattgagacttatttttgccctaaaacgtctccctagctgttcttcgtggggtttttttgtttgtttttttgcctaatttgctttttctgaccaagccttgtggcaccagcaatctccaaagtcctgtggtgggagggctgaataaataaaaatacaaagaggtgggtaaggagtaggaaggtagagagcaccactgatgaggccctcctagcccatggcagacccagacctcttctcccccaggaattagaagtggcaggagagaacaacaggggctgggaatggaggggagaatttctaggggaagtttcctgagttgaaacttctcctgtggttactggtattgagaaatcagctaccaaagtgaaaaaggacaagatcaattcttttctagtcagttctaagactgctagagagagataccaggcccttagccttgctctcagtagcgtcagccccagttctgagcctccccacattacacttaacaagcagtaaaggagtgagcactttgggtccttagactcatgtctggggaggaagagcaagtagaaaagtggcattttcttgattggaaagggggaaggatcttattgcacttgggctgttcagaatgtagaaaggacatatttgaggaagtatctatttgagcactgatttactctgtaaaaagcaaaatctctctgtcctaaactaatggaagcgattctcccatgctcatgtgtaatggttttaacgttactcactggagagattggactttctggagttatttaaccactatgttcagtattttaggactttatgataatttaatataaatttagcttttcttaatc

SEQ ID NO: 285459 - DNA, 1000 bp, Homo Sapiens
caaacagcagtgcgactccttccccgactgtatcgacggctccgacgagctcatgtgtgaaatcaccaagccgccctcagacgacagcccggcccacagcagtgccatcgggcccgtcattggcatcatcctctctctcttcgtcatgggtggtgtctattttgtgtgccagcgcgtggtgtgccagcgctatgcgggggccaacgggcccttcccgcacgagtatgtcagcgggaccccgcacgtgcccctcaatttcatagccccgggcggttcccagcatggccccttcacaggcatcgcatgcggaaagtccatgatgagctccgtgagcctgatggggggccggggcggggtgcccctctacgaccggaaccacgtcacaggggcctcgtccagcagctcgtccagcacgaaggccacgctgtacccgccgatcctgaacccgccgccctccccggccacggacccctccctgtacaacatggacatgttctactcttcaaacattccggccactgtgagaccgtacaggccctacatcattcgaggaatggcgcccccgacgacgccctgcagcaccgacgtgtgtgacagcgactacagcgccagccgctggaaggccagcaagtactacctggatttgaactcggactcagacccctatccacccccacccacgccccacagccagtacctgtcggcggaggacagctgcccgccctcgcccgccaccgagaggagctacttccatctcttcccgccccctccgtccccctgcacggactcatcctgacctcggccgggccactctggcttctctgtgcccctgtaaatagttttaaatatgaacaaagaaaaaaatatattttatgatttaaaaaataaatataattgggattttaaaaacatgagaaatgtgaactgtgatggggtgggcagggctgggagaactttgtacagtggaacaaatatttataaacttaattttgtaaaacag

SEQ ID NO: 285460 - DNA, 1000 bp, Homo Sapiens; identical to SEQ ID NO: 221137

SEQ ID NO: 285461 - DNA, 1000 bp, Homo Sapiens
tctgggaaattctccggcgaagaactggacaagctctggcgggagttcctgcatcacaaagagaaagttcacgagtacaacgtcctgctggagaccctgagcaggaccgaagaaatccacgagaacgtcattagcccctcggacctgagcgacatcaagggcagcgtcctgcacagcaggcacacggagctgaaggagaagctgcgcagcatcaaccagggcctggaccgcctgcgcagggtcagccaccagggctacagcactgaggctgagttcgaggagcccagggtgattgacctgtgggacctggcgcagtccgccaacctcacggacaaggagctggaggcgttccgggaggagctcaagcacttcgaagccaaaatcgagaagcacaaccactaccagaagcagctggagattgcgcacgagaagctgaggcacgcagagagcgtgggcgacggcgagcgtgtgagccgcagccgcgagaagcacgccctgctggaggggcggaccaaggagctgggctacacggtgaagaagcatctgcaggacctgtccggcaggatctccagagctcggcacaacgaactctgaaggcactggggagcccagcccggcagggaagaggccagcgtgaaggacctgggctcttggccgtggcatttccgtggacagcccgccgtcagggtggctggggctggcacgggtgtcgaggcaggaaggattgtttctggtgactgcagccgctgccgtcgcgacacagggcttggtggtggtagcatttgggtctgagatcggcccagctctgactgaaggggcttggcttccactcagcatcagcgtggcagtcaccaccccagtgaggacctcgatgtccagctgctgtcaggtctgatagtcctctgctaaaacaacacgatttacataaaaaatcttacacatctgccaccggaaataccatgcacagagtccttaaaaaatagagtgcagtatttaaacc

SEQ ID NO: 285462 - DNA, 1000 bp, Homo Sapiens
tcctctggacctgaccagggagccgcagttggaacccggggagcagagccaggtggcccacggtaccaatggcattcatgtcaccggcgggtctatgactatcactggcaacatctacatctacaatggaccagtactggggggaccaccgggtcctggagacctcccagctacccccgaacctccataccccattcccgaagagggggaccctggccctcccgggctctctacaccccaccaggaagatggcaaggcttggcacctagcggagacagagcactgtggtgccacaccctctaacaggggcccaaggaaccaatttatcacccatgactgacggagtctgagaaaaggcagaagaaggggggcacaagggcactttctcccttgaggctgccctgcccacgtgggattcacaggggcctgagtagggcccggggaagcagagccctaagggattaaggctcagacacctctgagagcaggtgggcactggctgggtacggtgccctccacaggactctccctactgcctgagcaaacctgaggcctcccggcagacccacccaccccctggggctgctcagcctcaggcacggacagggcacatgataccaactgctgcccactacggcacgccgcaccggagcacggcaccgagggagccgccacacggtcacctgcaaggacgtcacgggcccctctaaaggattcgtggtgctcatccccaagcttcagagaccctttggggttccacacttcacgtggactgaggtagaccctgcatgaagatgaaattatagggaggacgctccttccctcccctcctagaggagaggaaagggagtcattaacaactagggggttgggtaggattcctaggtatggggaagagttttggaaggggaggaaaatggcaagtgtatttatattgtaaccacatgcaaataaaaagaatgggacctaaactcgtgccgctcgtgccgaattcctgcag

SEQ ID NO: 285463 - DNA, 1000 bp, Homo Sapiens; identical to SEQ ID NO: 115778

SEQ ID NO: 285464 - DNA, 1000 bp, Homo Sapiens; identical to SEQ ID NO: 115779

SEQ ID NO: 285465 - DNA, 1000 bp, Homo Sapiens; identical to SEQ ID NO: 221138

SEQ ID NO: 285466 - DNA, 1000 bp, Homo Sapiens; identical to SEQ ID NO: 115781

SEQ ID NO: 285467 - DNA, 1000 bp, Homo Sapiens
agcctccatgagaatctggtatttcttgctgcttggaactactttgcagtgattacttggttgcagtccaagtactctcgtttagtctgagcctggagatgttctagacttgcttctcccacctctgagattaggacaggaaaaatgtgaaatttcccaattacaggattatacggtaccatcacatcatttgtggaaattggggtgactgtatagctgggattgggctaaggactgtggtcttatctgtccacatacagccaaaatgcctatccagaaatccagttcgttggaaaggaaaattggtactcctgtgccacaggggttccagaaaagggaagtcactttaccttgcggtggtgggatcctgatgtctttcatccatttgtagtaaaagctggtaaagcttttcttactcctggttccctaccagtatttctaaacatgtcgcactttctccacaggcatgtggttttgacctttttttcaatcttctagaaagggaacggaagcagaagtgggacatcgagggctctgctgtcctctgcgctgggtgtggaatgctgctgcacctgtcccttctgctggctcagggaagtgtcttcttgcccacatttctgtggggaaaggtttttaatcctctgatgcttccatcttcctgtttaggccatgtgcccagaaacctggactgatctttctttaatagtgaacccctgggccactgaagagtaacatggctccactggacacaaaagagggatggaatcaacaggcagggggccttttataagccttaggaaaagaaaatgaaactatttcatctttggacttttcaatactattggagtgatttttttctttctaaacagggaaaataatgttacaaaagcatcttttttgttatttgtttgcatccctcccccacaccctggtgttttaaaatgaagaaaaaaaaccatcaccttttgtacaaaaactcttaatgattaaaaaacaaaca

SEQ ID NO: 285468 - DNA, 1000 bp, Homo Sapiens
caggtcgaggagagcttaaacaccttcttcctctgccttgtttctcttttattttttattttttcgcatcagtattaatgtttttgcatactttgcatctttattcaaaagtgtaaactttctttgtcaatctatggacatgcccatatatgaaggagatgggtgggtcaaaaagggatatcaaatgaagtgataggggtcacaatggggaaattgaagtggtgcataacattgccaaaatagtgtgccactagaaatggtgtaaaggctgtctttttttttttttttaaagaaaagttattaccatgtattttgtgaggcaggtttacaacactacaagtcttgagttaagaaggaaagaggaaaaaagaaaaaacaccaatacccagatttaaaaaaaaaaaaacgatcatagtcttaggagttcatttaaaccataggaacttttcacttatctcatgttagctgtaccagtcagtgattaagtagaactacaagttgtataggctttattgtttattgctggtttatgaccttaataaagtgtaattatgtattaccagcagggtgtttttaactgtgactattgtataaaaacaaatcttgatatccagaagcacatgaagtttgcaactttccaccctgcccatttttgtaaaactgcagtcatcttggaccttttaaaacacaaattttaaactcaaccaagctgtgataagtggaatggttactgtttatactgtggtatgtttttgattacagcagataatgctttcttttccagtcgtctttgagaataaaggaaaaaaaatcttcagatgcaatggttttgtgtagcatcttgtctatcatgttttgtaaatactggagaagctttgaccaatttgacttagagatggaatgtaactttgcttacaaaaattgctattaaactcctgcttaaggtgttctaattttctgtgagcacactaaaagcgaaaaataaatgtgaataaaatgt

SEQ ID NO: 285469 - DNA, 1000 bp, Homo Sapiens; identical to SEQ ID NO: 118306

SEQ ID NO: 285470 - DNA, 1000 bp, Homo Sapiens
acttacaccttcatcgacaaggtagacctcactgatgaggaatccctgctcagttcctgggactttcccaggagaaagcttctgatgcctctcctgggtgtgatcttcttaaatggcaactcagctactgaggaagagatctgggaattcctgaatatgttgggagtctatgatggagaggagcactcagtctttggggaaccctggaagctcatcaccaaagatctggtgcaggaaaaatatctggagtacaagcaggtgcccagcagtgatcccccacgctttcaattcctgtggggtccgagagcctatgctgaaaccagcaagatgaaagtcctggagtttttggccaaggtaaatggtaccaccccctgtgccttcccaacccattacgaagaagctttgaaagatgaagagaaagccggagtctgagccagagttgtagccaggccttgcactactgccatagccaatcaatctcccaaagccaagtttacctgctgttctcacccccaatgaggtcttaggcagattctttactttgtaattcaaaaggcctgttaacctttgttcttgttatgcatgaataacttgttgactttttttttttctctttttcaactagtgtttcaacaggtttatttagattcagaatgtaaatttacaaatgatatagatcaccctgttattgctgtttttcagggacagtagaaagtgttttgttttttgagtgaaacaacttattaataaaaatccttaaatcacttttgtaatccaggacaagaaaatgtggcattagagtagaaatatctttggaaatgtgaaagaccccatagtgaaatatttgggatcagaagccagaggggtaaaagtggtcaattcttggtttacttcatttaatctttcttttcataaagatacatacctggatttgtttatgttattcaagaatgtgtgagaaattaaaccatagttagttaaaaaaaaaaaaaaaaaaaaa

SEQ ID NO: 285471 - DNA, 1000 bp, Homo Sapiens; identical to SEQ ID NO: 221140

SEQ ID NO: 285472 - DNA, 1000 bp, Homo Sapiens; identical to SEQ ID NO: 115783

SEQ ID NO: 285473 - DNA, 1000 bp, Homo Sapiens; identical to SEQ ID NO: 221142

SEQ ID NO: 285474 - DNA, 1000 bp, Homo Sapiens
gccttgggatggctgcagtgaggagaaatcccgggaactgtattgacacaaagattcttattgcacttgtattttttgtattaaagtttgcatggtttctaataaaggattcaaacataagtttgtagtgaaatggcctgggagattccaagggcttctctggagggggattggctgcagtgtagatttgcctctgaggaggctgccccagacttggcctcctcatgccccctcctgacctctgcccttctctggtcctggcatccctggagaaggtaggggtcttgacctaagtttagatttgatctccatgtgcagggaggctgtcctgggcctgacaggtcctccccctttctgaggtagcagtgccttgtggaggtttgacaccatgtccctagctccccaagcacacaccaggaaactgcaggggctcacggaggaagtgctgcctgggccagggggaccagctttcctccgtagagaccatgtgcagaacacttctgctgtgccaagaacatgagggagccagtgttttgtcagcaggaagaaagggcctgctgggatgaaagtgggaaggaaacagggttgcgtagtcaggagacacctcaggggcaacagcacaggcccagagtacctgctgcctccactgcgtctgtcctggggtcatgaggatgctgaggttgacgacaggttccaggtcctttcactcctttggccaaaggttgggggtaggtggcccaagtggcgtgctctctaggtagacaacaggagtggtcagagttccctcaaaggatcctccactccagagcacctgagaaggccgggaccagaggccctgtgtgatgtgtactccgcagctgtttggggtgggacatttctgtacttctcgatttgcttatggctcagccattacctgtgtcagtccatgattctgttgtaacagttttaagagtaaataaataaagctgcctgatgtcccatcaaaaaaaaaaaaaaaaaa

SEQ ID NO: 285475 - DNA, 1000 bp, Homo Sapiens; identical to SEQ ID NO: 115784

SEQ ID NO: 285476 - DNA, 1000 bp, Homo Sapiens
acaagctggcccaggtggggctggtgcagtactcaagctctgtgcgccaggagttccccctgggtcgcttccacaccaagaaggacatcaaggcggctgtgcggaatatgtcctacatggagaagggcacaatgaccggggctgctctcaagtacctcattgacaattccttcactgtgtccagtggggctaggcccggggcccagaaggtgggcattgtcttcactgatggccggagccaggactacattaatgatgctgccaagaaggccaaagacctcggctttaagatgtttgctgtgggtgtgggcaatgccgtggaggatgagctgagggaaatagcctcagagcctgtggcagagcactacttctacacggctgacttcaagaccatcaaccagataggcaagaagttgcagaagaagatctgtgtggaggaagacccgtgtgcctgcgagtccctggtgaaattccaagccaaagtggaggggctgctgcaggccctgaccaggaaactggaagctgtgagtaagcggctggccatcctggagaacacagttgtctaaggctgcctgtcaccactgtggcctctccaagcgtcctgcacgtgtccgccgtagctttaccattttagtgagggaagccagcccgggggtgggagggggtgtgtctgggtgtgcctattgagagcgtgtaatggcgtttgggagctcgtgtgtgtatgtgtgcgtgtgtgtatgcgtgcatgtgtgtgtgtgtgtgtgtgtgtgcacgtgcgcctgagggtgggcatgagtcttgccagaatgtgagtgtgagagtgataatgcaggggtgagtgtgagagggactgcgtttgcatttttataatcaaaagcttaatatattcccatctttttttagttaaccctttcttgactctgagtgctgtgaatttctttactgatttctctattctccggtgagaaacaattaaatgtgatttaacgtaagcagtgaa

SEQ ID NO: 285477 - DNA, 1000 bp, Homo Sapiens; identical to SEQ ID NO: 221143

SEQ ID NO: 285478 - DNA, 1000 bp, Homo Sapiens; identical to SEQ ID NO: 221144

SEQ ID NO: 285479 - DNA, 1000 bp, Homo Sapiens; identical to SEQ ID NO: 115785

SEQ ID NO: 285480 - DNA, 1000 bp, Homo Sapiens
tggggccccttcttcctgcatctcacactcatcgtcctctgccccgagcaccccacgtgcggctgcatcttcaagaacttcaacctctttctcgccctcatcatctgcaatgccatcatcgaccccctcatctacgccttccacagccaggagctccgcaggacgctcaaggaggtgctgacgtgctcctggtgagcgcggtgcacgcggctttaagtgtgctgggcagagggaggtggtgatattgtgtggtctggttcctgtgtgaccctgggcagttccttacctccctggtccccgtttgtcaaagaggatggactaaatgatctctgaaagtgttgaagcgcggacccttctgggtccagggaggggtccctgcaaaactccaggcaggacttctcaccagcagtcgtggggaacggaggaggacatggggaggttgtggggcctcaggctccgggcaccaggggccaacctcaggctcctaaagagacattttccgcccactcctgggacactccgtctgctccaatgactgagcagcatccaccccaccccatctttgctgccagctctcaggaccgtgccctcgtcagctgggatgtgaagtctctgggtggaagtgtgtgccaagagctactcccacagcagccccaggagaaggggctttgtgaccagaaagcttcatccacagccttgcagcggctcctgcaaaaggaggtgaaatccctgcctcaggccaagggaccaggtttgcaggagcccccctagtggtatggggctgagccctcctgagggccggttctaaggctcagactgggcactggggcctcagcctgctttcctgcagcagtcgcccaagcagacagccctggcaaatgcctgactcagtgaccagtgcctgtgagcatggggccaggaaagtctggtaataaatgtgactcagcatcacccaccttaaaaaaaaaaaaaaaaaaaaaaaaaaaaaaaaaaaaaaaaa

SEQ ID NO: 285481 - DNA, 1000 bp, Homo Sapiens
gactgctgatttgtttactacagcaaggctttggtttccaagtcccgggtctcaactttaagatagaggcggccataagaggtgatctctgggagttataggtcatgggaagagcgtagacaggtgttacttacagtcccagatacactaaagttacaaacagaccaccaccaggactgtgcctgaacaattttgtattgagagaataaaaacttccttcaatcttcattttggaggcagggctgggaagggagcgctctcttgattctgggatttctccctctcagtggagccttattaatatccaagacttagagctgggaatctttttgatacctgtagtggaactaaaattctgtcaggggtttcttcaagagctgagaaacattattagcacttcccgccccagggcactacataattgctgttctgctgaatcaaatctcttccacatgggtgcatttgtagctctggacctgtctctacctaaggacaagacactgaggagatactgaacattttgcaaaacttatcacgcctacttaagagtgctgtgtaacccccagttcaagacttagctcctgttgtcatgacggggacagagtgagggaatggtagttaaggcttcttttttgcccccagatacatggtgatggttagcatatggtgcttaaaaggttaaatttcaagcaaaatgcttacagggctaggcagtaccaaagtaactgaattatttcaggaaggtcttcaatcttaaaacaaattcattattctttttcagttttacctcttctctctcagttctacactgatacacttgaaggaccatttactgtttttttctgtagcaccagagaatccatccaaagttccctatgaaaaatgtgttccattgccatagctgactacaaattaaagttgaggaggtttctgcatagagtctttatgtccataagctacgggtaggtctattttcagagcatgatacaaattccacagg

SEQ ID NO: 285482 - DNA, 1000 bp, Homo Sapiens; identical to SEQ ID NO: 115786

SEQ ID NO: 285483 - DNA, 1000 bp, Homo Sapiens
ccctgattgtcgaagaaccatttcggctcctgtcgttagacctaaagatgcgtatataaagaaagaaaactccaaactttttgatccctgcaactcagtggaattcttggatttggctcacagttctgaaagccaagagaccatctcaagcatgggagaacagttagataacctttctgaacagagaacagatacagaaaacatggaggattgccagaatctcttgaagccatgtagcttatgtgagaaaagaccacgagacgggaacattattcatggaaggacgggccatcttgtcacttgttttcactgtgccagaagactaaagaaggctggggcttcatgccctatttgcaagaaagagattcagctggttattaaggtttttatagcataatggtagtacgaacataaaaatgcatttattcagttcacttaccacattatttgaaaatcaatcctttatttaattttatttccaacctgtcagagaatgttcttaggcatcaaaatccaaggtagctgtaagaaaaatactggagctaacaatgaagaacagaagtaatctgattagtcaaattattaagtgccatggattactttatgcagcagtcaggtacatagttaggtgaacccaaaagaaaaactcttgaaaacaagagatttcttccatgcacatttacaatattgaggtataattaacatgataaagtgtttccttctaacgagttgtagaaatctgagtaaccacccaaaaaagcaatagaatgtttgtgtcaccccaaaacactcccttctgcccctcttcagacagtccttcagctatttcatggctctcaccctagtttttttttttttttgcacttttttttttccgggggtataggggaggtgtggggcgacagggtctgtcttgttctgtctcccaggctgaagtgcagtgagtcaagattgagccactgcactccagcctgggtgacagcgcgagactccatctcag

SEQ ID NO: 285484 - DNA, 1000 bp, Homo Sapiens
tagaagctgcaaaggccctgacaagccaattgacagatgaagagctagcccaagggagactttacccaccgcttgctaatattcaggaagtttctattaacattgctattaaagttacagaatacctatatgctaataaaatggctttccgatacccagaacctgaagacaaggccaaatatgttaaagaaagaacatggcggagtgaatatgattccctgctgccagatgtgtatgaatggccagaatctgcatcaagccctcctgtgataacagaatagaagcactcccctgataaatactttctgtgctccagggaaccccttttttcagacaagaagagataatgtcttcagttttatggtgttttctgtgttttgttctccctgaccactttggttgatgtattttttccatgcgtctccacatctgttggggtagacgtgttgattgattgcattgcccaccagcaccctacaatcagatagttgtgatgctttaattctaacatacagcccgtaccacatccaggagatgtaaaaagtgtgtttgtgaatgtcttcacttgtactctaattcagacttgccaaagtatttgctatttactattatgggtaatactcttctctggcctagttcttacagagctactaaaatagaaatttacttttatggatagaagtacagaattttgagaagaaactaaattttcaccaaattttaaggaaaaattgtcattatctaaaaatgttcttatatatctgcttcatcttaccttcatactctgaaattccctatagcagacagagctagggaaatattaaaaatttaccctatttattttctggaactaaatcaagccttaactataacattatgagagtaatgggaactactgctggctttaagtaaataaaagtcattgttttcaacagtgtataaaaatcatagtgtaacctttttatttaataaatatcttacatttaaaaaaaaaaaaaaa

SEQ ID NO: 285485 - DNA, 1000 bp, Homo Sapiens; identical to SEQ ID NO: 115787

SEQ ID NO: 285486 - DNA, 1000 bp, Homo Sapiens
acccatggtctccatgagtgctccctctgctgcccctgatgcatgcttctgctgattcccgagcaccaactccttacaagggggccttgtggctctcagccatgccacatccctgtcacacacccagggcatccattcctaagccagacccggctcccctacacctgaagttacactgccagcagttccccaggcctcttccgagaggcacatggttctagcctggacctggctgggctccatgagaatgagttgcctccaccctgtcccaacagctgacagccaggagccactctcccagctgcaggcctttgtggtccatcttgtcctgcttcctcactgtggacccctgtctgggccaccctagtgtgctaagctgagcagtgcagtgtgaacagggcccatggtgtattctaggccacagcccagcactcctctgggctgctctcaaaccatgtcccatcttcagcatccctcccaccaacttactcccctgtggtgagtaccgtggaaccccagcccacctcactatcatactcagcttcccctgatggcccatcccagcccctgaagctctatgccaagaacacagctaccgcacaccaccctgaaacagccacagccaaggtaggcatgcatatgaggtcttccccataccctctgggtgttgagaggtttagccacatgagggagcagaggacaatctctgcagggctgggagtgggtagggactgaaggtctcaataaaccttcagaacctgaatgaactggcttcatacacacaaacatatttgtttatcccccaaatgtaggcacctggctcctccttgctcccctgctgatggtgtcctaccccgaactccaaaaattacacctggagtcaggtgcagaagggaaccttgtatttcacaggcctcattttgatggcaaaaagacagtgtaataataacataataataataaaaatataatactgaaaaggaaaaaaaaaaaaaaaaaa

SEQ ID NO: 285487 - DNA, 1000 bp, Homo Sapiens; identical to SEQ ID NO: 115791

SEQ ID NO: 285488 - DNA, 1000 bp, Homo Sapiens; identical to SEQ ID NO: 115792

SEQ ID NO: 285489 - DNA, 1000 bp, Homo Sapiens
ttgtggttgagcagcacctgaactccagtgatatccaccacattaatgaaatcaaaaggcagaaccagtcccttgtgtatggcaaagtggatagcttctggaagaataagaagatctacttggacattattcacacatacatggaagtgcatgcaactgtttatggctccagcacaaagaatattcccagttacgtgaaaaaccatggtatcctcagtggacgggacctgcagttccttcttcgagaaaccaagttgtttgttggacttgggttcccttacgagggcccagctcccctggaagctatcgcaaatggatgtgcttttctgaatcccaagttcaacccacccaaaagcagcaaaaacacagactttttcattggcaagccaactctgagagagctgacatcccagcatccttacgctgaagttttcatcgggcggccacatgtgtggactgttgacctcaacaatcaggaggaagtagaggatgcagtgaaagcaattttaaatcagaagattgagccatacatgccatatgaatttacgtgcgaggggatgctacagagaatcaatgctttcattgaaaaacaggacttctgccatgggcaagtgatgtggccacccctcagcgccctacaggtcaagcttgctgagcccgggcagtcctgcaagcaggtgtgccaggagagccagctcatctgcgagccttctttcttccagcacctcaacaaggacaaggacatgctgaagtacaaggtgacctgccaaagctcagagctggccaaggacatcctggtgccctcctttgaccctaagaataagcactgtgtgtttcaaggtgacctcctgctcttcagctgtgcaggcgcccaccccaggcaccagagggtctgcccctgccgggacttcatcaagggccaggtggctctctgcaaagactgcctatagcagctacctgctcagccctgcaccatgctgctggggaagacagtggcccc

SEQ ID NO: 285490 - DNA, 503 bp, Homo Sapiens
gacagcggcttccttgatccttgccacccgcgactgaacaccgacagcagcagcctcaccatgaagttgctgatggtcctcatgctggcggccctctcccagcactgctacgcaggctctggctgccccttattggagaatgtgatttccaagacaatcaatccacaagtgtctaagactgaatacaaagaacttcttcaagagttcatagacgacaatgccactacaaatgccatagatgaattgaaggaatgttttcttaaccaaacggatgaaactctgagcaatgttgaggtgtttatgcaattaatatatgacagcagtctttgtgatttattttaactttctgcaagacctttggctcacagaactgcagggtatggtgagaaaccaactacggattgctgcaaaccacaccttctctttcttatgtctttttactacaaactacaagacaattgttgaaacctgctatacatgtttattttaataaattgatggca

SEQ ID NO: 285491 - DNA, 1000 bp, Homo Sapiens
ttatccgatgcccttcctgacaatgaaaacaagaaacccactgcaatccccaagaaacccagtgctggggatgactttgacttaggagatgctgttgttgatggagaaaatgacgacccacgaccaccgaacccacccaaaccgatgccaaatccaaaccccaaccaccctagttcctccggtagcttttcagatgctgaccttgcggatggcgtttcaggtggagaaggaaaaggaggcagtgatggtggaggcagccacaggaaagaaggggaagaggccgacgccccaggcgtgatccccgggattgtgggggctgtcgtggtcgccgtggctggagccatctctagcttcattgcttaccagaaaaagaagctatgcttcaaagaaaatgcagaacaaggggaggtggacatggagagccaccggaatgccaacgcagagccagctgttcagcgtactcttttagagaaatagaagattgtcggcagaaacagcccaggcgttggcagcagggttagaacagctgcctgaggctcctccctgaaggacacctgcctgagagcagagatggaggccttctgttcacggcggattctttgttttaatcttgcgatgtgctttgcttgttgctgggcggatgatgtttactaacgatgaattttacatccaaagggggataggcacttggacccccattctccaaggcccgggggggcggtttcccatgggatgtgaaaggctggccattattaagtccctgtaactcaaatgtcaaccccaccgaggcacccccccgtcccccagaatcttggctgtttacaaatcacgtgtccatcgagcacgtctgaaacccctggtagccccgacttctttttaattaaaataaggtaagcccttcaatttgtttcttcaatatttctttcatttgtagggatatttgtttttcatatcagactaataaaaagaaattagaaaccaaaaaaaaaaaaaaaaaaaa

SEQ ID NO: 285492 - DNA, 1000 bp, Homo Sapiens
gctactccatgttggctagcctctggtaacctcttacttattatcttcaggacactcactacagggaccagggatgatgcaacatccttgtctttttatgacaggatgtttgctcagcttctccaacaataagaagcacgtggtaaaacacttgcggatattctggactgtttttaaaaaatatacagtttaccgaaaatcatataatcttacaatgaaaaggactttatagatcagccagtgaccaaccttttcccaaccatacaaaaattccttttcccgaaggaaaagggctttctcaataagcctcagctttctaagatctaacaagatagccaccgagatccttatcgaaactcattttaggcaaatatgagttttattgtccgtttacttgtttcagagtttgtattgtgattatcaattaccacaccatctcccatgaagaaagggaacggtgaagtactaagcgctagaggaagcagccaagtcggttagtggaagcatgattggtgcccagttagcctctgcaggatgtggaaacctccttccaggggaggttcagtgaattgtgtaggagaggttgtctgtggccagaatttaaacctatactcactttcccaaattgaatcactgctcacactgctgatgatttagagtgctgtccggtggagatcccacccgaacgtcttatctaatcatgaaactccctagttccttcatgtaacttccctgaaaaatctaagtgtttcataaatttgagagtctgtgacccacttaccttgcatctcacaggtagacagtatataactaacaaccaaagactacatattgtcactgacacacacgttataatcatttatcatatatatacatacatgcatacactctcaaagcaaataatttttcacttcaaaacagtattgacttgtataccttgtaatttgaaatattttctttgttaaaatagaatggtatcaataaatagaccattaatcag

SEQ ID NO: 285493 - DNA, 1000 bp, Homo Sapiens; identical to SEQ ID NO: 221149

SEQ ID NO: 285494 - DNA, 1000 bp, Homo Sapiens; identical to SEQ ID NO: 221151

SEQ ID NO: 285495 - DNA, 1000 bp, Homo Sapiens; identical to SEQ ID NO: 115795

SEQ ID NO: 285496 - DNA, 1000 bp, Homo Sapiens
agtaaaacatacttctttgtaaatgaccaattctggagatatgataaccaaagacaattcatggagccaggttatcccaaaagcatatcaggtgcctttccaggaatagagagtaaagttgatgcagttttccagcaagaacatttcttccatgtcttcagtggaccaagatattacgcatttgatcttattgctcagagagttaccagagttgcaagaggcaataaatggcttaactgtagatatggctgaagcaaaatcaaatgtggctgtatccactttcagaatgttgaagggaagttcagcatgcattttcgttacattgtgtcctgcttatacttttctcaatattaagtcattgtttcccatcactgtatccattctacctgtcctccgtgaaaatatgtttggaatattccactatttgcagaggcttattcagttcttacacattccatcttacattagtgattccatcaaagagaaggaaagtaagcctttttgtcacctcaatatttactatttcaatacttacatatctgacttctaggatttattgttatattacttgcctatctgacttcatacatccctcagtttcttaaaatgtcctatgtatatcttctacatgcaatttagaactagattttggttagaagtaaggattataaacaacctagacagtacccttggcctttacagaaaatatggtgctgttttctacccttggaaagaaatgtagatgatatgtttcgtgggttgaattgtgtcccccataaaagatatgttgaagttctaaccccaggtacccatgaatgtgagcttaccagggtctttgcagatgtaattagttaagttaaggtgagatcacactgaattagggtgggctctaaatccattatgactgttgttcttataagaagaagagagcatagccacctaggggaggaggccgtgtgaagacagaggcagagattggagtgacgcatctccaagccaa

SEQ ID NO: 285497 - DNA, 1000 bp, Homo Sapiens
cattcacagagctcgcccagttccgcctttcgcaagatgatgtgaatggcattcagtctctctacggacctccccctgcctctactgaggaacccctggtgcccacaaaatctgttccttcgggatctgagatgccagccaagtgtgatcctgctttgtccttcgatgccatcagcactctgaggggagaatatctgttctttaaagacagatatttttggcgaagatcccactggaaccctgaacctgaatttcatttgatttctgcattttggccctctcttccatcatatttggatgctgcatatgaagttaacagcagggacaccgtttttatttttaaaggaaatgagttctgggccatcagaggaaatgaggtacaagcaggttatccaagaggcatccataccctgggttttcctccaaccataaggaaaattgatgcagctgtttctgacaaggaaaagaagaaaacatacttctttgcagcggacaaatactggagatttgatgaaaatagccagtccatggagcaaggcttccctagactaatagctgatgactttccaggagttgagcctaaggttgatgctgtattacaggcatttggatttttctacttcttcagtggatcatcacagtttgagtttgaccccaatgccaggatggtgacacacatattaaagagtaacagctggttacattgctaggcgagatagggggaagacagatatgggtgtttttaataaatctaataattattcatctaatgtattatgagccaaaatggttaatttttcctgcatgttctgtgactgaagaagatgagccttgcagatatctgcatgtgtcatgaagaatgtttctggaattcttcacttgcttttgaattgcactgaacagaattaagaaatactcatgtgcaataggtgagagaatgtattttcatagatgtgttattacttcctcaataaaaagttttattttgggcctgttcctt

SEQ ID NO: 285498 - DNA, 1000 bp, Homo Sapiens
ctgtatggagacccaaaagagaaccaacgcttgccaaatcctgacaattcagaaccagctctctgtgaccccaatttgagttttgatgctgtcactaccgtgggaaataagatctttttcttcaaagacaggttcttctggctgaaggtttctgagagaccaaagaccagtgttaatttaatttcttccttatggccaaccttgccatctggcattgaagctgcttatgaaattgaagccagaaatcaagtttttctttttaaagatgacaaatactggttaattagcaatttaagaccagagccaaattatcccaagagcatacattcttttggttttcctaactttgtgaaaaaaattgatgcagctgtttttaacccacgtttttataggacctacttctttgtagataaccagtattggaggtatgatgaaaggagacagatgatggaccctggttatcccaaactgattaccaagaacttccaaggaatcgggcctaaaattgatgcagtcttctactctaaaaacaaatactactatttcttccaaggatctaaccaatttgaatatgacttcctactccaacgtatcaccaaaacactgaaaagcaatagctggtttggttgttagaaatggtgtaattaatggtttttgttagttcacttcagcttaataagtatttattgcatatttgctatgtcctcagtgtaccactacttagagatatgtatcataaaaataaaatctgtaaaccataggtaatgattatataaaatacataatatttttcaattttgaaaactctaattgtccattcttgcttgactctactattaagtttgaaaatagttaccttcaaaggccaagagaattctatttgaagcatgctctgtaagttgcttcctaacatccttggactgagaaattatacttacttctggcataactaaaattaagtatatatattttggctcaaataaaattgaaaaaaaaatca

SEQ ID NO: 285499 - DNA, 1000 bp, Homo Sapiens
aaggggacctggaagggaggtgggccgtggcccttgagtccccattgaggcttggttccttcccaatccagtggacttcgcagtccacttctgacagcctcagtgaccctggctccttgtgccagagaacccagcccacccccggcagcagcccccagctcccacctccccttgggcccacacctccttccctctctggagaaagggccctgggcctgcctcaccacggaccaaagggagtctgccagggcccctctccccagggaagcagcagcctcgcccctggcagagatgcctccctgagctagaaccctctgttccttccctgtgcctcctccctccctctccgactcacaccactagcctcaggggtctgagctccagctcctttgggcttcagctgccagtgtcctgagccccagggagagggggctggtgggtgcctaggcctgggcagtggatggccgtgaatgggtgcccacagtgtcaggcactgggcatgaggggttcctcccctccagctccctgtgcccccagggtcctgggaggagagacactggtggggataggccagccgcgcatcagactgtgaaccccacgaaggagcccattgtggcctaagaggctgccctcctgtgctcagccctgaggacagatgcctccttcctcttttccttcccaaagcaagcaagaggccgtggctgctgtgggaaatggtactgtacagctggctctacttccccatggccctgagcgagtggagtctgccacccaggatccccaaggcacttgagggggaaggattctgctggcctctgcgagtggtttcttgtgcactggcaccaagtgcgggtccggcagcttctgccccctgcagaaccggagagccagctaaggggtggggctgcgggggttccgtgtccacccccatacatttatttctgtaaataatgtgcactgaataaattgtacagccggcaaaaaaaaaaaaaaaaaaaaa

SEQ ID NO: 285500 - DNA, 1000 bp, Homo Sapiens
acaacacccacgttgtttatttcaaagaacttttcagcgaagggagaggagctttcagaaaaacctcactctttcccctcccttctcccctctttccttctgccggtccttttggctggggtctgagtctgcggttctcgcctgggcagtcttgacgaggagcaaaccccgccttcagagggcagacaaagcaggtggcatgaattgatcagcgagaaaggtgtgagccgaggcagttcctgcgttctgctacaaaaggaatggaaagggaagggaatttccccccaccatgggctgtgggagagttgaccgtattctgggcaagactccatgacccctctgattctgcagtgtacagctgtttgagagcctcatcattttacttttgaaacaggaatgatttctccttaattgcttaaggccggggagcaaagtgtcttaacttctgtctttgactttcccagcgttgagtcatcaacactttgccaattagctcatggtcctggcaacctcagaaacccctgaagttttaaaaactttctcgctccccacgaccccagaatgaaacagctttaaaaatagccttaagcaaaaggatgttatttcattaaatttggtttaatggaaagaataaaagtaaatgaaaaacacaccctacacactagactccgaacactggtaatcagtactgcatagcaaactctttgggaaagaaaacgaaaatgttattgcacatgtaaaatatgaaaacttaactctgctgtgtgttaggcaatcctgtaatcttttttgactcttaaaagaaattcatttctgaaatgcttggttggaagactgtgacaatagctcatgaaattgagtgttatttttttctttcttttttaaaaaaatatgtaaagtgcagtcttctgtattcctgcatattgtatatacctgtatatgttttcctgagcagttaaataacaataaatatgacgttaatggtgaaaaaaaaaaaaaa

SEQ ID NO: 285501 - DNA, 1000 bp, Homo Sapiens
gcccccaggtccctcaggagccagcacatctgcagctgtggatcatcccccactaccccagacctcatcatcaactccatccaacacttcgtttactccgaatcaggaaacccaggcccaacggcaggtggatgcaagaagaaatgttccccaaaacgacccagtgacagtggtggtactgaaagcaacagcgccatttaaatacgagtccccagaaaatgggaaaagcacaatgtttcatgctacagtggccagtaagactcaatatttccatgtgaaagtcttcgacatcaacttgaaagagaaatttgtaaggaagaaggtcattaccatatctgattactctgaatgtaaaggagtaatggaaataaaggaagcatcatctgtgtctgactttaatcaaaattttgaggtcccaaacagaattatcgaaatagcaaataaaactcccaagatcagtcaactttacaagcaagcatctggaacaatggtgtatgggttgtttatgttacaaaagaaaagcgtacacaagaagaacacaatttatgaaatacaggataatacaggatccatggatgtagtggggagtggaaaatggcacaatatcaagtgtgagaaaggagataaacttcgactcttctgccttcaactgagaacagttgaccgcaagctgaaactggtgtgtggaagtcacagcttcatcaaggtcatcaaggccaagaaaaacaaggaaggaccaatgaatgttaattgaaatatgaaagctgaaatgcaacaaacaacttccgcttaaaacaattaagttgttaataactgtgattttgtaaatttcagtaattcatttaaatgatgtttcagtagatatattctagcatattaagagcttttataactgagttatagattagtttgctttctggaataaaattttcttcttatactcttccttttttttagatattacattttgcttttatgacattcacgaggcaaaaaaccg

SEQ ID NO: 285502 - DNA, 1000 bp, Homo Sapiens; identical to SEQ ID NO: 221153

SEQ ID NO: 285503 - DNA, 1000 bp, Homo Sapiens
gaagcatggcactctggcgggcataccagcgggccctggccgctcacccgtggaaagtacaggtcctgacagctgggtccctgatgggcctgggtgacattatctcacagcagctggtggagaggcggggtctgcaggaacaccagagaggccggactctgaccatggtgtccctgggctgtggctttgtgggccctgtggtaggaggctggtacaaggttttggatcggttcatccctggcaccaccaaagtggatgcactgaagaagatgttgttggatcaggggggctttgccccgtgttttctaggctgctttctcccactggtaggggcacttaatggactgtcagcccaggacaactgggccaaactacagcgggattatcctgatgcccttatcaccaactactatctatggcctgctgtgcagttagccaacttctacctggtcccccttcattacaggttggccgttgtccaatgtgttgctgttatctggaactcctacctgtcctggaaggcacatcggctctaagcctgcctcactccatcgtttccaccttgcagtgatgcagcttgaccctggaacggtcagacaacctcctcaaagtgggcataccagtttccacggggttgggttgccggtcagagcttaagaggactagcaccctgcaatgcccctcttcactctaaaatgtacactgactgctttagagcccttgataatagtcttattcccaccacatactaggcactccataaatatctgttgaaccttcatgaccttatcaactttacacccatatcccagcaaatgccactcatccccactcttcatagacacatttgttactctaaccctgcctaggcttcttgtagctccagctctttagagactcccggaaccctttatatggtgcctcagtaaatatgttattaaatatgtaatccggaaaaaaaaaaaaaaaaaaaaaaaaaaaaaaaaaaaaaaaaaaaaaa

SEQ ID NO: 285504 - DNA, 1000 bp, Homo Sapiens; identical to SEQ ID NO: 115797

SEQ ID NO: 285505 - DNA, 1000 bp, Homo Sapiens; identical to SEQ ID NO: 221155

SEQ ID NO: 285506 - DNA, 1000 bp, Homo Sapiens
gatgatatcgaaacaaattcatcaacatttatgaaagaaatgaaagagatagcatatattctacataatgctaatgacaaatcgctcatattaattgatgaacttggcagaggtactaatacggaagaaggtattggcatttgttatgctgtttgtgaatatctactgagcttaaaggcatttacactgtttgctacacatttcctggaactatgccatattgatgccctgtatcctaatgtagaaaacatgcattttgaagttcaacatgtaaagaatacctcaagaaataaagaagcaattttgtatacctacaaactttctaagggactcacagaagagaaaaattatggattaaaagctgcagaggtgtcatcacttccaccatcaattgtcttggatgccaaggaaatcacaactcaaattacgagacaaattttgcaaaaccaaaggagtacccctgagatggaaagacagagagctgtgtaccatctagccactaggcttgttcaaactgctcgaaactctcaattggatccagacagtttacgaatatatttaagtaacctcaagaagaagtacaaagaagattttcccaggactgaacaagttccagaaaagactgaagaataatcacaattctaatgtaataatatatcttaattcaaggaacctagaatttatttttctccttagagataaggaaaataacatttgccaaatttcatattttaattgaaaattacattatattaacatcacaattgtcatctatatattctatatgaaaaatatttattataacttaacaaatgagaactacttaaaggaatggtttttatgttaggagaaaatacaatacaccacttttttctcacaaaaattcacattattaagacctaagttcatttatacttacaagttatagtttaaaatattattgtaaataccctagtttaataaacacctttctttttaggtctgaaaaaaaaaaaaaaaa

SEQ ID NO: 285507 - DNA, 1000 bp, Homo Sapiens; identical to SEQ ID NO: 221156

SEQ ID NO: 285508 - DNA, 1000 bp, Homo Sapiens; identical to SEQ ID NO: 221159

SEQ ID NO: 285509 - DNA, 1000 bp, Homo Sapiens; identical to SEQ ID NO: 115800

SEQ ID NO: 285510 - DNA, 1000 bp, Homo Sapiens
ttcaaaagaaaattttctttcaacatttcttgaaggacatggagtggagattggatcatttaacaatataacaaaacttcctgatttgattttacgtatcttctatctacgcccttcctgtgcctgtgactctccccaaattgccctgttgccttgagctcttctgagctaaaggcagccttcagtccctatcagcgcctcctttacttcccagagaacttcacagagactctgtccttccatgcaaaggcttcctgaaataggggagactgactgagtagctcattcttgtgacttacagtgccaacatttaaaaaagtatgaaaatgatttatttttatatgatgtatacccataaagaatgctcatattaatgtacttaaattacacatgtagagcatatctgttatatgtttatgtaactatcaaatggttatttgttactaaagctatatttctgataaaaaatattttaggataattgcctacagagggatttatttttatgatgctgggaaatatgaaatgtattttaaaatttcactctgggcatatggatttatctatcaccattacttttttttaagtcacaatttcagaattttgggacatttgcattcaatttacaggtaccagtacgtacatattttaatagaaagatacaacctttttattttcactccttttatttctgctgcttggcacatttttgagttttcccacattatttgtctccatgataccactcaagcagtgtgctggacctaaaatactgactttagttagtatccttggatttttagattccccagtgtctaattccctgttataatttgcacaaacaaaacaaaatgttatgataatctttctccactgttctaatatatattgtatttttatttgatagcttgggatttaaaacatctctgttgaaggcttttgatccttttgagaaataaagatctgaaagaaatggcataatcttaaaaaaaaaaaaaaa

SEQ ID NO: 285511 - DNA, 1000 bp, Homo Sapiens; identical to SEQ ID NO: 115801

SEQ ID NO: 285512 - DNA, 1000 bp, Homo Sapiens; identical to SEQ ID NO: 221160

SEQ ID NO: 285513 - DNA, 1000 bp, Homo Sapiens; identical to SEQ ID NO: 221161

SEQ ID NO: 285514 - DNA, 1000 bp, Homo Sapiens; identical to SEQ ID NO: 115802

SEQ ID NO: 285515 - DNA, 1000 bp, Homo Sapiens
gtttcctcctttactgaaataggcatccacctgaatgcctacttcttggaaaccagcaaacgtctcgccaaccagatcccatttataattcagtattttatgctccgagagaatggtgactccttgcagaaagccatgatgcagatactacaggaaaaaaatcgctattcctggctgcttcaagagcagagtgagaccgctaccaagagaagaatccttaaggagagaatttaccggctcactcaggcgcgacacgcactctgtcaattctccagcaaagagatccactgaagggcggcgatgcctgtggttgttttcttgtgcgtactcattcattctaaggggagtcggtgcaggatgccgcttctgctttggggccaaactcttctgtcactatcagtgtccatctctactgtactccctcagcatcagagcatgcatcaggggtccacacaggctcagctctctccaccacccagctcttccctgaccttcacgaagggatggctctccagtccttgggtcccgtagcacacagttacagtgtcctaagatactgctatcattcttcgctaatttgtatttgtattcccttccccctacaagattatgagaccccagagggggaaggtctgggtcaaattcttcttttgtatgtccagtctcctgcacagcacctgcagcattgtaactgcttaataaatgacatctcactgaacgaatgagtgctgtgtaagtgatggagatacctgaggctattgctcaagcccaggccttggacatttagtgactgttagccggtccctttcagatccagtggccatgccccctgcttcccatggttcactgtcattgtgtttcccagcctctccactcccccgccagaaaggagcctgagtgattctcttttcttcttgtttccctgattatgatgagcttccattgttctgttaagtcttgaagaggaatttaataaagcaaagaaactttttaaaaacgt

SEQ ID NO: 285516 - DNA, 1000 bp, Homo Sapiens
cagatcagaagtactccatggacaacactccccacacgccaaccccgttcaagaacgccctggagaagtacggacccctgaagcccctgccacagaccccgcacctggaggaggacttgaaggaggtgctgcgttctgaggctggcatcgaactcatcatcgaggacgacatcaggcccgagaagcagaagaggaagcctgggctgcggcggagccccatcaagaaagtccggaagtctctggctcttgacattgtggatgaggatgtgaagctgatgatgtccacactgcccaagtctctatccttgccgacaactgccccttcaaactcttccagcctcaccctgtcaggtatcaaagaagacaacagcttgctcaaccagggcttcttgcaggccaagcccgagaaggcagcagtggcccagaagccccgaagccacttcacgacacctgcccctatgtccagtgcctggaagacggtggcctgcggggggaccagggaccagcttttcatgcaggagaaagcccggcagctcctgggccgcctgaagcccagccacacatctcggaccctcatcttgtcctgaggtgttgagggtgtcacgagcccattctcatgtttacaggggttgtgggggcagagggggtctgtgaatctgagagtcattcaggtgacctcctgcagggagccttctgccaccagcccctccccagactctcaggtggaggcaacagggccatgtgctgccctgttgccgagcccagctgtgggcggctcctggtgctaacaacaaagttccacttccaggtctgcctggttccctccccaaggccacagggagctccgtcagcttctcccaagcccacgtcaggcctggcctcatctcagaccctgcttaggatgggggatgtggccaggggtgctcctgtgctcaccctctcttggtgcatttttttggaagaataaaattgcctctctcttaaaaaaaaaaaaaaaaaa

SEQ ID NO: 285517 - DNA, 1000 bp, Homo Sapiens; identical to SEQ ID NO: 115804

SEQ ID NO: 285518 - DNA, 1000 bp, Homo Sapiens; identical to SEQ ID NO: 221162

SEQ ID NO: 285519 - DNA, 1000 bp, Homo Sapiens
agctgaaggatacgcagctccacctggatgatgccctccgaggccaggaggacctgaaggagcagctggcgattgtggagcgcagagccaacctgctgcaggccgaggtggaggagctgcgggctactctggagcagacggagagggcccggaaactggcggaacaggagctcctggactccaacgagagggtgcagctgctgcatacccagaacaccagcctcatccacaccaagaagaagctggagacagacctcatgcagctccagagtgaggtagaagatgccagcagggatgcaaggaacgctgaggagaaggccaagaaggccatcacggacgctgccatgatggcggaggagctgaagaaggagcaggacaccagcgcccaccttgagcggatgaagaagaacctggaacagacggtgaaggacctgcagcatcgtctagatgaggccgagcagctggcgctgaagggcgggaagaagcagatccagaaactggagaccaggatccgagagctggagtttgaacttgagggagagcagaagaagaacacagagtctgttaagggcctgaggaagtatgagcggagggtcaaggagctgacgtaccagagtgaagaggacaggaagaatgtgctgagattgcaggatctggtggataaactgcaagtgaaagtcaagtcctacaagaggcaggcggaggaggctgatgaacaagccaatgctcatctcaccaaattccggaaagctcagcatgagctggaggaggccgaggaacgtgcggatatcgcagaatctcaagtcaacaagctccgcgctaagactcgagacttcacctccagcaggatggtggtccacgagagtgaagagtgagccagcccttctggagcaggagcaggacagaagatatgcaaaatgtatattttcttgattcctgaccattgatacttaatgtccatgtgactctttttcacatgcaataaactttgctttgtttc

SEQ ID NO: 285520 - DNA, 1000 bp, Homo Sapiens
caatgagatggagatccagctcagccacgccaaccgcatggccgccgaggcccagaagcaagtcaagagcctccagagcttgctgaaggacacccagatccagctggatgatgcggtccgtgccaacgacgacctgaaggagaacatcgccatcgtggagcggcgcaacaacctgctgcaggctgagctggaggagctgcgtgccgtggtggagcagacagagcggtcccggaagctggcggagcaggagctgattgagaccagcgagcgggtgcagctgctgcattcccagaacaccagcctcatcaaccagaagaagaagatggagtcggatctgacccagctccagtcggaagtggaggaggcagtgcaggagtgcagaaacgccgaggagaaggccaagaaggccatcacggatgccgccatgatggcagaggagctgaagaaggagcaggacaccagcgcccacctggagcgcatgaagaagaacatggagcagaccattaaggacctgcagcaccggctggacgaggccgagcagatcgccctcaagggaggcaagaagcagctgcagaagctggaagcgcgggtgcgggagctggagggtgagctggaggccgagcagaagcgcaacgcagagtcggtgaagggcatgaggaagagcgagcggcgcatcaaggagctcacctaccagacagaggaagacaaaaagaacctgctgcggctacaggacctggtggacaagctgcaactgaaggtcaaggcctacaagcgccaggccgaggaggcggaggagcaagccaacaccaacctgtccaagttccgcaaggtgcagcatgagctggatgaggcagaggagcgggcggacatcgctgagtcccaggtcaacaagcttcgagccaagagccgtgacattggtgccaagcaaaaaatgcacgatgaggagtgacactgcctcgggaacctcactcttgccaacctgtaataaatatgagtgcca

SEQ ID NO: 285521 - DNA, 1000 bp, Homo Sapiens
cagcctccctgacgtctgccaccagcgcccccactcctcctcctttctttgctgtttgcaatcacacgtggtgacctcacacacctctgccccttgggcctcccactcccatggctctgggcggtccagaaggagcaggccctgggcctccacctctgtgcagggcacagaaggctggggtggggggaggagtggattcctccccaccctgtcccaggcagcgccactgtccgctgtctccctcctgattctaaaatgtctcaagtgcaatgccccctcccctcctttaccgaggacagcctgcctctgccacagcaaggctgtcggggtcaagctggaaaggccagcagccttccagtggcttctcccaacactcttggggaccaaatatatttaatggttaagggacttgtcccaagtctgacagccagagcgttagaggggccagcggccctcccaggcgatcttgtgtctactctaggactgggcccgagggtggtttacctgcaccgttgactcagtatagtttaaaaatctgccacctgcacaggtatttttgaaagcaaaataaggttttcttttttcccctttcttgtaataaatgataaaattccgagtctttctcactgcctttgtttagaagagagtagctcgtcctcactggtctacactggttgccgaatttacttgtattcctaactgttttgtatatgctgcattgagacttacggcaagaaggcattttttttttttaaaggaaacaaactctcaaatcatgaagtgatataaaagctgcatatgcctacaaagctctgaattcaggtcccagttgctgtcacaaaggagtgagtgaaactcccaccctacccccttttttatataataaaagtgccttagcatgtgttgcagctgtcaccactacagtaagctggtttacagatgttttccactgagcatcacaataaagagaaccatgtgctaaaaaaaaaaaaaaaaaaaa

SEQ ID NO: 285522 - DNA, 1000 bp, Homo Sapiens; identical to SEQ ID NO: 115805

SEQ ID NO: 285523 - DNA, 1000 bp, Homo Sapiens; identical to SEQ ID NO: 221163

SEQ ID NO: 285524 - DNA, 1000 bp, Homo Sapiens; identical to SEQ ID NO: 115806

SEQ ID NO: 285525 - DNA, 1000 bp, Homo Sapiens
attcagcgcccaccttgcccatggcctagcagaggatgaaaacacacagattgctcttctagacatcgatatatgtgggccatcgattcccaagataatgggattggaaggagagcaggttcaccagagtggctcaggctggtctccagtgtacgtggaagacaacctgggggtgatgtcagtgggcttcctgctcagcagtcctgatgatgctgttatctggaggggacccaagaaaaacggcatgatcaagcagttcctccgagatgtggactggggagaggtcgactacctcattgtggacaccccacctgggacgtcggatgaacacctctcggtcgtccggtacctggccacagcacacatcgatggagcagtgatcatcaccactccccaggagctgtcactccaggatgtccggaaagaaatcaacttctgccgcaaggtgaagctgcccatcatcggggtggtggagaacatgagtccgttcatctgtcctaagtgcaagaaagaatctcagatattccctcccacaaccgggggcgcggagctcatgtgccaggacttggaggtccctctcctcggcagagtgcccctggatccgctcataggtaagaattgtgacaaaggccagtcttttttcattgacgccccagattccccagccacgttagcctacagaagtataattcagagaatccaagagttttgtaatctccatcagtcaaaagaagagaacctcatcagttcctgaaacgagagaatgttcaggaccaagcagttaccgagcgaggcactcactgggcagcacatccagccagacccgaccagctccgggatggggtgggtcacagcaaaaggaccagatgctggtgtggtccgaagccactttctcagagacactttaatcattgagtatttgtacacttttctttagaacatatataaagggcattctctacaaatgtgccgttttaagaataaaaccccctcaaatctc

SEQ ID NO: 285526 - DNA, 1000 bp, Homo Sapiens; identical to SEQ ID NO: 115448

SEQ ID NO: 285527 - DNA, 1000 bp, Homo Sapiens; identical to SEQ ID NO: 115807

SEQ ID NO: 285528 - DNA, 600 bp, Homo Sapiens
gagggtccgcggttggtcagaccggggcacttggcctgaagacctggaattggcgacttcgatattaacaaggatggcggcggccgcagcaagtcgaggagtcggggcaaagctgggcctgcgtgagattcgcatccacttatgtcagcgctcgcccggcagccagggcgtcagggacttcattgagaaacgctacgtggagctgaagaaggcgaatcccgacctacccatcctaatccgcgaatgctccgatgtgcagcccaagctctgggcccgctacgcatttggccaagagacgaatgtccctttgaacaacttcagtgctgatcaggtaaccagagccctggagaacgttctaagtggtaaagcctgaagcctccactgaggattaagagcaacagccccagagcctgggctctgctggacttagtataatgtgaaaaaaatgtgttctcctattcctcataaagcttgtgctgtaaaatactttctcagggtgttcttgtcctcatctaccctctaccccttactgtgcaaccactgaggcaaagtagcttaatataaaaataaaactttattctgtctcaaaaaaaaaaaaaa

SEQ ID NO: 285529 - DNA, 823 bp, Homo Sapiens
gggtccttcaggtaggaggtcctgggtgactttggaagtccgtagtgtctcattgcagataatttttagcttagggcctggtggctaggtcggttctctcctttccagtcggagacctctgccgcaaacatgctccgccagatcatcggtcaggccaagaagcatccgagcttgatccccctctttgtatttattggaactggagctactggagcaacactgtatctcttgcgtctggcattgttcaatccagatgtttgttgggacagaaataacccagagccctggaacaaactgggtcccaatgatcaatacaagttctactcagtgaatgtggattacagcaagctgaagaaggaacgtccagatttctaaatgaaatgtttcactataacgctgctttagaatgaaggtcttccagaagccacatccgcacaattttccacttaaccaggaaatatttctcctctaaatgcatgaaatcatgttggagatctctattgtaatctctattggagattacaatgattaaatcaataaataactgaaacttgatatgtgtcacttttttatgctgaaagtatgctctgaactttagagtataggaaattaactattagaatttaaagaatttcttgaatttctgtagtttgaaaatacgactttaagctgctttagtaaaacacttccattttgtgtatagactgttggtaacttcactagagcatacataacaactggaactggaaattatacaaaagtaaattgggaaggatactccagcatctgacactggcaaaatggaaacctttgagtttctctt

SEQ ID NO: 285530 - DNA, 693 bp, Homo Sapiens
tccccgcccttctcttttctacagtatctgttacctcagtcagattgaggatgcacatatactgggaaaataatcgacttccagcgtccctcatgtagtctctacctgattcaggaatctctaacccagtatcggaacgttaagcggcttctccgctttcctgccgtgagaaactcgaggtgaccaacctccgtttccggttggctccggttgcagagttgagtgtcctgagaggtcagattgctgtcagacatggcccatgaacatggacatgagcatggacatcataaaatggaacttccagattatagacaatggaagatagaagggacaccattagaaactatccagaagaagctggctgcaaaagggctaagggatccatggggccgcaatgaagcttggagatacatgggtggctttgcaaagagtgtttccttttctgatgtattctttaaaggattcaaatggggatttgctgcatttgtggtagctgtaggagctgaatattacctggagtccctgaataaagataagaagcatcactgaagataatacctggaagcatcatagtggtttcttaactctccaaaataagatttcttctctgtagcctacttgtctggtttatcccttacagaatattagtaaagatttaatcaattaaaatatatataaaaaaaaaaaaaaaaa

SEQ ID NO: 285531 - DNA, 668 bp, Homo Sapiens
gcagcaagatggcggcggtctcaatgtcagtggtactgaggcagacgttgtggcggagaagggcagtggctgtagctgccctttccgtttccagggttccgaccaggtcgttgaggacttccacatggagattggcacaggaccagactcaagacacacaactcataacagttgatgaaaaattggatatcactactttaactggcgttccagaagagcatataaaaactagaaaagtcaggatctttgttcctgctcgcaataacatgcagtctggagtaaacaacacaaagaaatggaagatggagtttgataccagggagcgatgggaaaatcctttgatgggttgggcatcaacggctgatcccttatccaacatggttctaaccttcagtactaaagaagatgcagtttcctttgcagaaaaaaatggatggagctatgacattgaagagaggaaggttccaaaacccaagtccaagtcttatggtgcaaacttttcttggaacaaaagaacaagagtatccacaaaataggttggcactgactatatctctgcttgactgtgaataaagtcagctatgcagtatttatagtccatgtataataaatacatctcttaatctcctaataaattggacctttaaactacaaaaaaaaaaaaaaaa

SEQ ID NO: 285532 - DNA, 1000 bp, Homo Sapiens; identical to SEQ ID NO: 115810

SEQ ID NO: 285533 - DNA, 1000 bp, Homo Sapiens
aataattaggatctatgcaatttttaaactagtaatgggccaattaaaatatatataaatatatatttttcaaccagcattttactacttgttacctttcccatgctgaattattttgttgtgattttgtacagaatttttaatgactttttataatgtggatttcctattttaaaaccatgcagcttcatcaatttttatacatatcagaaaagtagaattatatctaatttatacaaaataatttaactaatttaaaccagcagaaaagtgcttagaaagttattgtgttgccttagcacttctttcctctccaattgtaaaaaaaaaaaaaaaaaaaaaaaaaaaaaaaaaattgcacaatttgagcaattcatttcactttaaagtctttccgtctccctaaaataaaaaccagaatcataattttcaagaggagaaaaaattaagagatacattccctatcacaacatatcaattcaacacattacttgcacaagcttgtatatacatattataaatagatgccaacatacccttctttaaatcacaagctgcttgactatcacatacaatttgcactgttactttttagtcttttactcctttgcattccatgattttacagagaatctgaagctattgatgtttccagaaaatataaatgcatgattttatacatagtcacccccatggtgggttgtcatatattcatgtaataaatctgagcctaaatctaatcaggttgttaatgttgggagttatatctatagtagtcaattagtacagtagcttaaataaattccccccatttaattcataattagaacaatagctattgcatgtaaaatgcagtccagaataagtgctgtttgagatgtgatgctggtaccactggaatcgatctgtactgtaattttgtttgtaatcctgtatattatggtgtaatgcacaatttagaaaacattcatccagttgcaataaaatagtattgaaagtg

SEQ ID NO: 285534 - DNA, 1000 bp, Homo Sapiens; identical to SEQ ID NO: 221165

SEQ ID NO: 285535 - DNA, 1000 bp, Homo Sapiens; identical to SEQ ID NO: 115811

SEQ ID NO: 285536 - DNA, 1000 bp, Homo Sapiens
agctaattctggggatagaatgataaaagactcaagcactaaaaatatacattgccgaatctctttttctagctttgaaaagttgtggcctgcttgtccctctgttgactggtcatctggaccatcgtacttgctgtggctacttctaagacaatgtagagggttattaaaccttgaaactgcctttcctaagtagagaacaagactattcaacaacttctttgctgaagcactgaggagatttgtaatactcctaaaggaagggccaaactagagattttcaatcatagactttgtgacagcatttggggaactaaaagattcatgtgtttcagcctagtgggagagagtgggggagaggaagagagagagagagcatgtatacccgtatgttatcatagagcacgattctccagtggatggatacctggaatggatcattaagatgaagagagtaattcacatttactctagaacctttaacaagcactgaaaggaagaagcctgagatttgatccttgacaatttctggaaagcactggtcagtcacactgtcctggacagagtccaagttacccactaaagcttgaggtggatgttggcttcactcctgcagcacaatgctggccctagaaagcgagcattttcattcttcccatggcagctgattctttggtgccagttttcatgttttctccataggccttgtgcagaaaggttttctcattgcatccatactgtgagaataaactgcagactgaaagaaacatgcctgcagggtcaggaactgggccactgttcccagaacgggttgtgcctcagaaatctatttctcttttagatgttgaaccctgagagaactaagatgatatttcagaagagttggctgccttctctggaaacaaggaaaacccaataattccgaggaacattgggggttaaataccaagaataaaaattggttcttctttgaaaaaaaaaaagaaaaaaaaaaaaaaaa

SEQ ID NO: 285537 - DNA, 1000 bp, Homo Sapiens
gcagtccaaggggctggatggcatgctggacccaagctcagctcagcgtccggacccaataacagttttaccaagggagcagctttctatcctggccacactgaggtgcatagcgtaatgtccatgttgttctacactctgatcacagcttttctgatcggcatacaggcggaaccacactcagagagcaatgtccctgcaggacacaccatcccccaagcccactggactaaacttcagcattcccttgacactgcccttcgcagagcccgcagcgccccggcagcggcgatagctgcacgcgtggcggggcagacccgcaacattactgtggaccccaggctgtttaaaaagcggcgactccgttcaccccgtgtgctgtttagcacccagcctccccgtgaagctgcagacactcaggatctggacttcgaggtcggtggtgctgcccccttcaacaggactcacaggagcaagcggtcatcatcccatcccatcttccacaggggcgaattctcggtgtgtgacagtgtcagcgtgtgggttggggataagaccaccgccacagacatcaagggcaaggaggtgatggtgttgggagaggtgaacattaacaacagtgtattcaaacagtacttttttgagaccaagtgccgggacccaaatcccgttgacagcgggtgccggggcattgactcaaagcactggaactcatattgtaccacgactcacacctttgtcaaggcgctgaccatggatggcaagcaggctgcctggcggtttatccggatagatacggcctgtgtgtgtgtgctcagcaggaaggctgtgagaagagcctgacctgccgacacgctccctccccctgccccttctacactctcctgggcccctccctacctcaacctgtaaattattttaaattataaggactgcatggtaatttatagtttatacagttttaaagaatcattatttattaaatttttggaagcataaa

SEQ ID NO: 285538 - DNA, 1000 bp, Homo Sapiens
tccagattgaaaagtgtcctctggctgagtggccactaggcccagacccagcccagcctgagccccaacaacaacttttccctcactgttccccaaaacatgcaccctggacttctctaatagaaaagtctccacccctacacaaggacagaaccctccacccctacccccaaccctcagacagacttatacacccctgagtgaggattacatgcccatcccagtgtcctaggaccttttcccaatactagccccccagtggtgaacagaacctcccaaatttgagttgcacccttccctgtggccttatgagctcagcctcgctttgaggtacccaccgtcctgtcagctccttgacctatgagctggggcctgactaggaaaagttgggagttaaggaggaaattagcattccttaatgttttgttttggtgctctgaatttcttctttattatagtcctatagttttactcctcagttcctcaccatcatcatcttgtctaagacccccattataatattcatgcgctgctttttcatcaaaacctaccctgtcctagagatctatgggcatttggtggatgataatgagcagcccctcccagatagaatgtcaatatttgagcagtaggatattggcatttgttagttaaaggcttaaatcaaaagaatgtccaatggtaggaatttcaaggtgtaggtcagatatttgagaataggggatttttttgatgtgccttaaattataccaaagattactaattattcctctttgcccaaaatacttgcatccaaggttctagtctctgttgctgtgctggtctttagccccactgctggcactgatgtccctcctttttcacggagacctatctgaggtacaggatggggctggcaccagatgatgtcccaccacagtccctcacctccggcctccacatgacagaaccaatttacactcaaccatgacctcacccctccttggtttctccctccccg

SEQ ID NO: 285539 - DNA, 1000 bp, Homo Sapiens
cagtacaacgcccagtacagctcggccagcaccccccagtacccgacagcacaccccctggtccaggcccagcagtggacttggtgagcgccgccccaacgagactcgcggccccaggcccaggccccaccccggcggcggtggcggcgaggaggcctcggtccttatggtggttattattattattataattattattatggagtcgagttgactctcggctccactagggaggcgccgggaggttgcctgcgtctccttggagtggcagattccacccacccagctctgcccatgcctctccttctgaaccttgggagagggctgaactctacgccgtgtttacagaatgtttgcgcagcttcgcttctttgcctctccccggggggaccaaaccgtcccagcgttaatgtcgtcacttgaaaacgagaaaaagaccgaccccccacccctgctttcgtgcattttgtaaaatatgtttgtgtgagtagcgatattgtcagccgtcttctaaagcaagtggagaacactttaaaaatacagagaatttcttcctttttttaaaaaaaaataagaaaatgctaaatatttatggccatgtaaacgttctgacaactggtggcagatttcgcttttcgttgtaaatatcggtggtgattgttgccaaaatgaccttcaggaccggcctgtttcccgtctgggtccaactcctttctttgtggcttgtttgggtttgttttttgttttgtttttgtttttgcgttttcccctgctttcttcctttctctttttattttattgtgcaaacatttctcaaatatggaaaagaaaaccctgtaggcagggagccctctgccctgtcctccgggccttcagccccgaacttggagctcagctattcggcgcggttccccaacagcgccgggcgcagaaagctttcgattttttaaataagaattttaataaaaatcctgtgtttaaaaaagaaaaaaagaaaaaa

SEQ ID NO: 285540 - DNA, 1000 bp, Homo Sapiens
tttattacaaatgcaaatttctataaatttaagaaaacaagtatataatttactttgtagactgtttcacattgcactcatcatattttgttgtgcactagtgcaattccaagaaaatatcactgtaatgagtcagtgaagtctagaatcatacttaacatttcattgtacaagtattacaaccatatattgaggttcattgggaagattctctattggctccctttttgggtaaaccagctctgaacttccaagctccaaatccaaggaaacatgcagctcttcaacatgacatccagagatgactattacttttctgtttagttttacactaggaaacgtgttgtatctacagtaatgaaatgtttactaagtggactggtgtcataaactttctccatttaagacacattgactcctttccaatagaaagaaactaaacagaaaactcccaatacaaagatgactggtccctcatagccctcagacatttatatattggaagctgctgaggcccccaagttttttaattaagcagaaacagcatattagcagggattctctcatctaactgatgagtaaactgaggcccaaagcacttgcttacatcctctgatagctgtttcaaatgtgcattttgtggaattttgagaaaaatagagcaaaatcaacatgactggtggtgagagaccacacattttatgagagtttggaattattgtagacatgcccaaaacttatccttgggccataattatgaaaactcatgatcaagatatatgtgtatacatacatgtatctggtttgtcaggctacaaggtaggctgcaaaattaaatctagacattcttttaatgccaccacacgtgttccgcttctctcttttaaagtatttataaaaatataaattgtacattttgtaaaatattatgtttgatttctctacttgtcatatcactaaataaacacgattttattgctgaaaaaaaaaaaaaaaaaaa

SEQ ID NO: 285541 - DNA, 1000 bp, Homo Sapiens; identical to SEQ ID NO: 221166

SEQ ID NO: 285542 - DNA, 1000 bp, Homo Sapiens
gacacatgatcgtcttccgtctcagcctgggtctcaccatccttgcttgtgagagcagagtcagcgaccacatggacctggggccctcagagctggtgggccgcagctgctaccagtttgtccacggacaggacgccacgaggatccgccagagccacgtggacttgctggacaagggtcaggtgatgactggttactaccgttggctgcagcgtgccgggggcttcgtgtggctgcagtctgtggccacagtggctgggagcgggaagagccccggggagcaccatgtgctttgggtcagccacgtgctcagccaagccgagggtggccaaactcctttggatgccttccagcttccagccagcgtggcctgtgaggaggcatccagcccggggccagagcccacagagccggagcctccgacggaagggaagcaggctgccccagcggagaacgaggccccccagacccagggcaaacgcatcaaagtggagcccggcccgagggaaaccaaaggctccgaggacagtggcgacgaggatccctccagccacccggccacaccgaggcccgagttcacctctgtcatccgggcaggggtcctgaagcaggatccggtgcggccatggggcctggcgcctcccggggaccccccgcccaccctcctgcacgcgggcttcctgccgccggtggtgcggggcctgtgcacacccggcaccatccgctacggccccgcggagctgggcctggtgtacccgcacctgcagaggctgggtccgggccccgcgctcccggaggccttttacccgcccctgggcctgccctacccggggcccgcgggcaccaggctgccgcggaagggggactgaggactggcagagctgccggcgccggaccctgcgacaaccggggtcccccaggacagtaggcccggctctgcccgtagccctgagaattaaacgccggctctccctgcaaaaaaaaaaaaaaaaaaaaaaaa

SEQ ID NO: 285543 - DNA, 1000 bp, Homo Sapiens; identical to SEQ ID NO: 115814

SEQ ID NO: 285544 - DNA, 1000 bp, Homo Sapiens; identical to SEQ ID NO: 221168

SEQ ID NO: 285545 - DNA, 692 bp, Homo Sapiens
ggcaggctgagggcaggtgggaagcaaacccggacgcatcgcagcagcagcagcagcagcagaagcagcagcagcagcctccgcagtccctccagagacatggatccccagacagcaccttcccgggcgctcctgctcctgctcttcttgcatctggctttcctgggaggtcgttcccacccgctgggcagccccggttcagcctcggacttggaaacgtccgggttacaggagcagcgcaaccatttgcagggcaaactgtcggagctgcaggtggagcagacatccctggagcccctccaggagagcccccgtcccacaggtgtctggaagtcccgggaggtagccaccgagggcatccgtgggcaccgcaaaatggtcctctacaccctgcgggcaccacgaagccccaagatggtgcaagggtctggctgctttgggaggaagatggaccggatcagctcctccagtggcctgggctgcaaagtgctgaggcggcattaagaggaagtcctggctgcagacacctgcttctgattccacaaggggctttttcctcaaccctgtggccgcctttgaagtgactcatttttttaatgtatttatgtatttatttgattgttttatataagatggtttcttacctttgagcacaaaatttccacggtgaaataaagtcaacattataagct

SEQ ID NO: 285546 - DNA, 1000 bp, Homo Sapiens
gtagtttagtacaataatctctatttgagaagttctcagaataactacctcctcacttggctgtctgaccagagaatgcacctcttgttactccctgttatttttctgccctgggttcttccacagcacaaacacacctcaacacacctctgccaccccaggtttttcatctgaaaagcagttcatgtctgaaacagagaaccaaaccgcaaacgtgaaattctattgaaaacagtgtcttgagctctaaagtagcaactgctggtgattttttttttctttttactgttgaacttagaactatgcctaatttttggagaaatgtcataaattactgttttgccaagaatatagttattattgctgtttggtttgtttataatgttatcggctctattctctaaactggcatctgctctagattcataaatacaaaaatgaatactgaattttgagtctatcctagtcttcacaactttgacgtaattaaatccaacttttcacagtgaagtgcctttttcctagaagtggtttgtagactcctttataatatttcagtggaatagatgtctcaaaaatccttatgcatgaaatgaatgtctgagatacgtctgtgacttatctaccattgaaggaaagctatatctatttgagagcagatgccattttgtacatgtatgaaattggttttccagaggcctgttttggggctttcccaggagaaagatgaaactgaaagcatatgaataatttcacttaataatttttacctaatctccacttttttcataggttactacctatacaatgtatgtaatttgtttcccctagcttactgataaacctaatattcaatgaacttccatttgtattcaaatttgtgtcataccagaaagctctacatttgcagatgttcaaatattgtaaaactttggtgcattgttatttaatagctgtgatcagtgattttcaaacctcaaatatagtatattaacaaatt

SEQ ID NO: 285547 - DNA, 1000 bp, Homo Sapiens; identical to SEQ ID NO: 115815

SEQ ID NO: 285548 - DNA, 1000 bp, Homo Sapiens; identical to SEQ ID NO: 115816

SEQ ID NO: 285549 - DNA, 1000 bp, Homo Sapiens; identical to SEQ ID NO: 115818

SEQ ID NO: 285550 - DNA, 1000 bp, Homo Sapiens
aggctccacgctggggcaacccccgtgcgctcagcttcgtactgagttcgctccagctcggggagggggtggagttcgatgtgctgcctgcctttgatgccctgggtcagttgactggcggctataaacctaacccccaaatctatgtcaagctcatcgaggagtgcaccgacctgcagaaagagggcgagttctccacctgcttcacagaactacagagagacttcctgaagcagcgccccaccaagctcaagagcctcatccgcctagtcaagcactggtaccaaaattgtaagaagaagcttgggaagctgccacctcagtatgccctggagctcctgacggtctatgcttgggagcgagggagcatgaaaacacatttcaacacagcccagggatttcggacggtcttggaattagtcataaactaccagcaactctgcatctactggacaaagtattatgactttaaaaaccccattattgaaaagtacctgagaaggcagctcacgaaacccaggcctgtgatcctggacccggcggaccctacaggaaacttgggtggtggagacccaaagggttggaggcagctggcacaagaggctgaggcctggctgaattacccatgctttaagaattgggatgggtccccagtgagctcctggattctgctggtgagacctcctgcttcctccctgccattcatccctgcccctctccatgaagcttgagacatatagctggagaccattctttccaaagaacttacctcttgccaaaggccatttatattcatatagtgacaggctgtgctccatattttacagtcattttggtcacaatcgagggtttctggaattttcacatcccttgtccagaattcattcccctaagagtaataataaataatctctaacaccatttattgactgtctgcttcgggctcaggttctgtcctaagccctttaatatgcactctctcattaaatagtcacaacaa

SEQ ID NO: 285551 - DNA, 1000 bp, Homo Sapiens
acagtgattttattagaagtttcatccgcaaattttcttccatttcattgctcagaaatgtcatgtggctacctgtaacttgaaggtggctacaaagatgactgtggacgtgggttgcactggccacccaaggatgtctgccacacctctccaaagccctccctacctaccaagatatacctgatatattccaccaggatatcctccctccagatatacttggttctctccaccaggttctttctttaaagcaggatttctcaactttgatacttactcacatttggggctagacagttctttgtttggaggctctcttgtgcattgtaggatgttgagcagcatctctggcctgtacccagtagatgccacccagttgtgacaattaaaagtgtcttgagactttatcatgtgtcttctgccctaggtgagaacccttgcactagaggaaccctacaccccaaccctggggggaatgtagggaagaggtggccaagccaaccgtggggttagctctaattattaagatatgcattataaataaataccaaaaaattgtctctggcaatagttaccttcccagatacaggtccccccttttttcccctaactcttttaagcaatgattgtaactattaggagacattgctctcccacgtatgtttttctttttagacaatgcagacaccaggaagttgtggagctaggatccatcctattgtcaatgagatgttctcatccagaagccatagaatcctgaataataattctaaaagaaacttctagagatcatctggcaatcgcttttaaagactcggctcaccgtgagaaagagtcactcacatccattcttcccttgatggtccctattcctccttcccttgcttcttggacttcttgaaatcaatcaagactgcaaaccctttcataaagtcttgccttgctgaactccctctctgcaggcagcctgcctttaaaaatagttgctgtcatccacttt

SEQ ID NO: 285552 - DNA, 1000 bp, Homo Sapiens
gtagagctggttggaccccccagccaagtggcagacgctggttttggtggccacagggggtggcccgtgcgacagaggcacatgctgaggcctgctggtggaggaggtagtacctttgaagatgctgttgaccacctggccacagccagtcaggggcctggtggtggggggcgtctcctgagacaggccagcttggatggcctccagcaactcagggataacatgggctccaggagggaccctctggtccagctgccccacccagctgcccttatcagctccaagtccctctctgagcctttattgaactccccagacccactgctctcctccttttcccaccctgattccccatcttcctcatctccaccatccacccaggaggcctctcccactggtgatatggctgtaggatcccccttgatgcaagaggtaggctccccgaaagaccctggaaagtccctgccacctgtaccaccaatgggcctgcccccaccccaggagtttggccgggggaacccattcatgctgttcctctgcctggccatcctgctggagcaccgcgaccacatcatgcgcaatgggctggattataatgagctggccatgcactttgaccgccttgtgcgaaaacaccacctggggcgcgtcctgcgccgggctagggctctctttgctgattacctgcagtcagaggtgtgggactcagaggagggggctgaggccacagccgcatcttgatcaggctttctcaagccctccatcggccccaccagatctccattctttgccatgagggccaacacatgagaccccacctccctccctgcctgccagccctagacttgttggagcatagagcccttcctccccaggcctaagtatgtggagctctgctttggcactgccccgcagaggccacgcctatttattctgtttctgttgttttgtttttaacaactatactttgcacacatgaaggtcactgtggtttgtgtgt

SEQ ID NO: 285553 - DNA, 1000 bp, Homo Sapiens; identical to SEQ ID NO: 115819

SEQ ID NO: 285554 - DNA, 1000 bp, Homo Sapiens; identical to SEQ ID NO: 221173

SEQ ID NO: 285555 - DNA, 1000 bp, Homo Sapiens; identical to SEQ ID NO: 115821

SEQ ID NO: 285556 - DNA, 1000 bp, Homo Sapiens; identical to SEQ ID NO: 115822

SEQ ID NO: 285557 - DNA, 1000 bp, Homo Sapiens; identical to SEQ ID NO: 221174

SEQ ID NO: 285558 - DNA, 948 bp, Homo Sapiens
atgcagccagaatctggggccaatggaacagtcattgctgagttcatcctgctgggcttgctggaggcgccagggctgcagccagttgtctttgtgctcttcctctttgcctacctggtcacggtcaggggcaacctcagcatcctggcagctgtcttggtggagcccaaactccacacccccatgtacttcttcctggggaacctatcagtgctggatgttgggtgcatcagcgtcactgttccatcaatgttgagtcgtctcctgtcccgcaagcgtgcagttccctgtggggcctgccttacccagctcttcttcttccatctgttcgttggagtggactgcttcctgctgaccgccatggcctatgaccaattcctggccatctgccggcccctcacctacagcacccgcatgagtcagacagtccagaggatgttggtggctgcgtcctgggcttgtgctttcaccaacgcactgacccacactgtggccatgtccacgctcaacttctgtggccccaatgtgatcaatcacttctactgtgacctcccacagctcttccagctctcctgctccagcacccaactcaatgagctgctgctttttgctgtgggttttataatggcaggtacccccatggctctcattgtcatctcctatatccacgtggcagctgcagtcctgcgaattcgctctgtagagggcaggaagaaagccttctccacatgtggctcccacctcactgtggttgccatattctatggttcaggtatctttaactatatgcgactgggttcaaccaagctttcagacaaggataaagctgttggaattttcaacactgtcatcaatcccatgctgaacccaatcatctacagcttcagaaaccctgatgtgcagagtgccatctggaggatgctcacagggaggcggtcactggcttga

SEQ ID NO: 285559 - DNA, 1000 bp, Homo Sapiens; identical to SEQ ID NO: 115823

SEQ ID NO: 285560 - DNA, 1000 bp, Homo Sapiens
ggggtctacctgctcttcgcctcgcgcctgcccggagcgctcatgcacacgctgccagccgcccagatggtcatcacggacctgtcggcacccgaggagcggcccgcggccctgggccggctgggcctctgcttcggcgtcggagtcatcctcggctccctgctgggcgggaccctggtctccgcgtacgggattcagtgcccggccatcctggctgccctggccaccctcctgggagctgtcctcagcttcacctgcatccccgccagcaccaaaggggccaaaactgacgcccaggctccactgccaggcggcccccgggccagtgtgttcgacctgaaggccatcgcctccctgctgcggctgccagacgtcccgaggatcttcctggtgaaggtggcctccaactgccccacagggctcttcatggtcatgttctccatcatctccatggacttcttccagctggaggccgcccaagctggctacctcatgtccttcttcgggctcctccagatggtgacccagggcctggtcatcgggcagctgagcagccacttctcggaggaggtgctgctccgggccagcgtgctggtcttcatcgtggtgggcctggccatggcctggatgtccagcgtcttccacttctgcctcctggtgcccggcctggtgttcagcctctgcaccctcaacgtggtcaccgacagcatgctgatcaaggctgtctccacctcggacacagggaccatgctgggcctctgcgcctctgtacaaccactgctccgaactctgggacccacggtcggcggcctcctgtaccgcagctttggcgtccccgtcttcggccacgtgcaggttgctatcaatacccttgtcctcctggtcctctggaggaaacctatgccccagaggaaggacaaagtccggtgaccgctgcccagacacagactggcaataaactcctactaaatccctccgaaaaaaaaaaaaaaaaaaaaaa

SEQ ID NO: 285561 - DNA, 1000 bp, Homo Sapiens; identical to SEQ ID NO: 115824

SEQ ID NO: 285562 - DNA, 1000 bp, Homo Sapiens
gaattcttcaagcactgaccctgaaaggctggctgtgaccacggcatggaccactgatagtaagattttgcccccaggaggagaggctggggtcactgagatccacggaaagtgtgaaaatatgactataacccctagaggtacaactgtgacccctacaaaggaaactgtatcccttggaaagcacactgtagctctaggagagaagactgagatcactggggcaatgaccatgacttctgtgggtcatcagtccatgacccctggagagaaggccctgacccctgtgggtcatcaatctgtgaccactggacagaagaccctgacctctgtgggttatcagtctgtgacccctggggaaaagaccctgacccctgtgggtcatcagtctgtgacccctgtgagtcatcagtctgtgagccctggaggaacgactatgacccctgtccattttcagactgagacccttagacagaatacagtggcccctagaaggaaggctgtggcccgtgaaaaggtgactgtcccctccagaaacatatcagtcacccctgaagggcagactatgcctttaagaggggagaatttgacttctgaggtgggcactcaccccaggatgggtaacttgggtcttcagatggaagctgaaaacaggatgatgctgtcctccagccccgtcatccagctcccggaacaaactcctctagcttttgacaaccgctttgttcccatctatggaaaccattcctctgtcaactcagtaacccctcaaacaagtcctctttctctaaaaaaagaaatcccagaaaactctgctgtggatgaagaagcctaagcccctctggtgtcagaaaccagggaaaacccttgtcttttcttctaagtgacatgttggaagccttctcatcccggggcaaagcaggcatcaaaaccagaataggccaatctcttttccattaaataaactgtaaacacaagaacccaaaaaaaaaaaaaaaaa

SEQ ID NO: 285563 - DNA, 1000 bp, Homo Sapiens; identical to SEQ ID NO: 115825

SEQ ID NO: 285564 - DNA, 1000 bp, Homo Sapiens
actgtcccccaaaaaaaaaaaagagtccttaccaatagcaggggctgcagtagccatgttaacatgacatttaccagcaacttgaacttcacctgcaaagctctgtggccacattttcagccaaagggaaatatgctttcatcttctgttgctctctgtgtctgagagcaaagtgacctggttaaacaaaccagaatccctctacatggactcagagaaaagagattgagatgtaagtctcaactctgtccccaggaagttgtgtgaccctaggcctctcacctctgtgcctctgtctccttgttgcccaactactatctcagagatattgtgaggacaaattgagacagtgcacatgaactgtcttttaatgtgtaaagatctacatgaatgcaaaacatttcattatgaggtcagactaggataatgtccaactaaaaacaaacccttttcatcctggctggagaatgtggagaactaaaggtggccacaaattctttgacactcaagtcccccaagacctaagggttttatctcctccccttgaatatgggtggctctgattgctttatccaaaagtggaagtgacattgtgtcagtttcagatcctgatcttaagaggctgacagcttctacttgctgtcccttggaactcttgctatcggggaagccagacgccatttaaaagtctgcctatcctggccaggtgtggtggctcacacctgtaatcccagcactttgggagaccaaggcgggcggatcacttaaagtcaggagtccaagaccagactcgccaacatggtgaaaccgtatctctaataaaaatacaaaaattagctgggcatggtgcgggcacctgtagtcctagctatcaagaggctgagacaggagaaacacttgaacctgggaggtggaggttgcattgagctgagatcgtgccactgcactccaggctgggtgacagagcgagactccatctcaaaaaaaaaaaaaagaaaaa

SEQ ID NO: 285565 - DNA, 1000 bp, Homo Sapiens
ctggctggtttacgagcaggacaggccgctaaagtgtgacgagcccatcctcagcaaccgatctggagaccaccgtggcaaattcaaggtggcgtccttccgtaaaaagtatgagctcagggccccggtggctggcacgtgttaccaggccgagtgggatgactatgtgcccaaactgtacgagcagctgtctgggaagtagggggttagcttggggacctgaactgtcctggaggccccaagccatgttccccagttcagtgttgcatgtataatagatttctcctcttcctgccccccttggcatgggtgagacctgaccagtcagatggtagttgagggtgacttttcctgctgcctggcctttataattttactcactcactctgatttatgttttgatcaaatttgaacttcattttggggggtattttggtactgtgatggggtcatcaaattattaatctgaaaatagcaacccagaatgtaaaaaagaaaaaactggggggaaaaagaccaggtctacagtgatagagcaaagcatcaaagaatctttaagggaggtttaaaaaaaaaaaaaaaaaaaaagattggttgcctctgcctttgtgatcctgagtccagaatggtacacaatgtgattttatggtgatgtcactcacctagacaaccagaggctggcattgaggctaacctccaacacagtgcatctcagatgcctcagtaggcatcagtatgtcactctggtccctttaaagagcaatcctggaagaagcaggagggagggtggctttgctgttgttgggacatggcaatctagaccggtagcagcgctcgctgacagcttgggaggaaacctgagatctgtgttttttaaattgatcgttcttcatgggggtaagaaaagctggtctggagttgctgaatgttgcattaattgtgctgtttgcttgtagttgaataaaaatagaaacctgaatgaagaaaaaaaaaaaaaaaa

SEQ ID NO: 285566 - DNA, 1000 bp, Homo Sapiens
ccagctgctcctagaccaccatttagtactatgagaccagcttcttcacaggttccacgagtcatgtcaacacagcgtgttgctaacacatcaacacagacaatgggtccacgtcctgcagctgcagccgctgcagctactcctgctgtccgcaccgttccacagtataaatatgctgcaggagttcgcaatcctcagcaacatcttaatgcacagccacaagttacaatgcaacagcctgctgttcatgtacaaggtcaggaacctttgactgcttccatgttggcatctgcccctcctcaagagcaaaagcaaatgttgggtgaacggctgtttcctcttattcaagccatgcaccctactcttgctggtaaaatcactggcatgttgttggagattgataattcagaacttcttcatatgctcgagtctccagagtcactccgttctaaggttgatgaagctgtagctgtactacaagcccaccaagctaaagaggctgcccagaaagcagttaacagtgccaccggtgttccaactgtttaaaattgatcagggaccatgaaaagaaacttgtgcttcaccgaagaaaaatatctaaacatcgaaaaacttaaatattatggaaaaaaaacattgcaaaatataaaataaataaaaaaaggaaaggaaactttgaaccttatgtaccgagcaaatgccaggtctagcaaacataatgctagtcctagattacttattgatttaaaaacaaaaaaacacaaaaaaatagtaaaatataaaaacaaattaatgttttatagaccctgggaaaaagaattttcagcaaagtacaaaaatttaaagcattcctttctttaattttgtaattctttactgtggaatagctcagaatgtcagttctgttttaagtaacagaattgataactgagcaaggaaacgtaatttggattataaaattcttgctttaataaaaattccttaaacagtgaaaaaaaaa

SEQ ID NO: 285567 - DNA, 1000 bp, Homo Sapiens; identical to SEQ ID NO: 221179

SEQ ID NO: 285568 - DNA, 1000 bp, Homo Sapiens; identical to SEQ ID NO: 115827

SEQ ID NO: 285569 - DNA, 828 bp, Homo Sapiens
catccctctggctccagagctcagagccacccacagccgcagccatgctgtgcctcctgctcaccctgggcgtggccctggtctgtggtgtcccggccatggacatcccccagaccaagcaggacctggagctcccaaagttggcagggacctggcactccatggccatggcgaccaacaacatctccctcatggcgacactgaaggcccctctgagggtccacatcacctcactgttgcccacccccgaggacaacctggagatcgttctgcacagatgggagaacaacagctgtgttgagaagaaggtccttggagagaagactgagaatccaaagaagttcaagatcaactatacggtggcgaacgaggccacgctgctcgatactgactacgacaatttcctgtttctctgcctacaggacaccaccacccccatccagagcatgatgtgccagtacctggccagagtcctggtggaggacgatgagatcatgcagggattcatcagggctttcaggcccctgcccaggcacctatggtacttgctggacttgaaacagatggaagagccgtgccgtttctagctcacctccgcctccaggaagaccagactcccacccttccacacctccagagcagtgggacttcctcctgccctttcaaagaataaccacagctcagaagacgatgacgtggtcatctgtgtcgccatccccttcctgctgcacacctgcaccacggccatggggaggctgctccctgggggcagagtctctggcagaggttattaataaacccttggagcatgaaaaaaaaaaaaaaaaa

SEQ ID NO: 285570 - DNA, 1000 bp, Homo Sapiens
actgtgcggccgtcgtgggggaagcgaaggttcctgattccacctacctcctaagtgaaggcttccgtccctggagaggaggcggcgccctgtatcggccttcgtcctccgcgggtgtgctagcgttgggacggtcctttgttgccgcgaggggtaggagtgggcgtggcggagccagctccgttcggaacactcccgggccgacccgactcgctcatcctgcaggagctgcggcgccaagatgagtggagaggagaacccagccagcaagcccacgccggtgcaggacgtacagggcgacgggcgctggatgtccctgcaccatcggttcgtggctgacagcaaagataaggaacccgaagtcgtcttcatcggggactccttggtccagctcatgcaccagtgcgagatctggcgcgagctcttctctcctctgcatgcacttaactttggcattggtggtgacggcacacagcatgtactgtggcggctggagaatggggagctggaacacatccggcccaagattgtggtggtctgggtgggcaccaacaaccacggacacacagcagagcaggtgactggtggcatcaaggccattgtgcaactggtgaatgagcgacagccccaggcccgggttgtggtgctgggcctgcttccgcgaggccaacatcccaacccacttcgggagaagaaccgacaggtgaacgagctggtacgggcggcactggctggccaccctcgggcccacttcctagatgccgaccctggctttgtgcactcagatggcaccatcagccatcatgacatgtatgattacctgcatctgagccgcctgggctacacacctgtttgccgggctctgcactccctgcttctgcgtctgctggcccaagaccagggccaaggtgctcccctgctggagcccgcaccctaagcatcctgctgccttcccacaacattaaactctccttcctcagtgaaaaaaaaaaaaaaaaaa

SEQ ID NO: 285571 - DNA, 1000 bp, Homo Sapiens
taaataaatgtttctagtcttccgtgtgtcaaaatcctcacctccttcataaccatctcccacaattaattcttgactatataaatttatggtttgataatattatcaatttgtaatcaattgagatttctttagtgcttgcttttctgtgactcaactgcccagacacctcattgtacttgaaaactggaacagcttgggaatgccatggggtttgataatctgccagggacatgaagaggctcagcttcctggaccatgactttggctcagctgatcctgacatgggagaacaaccacatttttctttgtgtgtgcttctagcagctgttcgggaggaccttgacccaatagtgttcccatgctgtttcttgtgaaatgctctcggctatgtagcagcttttgattccctgcataccctaggctgctgcccctatcctgtcccttgtttataacattgagaggttttctagggcacatactgagtgagagcagtgttgagaagtcggggaaaatggtgactacttttagagcaaggctgggcatcagcacctgtccagctctacttgtgtgatgtttcaggaactcagcccctttttctgcctaggataaggagctgaaagattaacttggatcttctaatggtccaaatcttttggtcacaataaagagtctccaaattagagactgcatgttagttctggatggatttggtggcctgacatgataccctgccagctgtgaggggaccccgtttttaagatgcatggccaagctctctgcaaatggaaatgcttacactgggtgttggggatgtttgctacctcctgctatttttgtggttttggttctcccactatggtaggacccctggccagcattgtggcttgtcatgtcagccccattgactaccttctcatgctctgaggtactactgcctctgcagcacaaatttctatttctgtcaataaaaggagatgaaaatattctaaaaaaaaaa

SEQ ID NO: 285572 - DNA, 1000 bp, Homo Sapiens
actgcctggcacatagtattcattctcttccctttaacatagaagtgtccagctgcgtacagtctagtaaccagcaactgtaaacgaacctgtgcctctaacaagcgattctaaaccacctatgagtatttcttttagggctcacttaaatacatgtttgtatatactgtattctagccagaataattttagatctgatcaggtagtagctaaaattagaaaaaaacaaaatagatgcttaaagaatttgcatccatttttgagtctaaatcttttaaaatatactgagatccacatctagtgaaatgtcagtgtcaaaatattatagattatagctaaaatccagattaatactcatttggggttttttatagtggaacttcatagtaatacaaaaagcagattgtcttcctgtctccgctgctcccacagtaggtattgaaactggtaaaatcagttttttgatagtgtgtgtatataagaaaaaatagatacacacattcttttttctcagtcaacacattgattgaacactctggcaaagatgctgtggtggatgaggttggagttcgaaagaagaagcaagcgctggcctggccttgaaagaaccgaagtctttcccattcacttctctagaaagctgccaagacagaggcagaaagaaatggatgatagttctgtcaagcacacttctgttctcttagaacttagaagtgtttctaagagaacagaagtaataagagaaacagttacgtgtggaattcaacatctttggttggaacgcattggctttttttttcttgttttgatagaaatggaattaagcaaaagtagtttttgtcttttctgttgtcttcaaattttatgccttttatttttaatttaatcccgttcaattatttaattgttatacattgacattaactgctgtattttgactttgttcaataattttgttctttcagggctagaaataaactttttaaaaaaaaaaaaaaaa

SEQ ID NO: 285573 - DNA, 1000 bp, Homo Sapiens; identical to SEQ ID NO: 221183

SEQ ID NO: 285574 - DNA, 1000 bp, Homo Sapiens
ggcagttggggtgaggccgtgcctctttgggggctaaaggtcttgggtggaggacaggcccctctgctgtgcccctatgccctgtgtgggcccaaccagtggacaatggagtctgggggagggggaaccccggggacatgcccccacccgggaggggccggtaacccctgggctatcttctagacggggcgaaccaggggtcattgacctgccccctgcacagggcagggaccgagtgagccactccttgtcccgagctcccgcccccactgggccctccttcctcctggtgctaatttggggaccccaggggccgcccccggcctcttctccatcctgcttggaccagggtcctgggtcttcccaaccataccccgagatcaggccccacctgccagctctactgggcttggagcacgtccgggcagtggagggagggacacagcctgggacaggaagcctcttgggttggagcaggagaccctcatttgccacccagaccaatgtgagcctgcccccaagccccctctcattggaagtggcaaggggcttccctcctgggggcagctacactcgtccccagaggcacattcgtgcacattctcacagacaccgtctcacacgttggctttggacaaccaggccccaacttggtccctgccctagggacctccagcctggtgcccagtgctcaggccacctcctggtccagtcaccacctgcagcctcggcagggcaggtacaggggccacctcggatgggagcctgggtccctgcctccgctctgcccctgggtggctgggaggagaggccctctcgggggtgacctgggcgtcagccgtggaaccccctcctcctccctggagtctgcctgagtccctcgagccgcgagccttcgctgaagtgcccttgctataaccccctctgcttctggtgtgtgacgaggcccccgatgttcttgattttcccagagaagcaaataaacagcgtgaacagcccc

SEQ ID NO: 285575 - DNA, 1000 bp, Homo Sapiens
aaagaagataaggcattctgagtgcaaacaaatgggggcttcttaaactacacaccagcagtcagtgaggaaaactttgaacaattattgagttgctttcttgggtctctataatcaataacctgtctgcagatatctatctatataaagatattatatataaatataaatttacatatatatgcacatgtatatatagttgtacatatatgtgtgtatatatatacttaaatgtaatatttacaaaataaaactgtgatctcgtctagagaaaatgtattcatattacaaactgctcttccatatttatgtaccatattatacctttttattattgttataattattatgggtatttctaattaatatgatgttgaaacctgtttggcaccttctggaagctaccaaaaaaatgacactccattgaagtgcttaaaagctgttctcataagaattctactggcctattgtaaaaaagaaaaaaaaaaagaaaaagaagaaagacacaaagaaaataatctaaacaccaaaaactaaacacaattccaatcctttttctgtacctcacgcgcataaatttgctgctcctatttttttttctgtttatgtgtttttatggatctaagttaaatcttttggcaatatataaaaatgtaaatagtaaactttatttattaagaatgtcatcttttttaatttatatttacacaattgttcatctaatttattttttctatacagttttaaatactcagacatattttgctgttcatgatatttttatcctgttctcatggatttgttttcccatactgttttctctgatctcaattacaggttggatctcacaaataataatgtcagagacagaaatattttgccactgttgattactatactttaaagttctatattatgaaaatatataatagcttgtacgcttcaaaaaaaaaaaaaaaaaaaaaaaaaaaaaaaaaaaaaaaaaaaaaaaaaaaaaaaa

SEQ ID NO: 285576 - DNA, 1000 bp, Homo Sapiens
ctgagggcagcaaaccgctggtgctgtcgctgtgagcaagagccggctggcacatttggaagccgcactgtatttaacttaatcaaatgtggtatgggaggggttggaaaccaagttgtctcctgggggggagaaaacaggttttatttttgtggctgtggttttttcccctttttaatctaactgcctgttgacattgacactcatcacggttgtaggctgtcatgaatgtgtacgtgcttaaccagtgaattccgtgttgctcttgtgaggcctttcctgtcatgacccagtgtgcttaagaacctgcctgatggggagtgtcggctgtgaaatctgcaaaaagagctgacattccagctgctgtgatcatgaatttgggggtgtactgtcctgcctgtgcatcttctcgcactgagattttgaggcagttgcagccctcggttagtctcccagtggaaaaatcggttgtgcctccctgcttcccaccatagctgcctgaaaacatgacgctctcaagcttgtccttccttcaggaagatgtccactcatgcccacccatgagagggcttgccgtatgccctggcctttgggcatatttatgtagagttcctttctcctaagacgtgagtttctcatgggggatgtacgagtaaaaaggttaacttctgttcttatgcgtggcgctgtgttcactttccagagtctctgttcgtttgtttggatggcggtctcggggtacggcagcgtgtgtgcgtacgtgtctgtgtgtgtgtgtgtgtgtgtgtgtgtgtgtgtgtgtgtgaaatcgtgcaaatctacaacatgtcccagcccattctccgttgaaacagatcacagcaacgacaaacgctcatggcgctgctttgctccacccgcttcagatagatcattgttagatatttcacatttttgtatggtggaaataaaaatgaaaaatgtatttccaaaagatgaaaattaaaaacattttcatagg

SEQ ID NO: 285577 - DNA, 1000 bp, Homo Sapiens
gcgcggcggaagagacggaatttcaacaagcaagcgacagaaatcctgaatgaatatttctattcccatctcagcaacccttaccccagtgaggaagccaaagaggagttagccaagaagtgtggcatcacagtctcccaggtatcaaactggtttggaaataagcgaatccggtacaagaagaacataggtaaatttcaagaggaagccaatatttatgctgccaaaacagctgtcactgctaccaatgtgtcagcccatggaagccaagctaactcgccctcaactcccaactcggctggttcttccagttcttttaacatgtcaaactctggagatttgttcatgagcgtgcagtcactcaatggggattcttaccaaggggcccaggttggagccaacgtgcaatcacaggtggatacccttcgccatgttatcagccagacaggaggatacagtgatggactcgcagccagtcagatgtacagtccgcagggcatcagtgctaatggaggttggcaggatgctactaccccttcatcagtgacctcccctacagaaggccctggcagtgttcactctgatacctccaactgatctcccagcaatcgcatcccggctgaccctctgccccagttggggcaggggcaggagggagggtttctctcccaagctgaagcggtcagactggaggtcgaagcaatcagcaaacacaataagagtctccttctcttctcttctttgggatgctatttcagccaatctggacacttctttatactctcttcccttttttttctgggtagaagccacccttccctgcctccagctgtcagcctggttttcgtcatcttccctgcccctgtgcctctgtcctagacttcccggggtccccgccctctctcatatcactgaaggatattttcaacaattagaggaatttaaagaggaaaaaaattacaaagaaaataataaaagtgtttgtacgttttcaaaaaaa

SEQ ID NO: 285578 - DNA, 1000 bp, Homo Sapiens; identical to SEQ ID NO: 115830

SEQ ID NO: 285579 - DNA, 1000 bp, Homo Sapiens
aaggcaagaagagcaagtccccaaagcccgtgaagccagtggaggacgaggatgaggccgggctgcagaagtccctcaagttcaacctgatgagcgatgcccctggggacagtccccgcatccacctgcccctcaactacccaccaggcagccctgacctgggccgccactatcgctctaactccccactgccttccatccagctgcagccccagtcaccctcagcctccaagaagcaccaggtggtacaggacctgccacctgcaaacacattcgtgggcaccggggacaccacgtccacgggctctgagcagtactccgactacagctaccgcaccaacccccccaaataccccagcaagcaggtaggccagccctttcagctcagcacaccccagcccctaccccacccctaccacggagccatctggaccgaggtgtgggagtgatggagcaggtttactgtgcctgcccgtgttgggggccagcctgagccagcagtgggaggtggggccttagtgcctcaccgggcacacggattaggctgagtgaagattaagggagggtgtgctctgtggtctcctccctgccctctccccactggggagagacctgtgatttgccaagtccctggaccctggaccagctactgggccttatgggttgggggtggtaggcaggtgagcgtaagtggggagggaaatgggtaagaagtctactccaaacctaggtctctatgtcagaccagacctaggtgcttctctaggagggaaacagggagacctggggtcctgtggataactgagtggggagtctgccaggggagggcaccttcccattgtgccttctgtgtgtattgtgcattaacctcttcctcaccactaggcttctggggctgggtcccacatgcccttgaccctgacaataaagttctctatttttggaaaaaaaaaaaaaaaaaaaaaaaaaaaaaaaaaaaaaaaaaaaaaaaaaaaaaaaa

SEQ ID NO: 285580 - DNA, 1000 bp, Homo Sapiens
ccaagatcttccatgtcaactggttccggaaggacaaggaaggcaaattcctctggccaggctttggagagaactccagggtgctggagtggatgttcaaccggatcgatggaaaagccagcaccaagctcacgcccataggctacatccccaaggaggatgccctgaacctgaaaggcctggggcacatcaacatgatggagcttttcagcatctccaaggaattctgggagaaggaggtggaagacatcgagaagtatctggaggatcaagtcaatgccgacctcccctgtgaaatcgagagagagatccttgccttgaagcaaagaataagccagatgtaatcagggcctgagtgctttacctttaaaatcattccctttcccatccataaggtgcagtaggagcaagagagggcaagtgttcccaaattgacgccaccataataatcatcaccacaccgtgagcagatctgaaaggcacactttgatttttttaaggataagaaccacagaacactgggtagtagctaatgaaattgagaagggaaatcttagcatgcctccaaaaattcacatccaatgcatagtttgttcaaatttaaggttactcaggcattgatcttttcagtgttttttcactttagctatgtggattagctagaatgcacaccaaaaaaatacttgagctgtatatatatatgtgtgtgtgtgtgtgtgtgtgtgtgtgtgtgtgtgcatgtatgtgcacatgtgtctgtgtggtatatttgtgtatgtgtatttgtatgtactgttattgaaaatatatttaatacctttggaaaaatcttgggcaagatgacctactagttttccttgaaaaaaagttgctttgttattaatattgtgcttaaattatttttatacaccattgttccttacctttacataattgcaatatttcccccttactacttcttggaaaaaaattacaaaatgaagttttatagaaaagatgg

SEQ ID NO: 285581 - DNA, 1000 bp, Homo Sapiens
agcaacacagagcactaggttcaattccctgaaggtggccactttaagagagaaatctgaaaaccccatttgctttcttttctcccatattggcatggatttctgtcttctctaacaccttgtgaccttctctatatcatgctttaaagtgtaataatatgattttttaaaagaaatttattacttgttgcaaaggtctttttaaaccagtttagatttcaagaaaaaataaatggaaatcatcgaaaattcatttcacattaatggtctaaaaataaaccaaaggacattatgtgtgcatgtgtgtataagtgcacacagaaatatatatacatatgtagactatatacatgtgtgtatatatgtgtatatatacatacacttgtataaatgtatatacacatatacctataatgtgtgtatgtgtatttattgaagaaacagataccatactcatttctaaaagaatattcagagaatatcaagatgattctggctgaaaaaggccagtggaaattcaggtgaaaatgttcatcaattcccattgcatcacctctgtaatttttcagctctctgtataaacattaaatgtcttatatagcagcaaaaatataaaatagttgtccatattttcacaggtgtggtgtaatttataaaattagaaagcaacttatcagctacttaagagaaatggcaagttttgatatgagtatacaatatataaaaatatatatagtgctatatatataaatatttggtctctatttcattttttgcatcagtattaatactaaaatatgtctcgctagtgatgtttttatgatatccctgatcctaactgaagagacagttatttatagtcatttattttaaaaaatgaaaataagtgaataataattaggttaacattgttgctccctgtgacaaaattttataagcaaatttcaaaagacatgttgtaaattaggaggctcaacaataaaacattatgctccagaaa

SEQ ID NO: 285582 - DNA, 1000 bp, Homo Sapiens
tgagccatgataaattacaaacaagagaaatgagaacttacaggattgcttgaaattattgtgggtattatctgtttaccagagatactaaatattagttttaattatgcatctctttgaacatcataaacacactttggtgttggtaacagtattttaagcatttttgttcacttttaaggactatttgtttagtgcatcttacaaactataaatcttaattggtatattttgaaatggtcgtgtaaatttttgccttatatatcatgaaaatagtcataacttaatttcttttcctgaaattcactgtaaaacattcaggggtcctaccatttctgttcaggaaatcttgtagtttattgttgttatttaacagtattaagtggatttttgtatatttcattttaactttatttgtgaatagtgattgtggcatgtttggggtgttattttaatatttcacgatactaaaattttaattttaaaaaattctggaagaaacagattcatgtgtaatggtgaatattggaccactactgcttttcacatttgtaaattggttttatgttaaaccttgtagcctaacaaactgctgttctttctaactgacagacatgtattaatattgtactttgaaggttataaatatgtggaaattccttcattttgttttgaaatttataataacaaaatctccatgttgttaaaatgtggttttattgagtcacagttctttcttggggatgaaggctgtgccgagtggggtccttttcttttatgggtcgttcttaagataatgaagtctcactgtgctagaggtgttattgttttctgtttgtgccaatcatttgcttagtaatttctgctgggttttttttatagcactctcaattataaagtatcaaatttgtcacttcatagaatgtatatttgatttgttgcaaatttgacattatagcttttcataggcttaattcttgcgtataaaagatgaaaatat

SEQ ID NO: 285583 - DNA, 1000 bp, Homo Sapiens; identical to SEQ ID NO: 221185

SEQ ID NO: 285584 - DNA, 1000 bp, Homo Sapiens
tctcgatgaggaagattctgaaggacctgagaaggagggagagggacacagctatttcagcagcacaaagacgctttgtgtgattgatccagaaaacagagattccctgggagagactgacatagacattgcaacagaagacaagtcccccgtggatacataatccccctctccctgtggagatgaacattctatccttgatgagcatgccagctatgtggtagggccagcccaccatgggggccaagacctgcacaggacaagggccacctggcctttcagttacttgagtttggagtcagaaagcaagaccaggaagcaaatagcagctcaggaaatcccacggttgacttgccttgatggcaagcttggtggagagggctgaagctgttgctgggggccgattctgatcaagacacatggcttgaaaatggaagacacaaaactgagagatcattctgcactaagtttcgggaacttatccccgacagtgactgaactcactgactaataacttcatttatgaatcttctcacttgtccctttgtctgccaacctgtgtgccttttttgtaaaacattttcatgtctttaaaatgcctgttgaatacctggagtttagtatcaacttctacacagataagctttcaaagttgacaaacttttttgactctttctggaaaagggaaagaaaatagtcttccttctttcttgggcaatatccttcactttactacagttacttttgcaaacagacagaaaggatacacttctaaccacattttacttccttcccctgttgtccagtccaactccacagtcactcttaaaacttctctctgtttgcctgcctccaacagtacttttaactttttgctgtaaacagaataaaattgaacaaattagggggtagaaaggagcagtggtgtcgttcaccgtgagagtctgcatagaactcagcagtgtgccctgctgtgtcttggaccctgcaatgcggccgc

SEQ ID NO: 285585 - DNA, 1000 bp, Homo Sapiens
ccgccgcatcatgtcagccaaggacgagcgggccagggagatcctgaggggcttcaaactaaattggatgaaccttcgggatgctgagacagggaagatactctggcaaggaacagaagacctgtctgtccctggtgtggagcatgaagcccgtgttcccaagaaaatcctcaagtgcaaggcagtgtctcgagaacttaatttttcttcgacagaacaaatggaaaaattccgcctggaacaaaaagtttacttcaaagggcaatgcctagaagaatggttcttcgagtttggctttgtgatccctaactccacaaatacctggcagtccttgatagaggcagcacccgagtcccagatgatgccagcaagcgtcttaactgggaacgttatcatagaaacaaagttttttgacgacgatcttcttgtaagcacatccagagtgagacttttctatgtttgaaagaagaatgtgtgtacatttcaagaatttgggttttttggagggaggaggaaactgtttacttttttcctccacacgtttgatttttgacacatacacccctaattccctcaacagcagaacctacctgcagccaccaggggaccagctctgtgtaggtaaccagatggctctttttcccaagccaccatcttccagctgaccagactaaactcccaaccccagaccagggcaggggacaggtctcaagtccttcccagcatacacacagggaacaaacacataccacaaaccggtaactgtacctgtcaccctccttgtctcctccttgggccctacaggctacacatctacctttggcccctggttttggaaaaattccgtgttcctgacccatgtttagttttttcctaccatttctatttcatacattctcatacatttaacttgtaaaatagactgtgatattattacataatgtaattaaaaatatgaattaaaatattcctacagtcaaaaaaaaaaaaaaaaaaaaaa

SEQ ID NO: 285586 - DNA, 1000 bp, Homo Sapiens; identical to SEQ ID NO: 221186

SEQ ID NO: 285587 - DNA, 1000 bp, Homo Sapiens
ctcaggccatgcactgttacttaaaggaacctaagcttgccaattctgtaactccttgggatatcttgctgagcttaattgcagctgccactcatgatctggatcatccaggtgttaatcaacctttccttattaaaactaaccattacttggcaactttatacaagaatacctcagtactggaaaatcaccactggagatctgcagtgggcttattgagagaatcaggcttattctcacatctgccattagaaagcaggcaacaaatggagacacagataggtgctctgatactagccacagacatcagtcgccagaatgagtatctgtctttgtttaggtcccatttggatagaggtgatttatgcctagaagacaccagacacagacatttggttttacagatggctttgaaatgtgctgatatttgtaacccatgtcggacgtgggaattaagcaagcagtggagtgaaaaagtaacggaggaattcttccatcaaggagatatagaaaaaaaatatcatttgggtgtgagtccactttgcgatcgtcacactgaatctattgccaacatccagattggttttatgacttacctagtggagcctttatttacagaatgggccaggttttccaatacaaggctatcccagacaatgcttggacacgtggggctgaataaagccagctggaagggactgcagagagaacagtcgagcagtgaggacactgatgctgcatttgagttgaactcacagttattacctcaggaaaatcggttatcataacccccagaaccagtgggacaaactgcctcctggaggtttttagaaatgtgaaatggggtcttgaggtgagagaacttaactcttgactgccaaggtttccaagtgagtgatgccagccagcattatttatttccaagatttcctctgttggatcatttgaacccacttgttaattgcaagacccgaacatacagcaatatgaatttggcttt

SEQ ID NO: 285588 - DNA, 1000 bp, Homo Sapiens; identical to SEQ ID NO: 115831

SEQ ID NO: 285589 - DNA, 1000 bp, Homo Sapiens
cctcagtttccccttcaaaaaatgaataagtcggacttattaactctgagtgccttgccagcactaacattctagagtattccaggtggttgcacatttgtccagatgaagcaaggccatataccctaaacttccatcctgggggtcagctgggctcctgggagattccagatcacacatcacactctggggactcaggaaccatgccccttccccaggcccccagcaagtctcaagaacacagctgcacaggccttgacttagagtgacagccggtgtcctggaaagcccccagcagctgccccagggacatgggaagaccacgggacctctttcactacccacgatgacctccgggggtatcctgggcaaaagggacaaagagggcaaatgagatcacctcctgcagcccaccactccagcacctgtgccgaggtctgcgtcgaagacagaatggacagtgaggacagttatgtcttgtaaaagacaagaagcttcagatgggtaccccaagaaggatgtgagaggtgggcgctttggaggtttgcccctcacccaccagctgccccatccctgaggcagcgctccatgggggtatggttttgtcactgcccagacctagcagtgacatctcattgtccccagcccagtgggcattggaggtgccaggggagtcagggttgtagccaagacgcccccgcacggggagggttgggaagggggtgcaggaagctcaacccctctgggcaccaaccctgcattgcaggttggcaccttacttccctgggatccccagagttggtccaaggagggagagtgggttctcaatacggtaccaaagatataatcacctaggtttacaaatatttttaggactcacgttaactcacatttatacagcagaaatgctattttgtatgctgttaagtttttctatctgtgtacttttttttaagggaaagattttaatattaaacctggtgcttctcactcacaaaaa

SEQ ID NO: 285590 - DNA, 1000 bp, Homo Sapiens
tttaaattacagttttcttataatgttgaaatgttttagaatcctttgaatctaagtatttgtttcctaaatgaaacatttgtacaacatttgatgtttttacttatgaaatattctcctcccccaagaaaatttaaactttttctctctatttaaaagctaagaaatgttttaaaggaaaaatgaaattatcttcctttagcttatttttaaggtaaaacagctttttactctgttattgtggtaatggacagaatattacatacaaaaatattctgggagagctttttcctagttggttttaaatcattgtgccacctgaaaggtttttagattttataggagctaatttgtccaccagcattaatgtaacacagtgtagttatgaaaatatattgaaggacaggaagtggacacgaagtgatttttgtaacctgagcagttaatgaatgtgccaacattttctaggaagggacagcaagaatattctgctctgtagttaaaatactggctggcttttgatgtcttcatgcttaattgtgatcactttcttgcactgtgatgtttttacgtgaatatgttgaagtagaagtctaccatattattttataaaatgttttctgtatggcaataaactgaaaacatggatcaacccttcttttgaaaataaactgagtcaatttagccttttaaaaatatagtcatctcttttaaatagaatcctcttccaccatcaaggctcaacattttgtaagcatccaaaaaattggtaattagggggcttgcactaaatttcactatcttcagtagagaggaactgtttggaacttagatttccaatgtgtatattctaatggagaaagcaagaggtagagtttgtatgtttgacttaccttagatttttattttccatacatactgcaaatgattgacttgttgcataaatgaagatcttctgttgtgtgcttttcaaacactgtaaataaatttgaaatttgaa

SEQ ID NO: 285591 - DNA, 1000 bp, Homo Sapiens
tggtatttttgggagagttaaggtataatttgaagattggcagaccagtcgcgctgattactcttagagaagaagaaatggaaaaatgaaagaaggcaggaaggaaagaaaggatgcaggaaggaaagaaaggatacaggaagagagggaagcagaaggcagtcatttttctattttccccacaaattatttcaaaaaaaatctgtattttctgggatatgtcattggcaagaggaagaactggtgtttcgaaagcagtatggattctttaaatgcctctcactcttacaagatagtaggctttgagataataaacttacccgtgtcaattaacatttaaactggcatatagaaaaaaaggaggatttttctgcattgtaaaataatcagtatggtttatatgttgaatttgacatttgtgtgtaatttcatggtggcctagtgttgtggtgcttctggtaatggtaatagaagctcaactatttttttgtggatttcagtttttatcatcagaagtcctagacagtgacatttcttaatggtgggagtccagctcatgcatttctgatcatacaaaacagtttgcagtaggttatctgtcatttcagttttttactgaaatttgagctaaacatttttacatgtaatacttgtatttaccaaagatttaaatcagttgattaattaattaactcaaatactgtgaactatctttaaaacactagaaaaaagaaatgttagtatctcaattacaccaactgtgcaaatgaactttgataaaatagaaataatctacattggcctttgtgaaatctggggaagagctttaggattttagtagatggatactgaatactcaggcccccttaaattattaatgtatacattgtgtttttgtctttatgctatgtacagagaaatgtgataattttttataataaatattttttatgatgataaaaaaaaaaaaaaaaaaaaaaaaaaaaaaaaaaaaaaaaaa

SEQ ID NO: 285592 - DNA, 1000 bp, Homo Sapiens
caatggctctgtcaaggaggctccagctcctactcccacttctctggaagtctcaagtccaccagatactacagaggaagtagatcataagcctaaactctgcaggctggctaaaggtgaaaatggctatggctttcacttaaatgcgattcggggtctgccaggctcattcatcaaagaggtacagaagggcggtcctgctgacttggctgggctagaggatgaggatgtcatcattgaagtgaatggggtgaatgtgctagatgaaccctatgagaaggtggtggatagaatccagagcagtgggaagaatgtcacacttctagtctgtggaaagaaggcctatgattatttccaagctaagaaaatccctattgtttcctccctggctgatccacttgacacccctccagattctaaagaaggaatagtggtggagtcaaaccatgactcgcacatggcaaaagaacgggcccacagtacagcctcacattcttcttccaattctgaagatacagagatgtgatgaaaacaagtaatagctttggctgtttatttgatagctgtttctgggtatttaataggaatcctttctcaaggaatgagttgtgacctgtttactgtctctttagaagaaaaactccactggaaaccattcaccatgtgtgattgtcttctgttatcatttgtcttacaggcggctattgcagacggctaatttatgcttaacttaggaagagataaggcaagagctagatttttttcatgtgatcttttccaagcttcaacttaacttaactacatttctctgtatgatgatgtctcttacttctacaggttccttgagcaccaaagatgattcataactctgtataggtgacagctgcttataaaagcatcttagcagataagcctattaaaattgtgcttttgtaacaatgttgtggttgctagaataaataccattaacaaatgcaaaaaaaaaaaaaaaaaaaaaaaa

SEQ ID NO: 285593 - DNA, 1000 bp, Homo Sapiens; identical to SEQ ID NO: 221187

SEQ ID NO: 285594 - DNA, 1000 bp, Homo Sapiens
tcggcactaccgctgagccggcgcccgggtgggcctggacacagatgacctctacgggagtctgaacgccaagatttagtctcaggattaaccttgcttgcacagaagttagaacactctcagttttttgtcatgtaagatactaacctagccaccctgggagagaacagaaagctgtccctggctgcgctttctcagccctgggaggggcgcctgaacccagaacatttccctaaccccaacctggtaggactcagccacttcttcaggaatttcacttatttggacgggattttaggtttccctcccttccccaaaccatacagttgagaagtaattcagaagtaggccagaagacactttattcgtttatattgtgagaaaacagccccatcaggcttgtgttaaggcaatggactgaatgagtgcgtgctgggtggggtggggcacggaggctggcgggttgcttcagccagtgcagtgagaacagcagccccacggccccatgggaggcggcgctgctctccccgagggcggctgggcagagcacatcccccaggacttgatgaccacacggggcagagagaaaccaaccaaggccagcacctccgtcggaagcatttggcacacacaccttcaatacacgtcaaggtcgcttccagttttagaaaacagaaatctgcatctcagcctgagacgcacagagaggtctcttcctgacccagacgcactcacgagccaggtcctgggggtatgggggctgccaggggcgcccgagccctctcctggggggcctgctgggcaggcgacctgctgacccacggtcactgctgtgttcagcccctcagctcggccccagcctatttcccgcctccatttgatgtttccaggttttcaaaactgcatttaacctgcgccagagagttcaccgtaggcatctttaataaactaactccagcaaaatgtgggtacgttactaaaaaaaaaaaaaaaaaaaaaa

SEQ ID NO: 285595 - DNA, 755 bp, Homo Sapiens
actgcctgcagaaccccagcccgactttccctgcgcactgggatcctgctggaacctcagctgcaacatgagctccgcagccaggtcccgcctcacccgcgccacccgccaggagatgctgttcttggcgttgctgctcctgccagttgtggtcgccttcgccagagctgaagctgaagaagatggggacctgcagtgcctgtgtgtgaagaccacctcccaggtccgtcccaggcacatcaccagcctggaggtgatcaaggccggaccccactgccccactgcccaactcatagccacgctgaagaatgggaggaaaatttgcttggatctgcaagccctgctgtacaagaaaatcattaaggaacatttggagagttagctactagctgcctaagtgtgcactttcaatctaactgtgaaagaatcttctgatgtttgtattatccttcttatattatattaacaaaataaatcaagttgtggtatagtcaatctatttcttaataatactgcaaaaataatgctgacacatcacaatttcatattttaaaatttccagaattttaagcaaaaagcattatgaaggaaggcttggtttaataaagactgattttgttcagtgttatatgttagctgatacatatttgttcatttatgtgattgcagtactttatagctacatatttaccttgaatgttacaattagcttgccaataaatattagtagctcttaagcattacatctgcaaaga

SEQ ID NO: 285596 - DNA, 1000 bp, Homo Sapiens
cgacgtgggcacacgctacatggtgaaccgagtgcaggatcacatccagagccgcacagtctactacctcatgaatatccatgtcacacctcgctccatctacctttgccgacatggcgagagtgaactcaacatcagaggccgcatcggaggtgactctggcctctcagttcgcggcaagcagtatgcctatgccctggccaacttcattcagtcccagggcatcagctccctgaaggtgtggaccagtcgcatgaagaggaccatccagacagctgaggccctgggtgtcccctatgagcagtggaaggccctgaatgagattgatgcgggtgtctgtgaggagatgacctatgaagaaatccaggaacattaccctgaagaatttgcactgcgagaccaagataaatatcgctaccgctatcccaagggagagtcctatgaggatctggttcagcgtctggagccagtgataatggagctagaacgacaggagaatgtactggtgatctgccaccaggctgtcatgcggtgcctcctggcctatttcctggataaaagttcagatgagcttccatatctcaagtgccctctgcacacagtgctcaaactcactcctgtggcttatggctgcaaagtggaatccatctacctgaatgtggaggccgtgaacacacaccgggagaagcctgagaatgtggacatcacccgggaacctgaggaagccctggatactgtcccagcccactactgagccctttccaagaagtcaaactgcctgtgtcctcatcgccttccacctttaggaaatgctatctttgctcttctcctactctgccttggcctcactgaggcaccccacttccagtgaagaagtcctccgcaactcccaaacaagcctcgcttgctggccgcaaccaaggagctatctagctctggaggaaactttctttcttaattcctattctctgacgaataaagacttactgcctacaagagg

SEQ ID NO: 285597 - DNA, 1000 bp, Homo Sapiens; identical to SEQ ID NO: 115835

SEQ ID NO: 285598 - DNA, 1000 bp, Homo Sapiens
ggagagagattaagaagaggaaatgtttgtttggtctccatgctcggatgcctccccctgtggagccccctactggagatggagcactcaccagggcagggccctgggggaggggtctcacgtcccctggggaagcgccggaggccggagccagagcccctgaggaggaggcagaaggggaaagtggaggagctggggccaccctcagcagtgcgcaatcagcccgagccccaggagcagagggagcgggctcatctgcagagggcactgcagcagccccatccggatgtttgcttccttccacccttctgccagcaccgcagggacctctggggacagtggacccccagacaggtcacccctggaacttcacattggtttccccacagacatccctaaaagtgccccccactcgatgactgcctcatcttcctcagtttcatccccatccccaggtcttcctagacgctcagcacccccttctcccctgtgccgtagtttgtctcctgggactgggggaggagtccgaggtggggttggttacctgtcccgaggggaccctgtccgggtccttgctcggagagtacggcctgatggctctgtgcagtacctggttgagtggggaggagggggcatcttctgaacagcctgcctctgcccagctccccattcacacacaccggcactttcataccctgacctctgacctcacctacagctgggatgtacctggagagatagggggtagttctccctactgcccaggctggaatccaagagtggggagtggggaagaggccctcttctctaccctccttcatgattcctgacccctcccatccttcccatttcctttgatgttattttgttacagctttttaaatattttttaaaattatttaacccctgggggcagagactgaggagggaggatgataagggatcccggactctgtatgattgaaataaagagaaataaacaaaaaaaaaaaaaaaaaaa

SEQ ID NO: 285599 - DNA, 1000 bp, Homo Sapiens; identical to SEQ ID NO: 221192

SEQ ID NO: 285600 - DNA, 623 bp, Homo Sapiens; identical to SEQ ID NO: 221193

SEQ ID NO: 285601 - DNA, 1000 bp, Homo Sapiens
ctttccttctttgggatagagaatgttccagacattctcgcttccctgaaagactgaagaaagtgtagtgcatgggacccacgaaactgccctggctccagtgaaacttgggcacatgctcaggctactataggtccagaagtccttatgttaagccctggcaggcaggtgtttattaaaattctgaattttggggattttcaaaagataatattttacatacactgtatgttatagaacttcatggatcagatctggggcagcaacctataaatcaacaccttaatatgctgcaacaaaatgtagaatattcagacaaaatggatacataaagactaagtagcccataaggggtcaaaatttgctgccaaatgcgtatgccaccaacttacaaaaacacttcgttcgcagagcttttcagattgtggaatgttggataaggaattatagacctctagtagctgaaatgcaagaccccaagaggaagttcagatcttaatataaattcactttcatttttgatagctgtcccatctggtcatgtggttggcactagactggtggcaggggcttctagctgactcgcacagggattctcacaatagccgatatcagaatttgtgttgaaggaacttgtctcttcatctaatatgatagcgggaaaaggagaggaaactactgcctttagaaaatataagtaaagtgattaaagtgctcacgttaccttgacacatagtttttcagtctatgggtttagttactttagatggcaagcatgtaacttatattaatagtaatttgtaaagttgggtggataagctatccctgttgccggttcatggattacttctctataaaaaatatatatttaccaaaaaattttgtgacattccttctcccatctcttccttgacatgcattgtaaataggttcttcttgttctgagattcaatattgaatttctcctatgctattgacaataaaatattattgaactacc

SEQ ID NO: 285602 - DNA, 1000 bp, Homo Sapiens
gctttacttcagaatggtttatttatagcaaactaagttgaaaattttagaaacagtctttgtgggtggatgttattaactgtcattgttgttgcccagagccatgggttttttaaccccaaattatccacatggtgtgtattatgaattctttgaactcttaaggtttttgtgagaaaaggactgtgaattcaaaacaataaggcacttgtgggtgcactacatagattctgacagtgttgtgattctgtataggatttttaaaaatgacaacattcacaaaatttattactttttaaaaaataacatgcctattaactggttgcactgatataaaagaaatatatttgtgttttgtttgtactaaaatgcaaaagcaagagtgcaatttttaaaatctagaagttaggggttttgttggagaaaaatggactgatctttaaactattcagtcttactgggatttttatgcatagaaactcacatataaacatgaaataaacagtgccagtattcataggaaagtgagaaactgtaatatttggccattattctattcaacaggttttagaggcatgccaccattttttccttatatttttgcttaatttttttaaattgtcatttaattcttaaactgtcatttatttgagatggaaataagatctaaagttagttgcctttgcctgtaaaacatgtgatttgcaaattattattttcctttttttttaacaaatggaagtaaatttgtttcacgtaaatcttaattttcaacctttctggataccttaattgtaactgtcagtttgcactggtcggtatatggaaacacattgctctaccctgctacttagttgattttaaagtgaatttacagtgatgagaaatttgtgaaaaatatattgtatttcttttgatgtttcaaaaggttgcctatgaaaaactgatttgttaaaacatgctacatgtccaaaaataaagaccagaatgacattttgat

SEQ ID NO: 285603 - DNA, 1000 bp, Homo Sapiens; identical to SEQ ID NO: 115837

SEQ ID NO: 285604 - DNA, 1000 bp, Homo Sapiens; identical to SEQ ID NO: 115838

SEQ ID NO: 285605 - DNA, 1000 bp, Homo Sapiens; identical to SEQ ID NO: 221195

SEQ ID NO: 285606 - DNA, 1000 bp, Homo Sapiens
actgttgttttttgccccatgatttttctttggtcagtaggaggctggattggagtggtgattattcccctggagctaagctcaggagcccgaagggagagactgagactgactcccttatctcttcatattctttattccctaccagatggatttttttttttttttttggagacggagtctcgccctgtcgccaggctggagtgtagtggcatgatctcgactcactgcaaaatctgcctcccgggttcaagcgattctcctacctcagcctcccgagtagctgggattacaggcatgtgccaccacgccaagctaatttttgtatttttagtagagacggggtttcaccatgttggccaggatggtctcgatctcttgacctcgtgatctgcctgccttggcctcccaaagtgctgggattacaggcgtgagccaccatgccccgccccagatggattttacatttgctcttttgtgtttcgctccaaagggttgtcttcctcgccaaaaggagggagggactttgaatttgatatgaatctttaaaaccagaattggctggatatttcccatgattgggaaaagagtgaaatgaggacattctgtaaactgtccctccctaattccaaggatcagaaactccccgttttgctgactcattccataactggagaaagaagctccattgaccgaagccacagggcagcatggaagtttaaattttctctaaaattaaaatgccaaggataaagctggctgcttccaggagggggaagaggagtggggagtgggcggtgaaacttttccagatgaacggaccataaatgtgttactggctttgtgcctgtagctcattttattatgacctatatgctcctgatttaaagagatctgtgtactgtttacttcccacttcccagaatcccttgtatctcctttctcgggaattgtattttctaataaatgacatttgagaaaaaaaaaaaaaaaaaaaaaa

SEQ ID NO: 285607 - DNA, 1000 bp, Homo Sapiens
agtacaaaacatggcttcatgcagtttatccagtcagttcctgtggctgaagttcttgatacagagggaagcattcagaacttttttagaaaatatgcaccaagtgagaatgggccaaatgggattagtgctgaggtcatggacacttacgttaaaagctgtgctggatattgcgtgatcacctatatacttggagttggagacaggcacctggataaccttttgctaacaaaaacaggcaaactcttccacatagactttggatatattttgggtcgggatccaaagcctcttcctccaccaatgaagctgaataaagaaatggtagaaggaatggggggcacacagagtgagcagtaccaagagttccgtaaacagtgttacacggctttcctccacctgcgaaggtattctaatctgattttgaacttgttttccttgatggttgatgcaaacattccagatattgcacttgaaccagataaaactgtgaaaaaggttcaggataaattccgcttagacctgtcggatgaagaggctgtgcattacatgcagagtctgattgatgagagtgtccatgctctttttgctgcagtggtggaacagattcacaagtttgcccagtactggagaaaatgaaactgggattgacccatcaagatgcttggctcaataagaaaaccacgttaggagcaacctttgtatattggagacttcagagtaaccagcaaggaagagaaatcttaatcttcaagttaccatattttccaaatattacatggtacctgagttctgcttccttggatgtcattgcttaaatatagtcttgaagggcttgttttgaaatattgtatatattttttcaaatgtatacattgttaataaattaagaaatgagaaacattcttatttatgtacatgttatgagagttctggaggaagtaatatgttgaaatagtaaaacattttagtttttgagtttaaaaaaaaaaaaaaaaaa

SEQ ID NO: 285608 - DNA, 1000 bp, Homo Sapiens
ttgggatgggataggactagcaccattttaagtccctgtcacctcttccgactctttctgagtgccttctgtggggactccggctgtgctgggagaaatacttgaacttgcctcttttacctgctgcttctccaaaaatctgcctgggttttgttccctatttttctctcctgtcctccctcaccccctccttcatatgaaaggtgccatggaagaggctacagggccaaacgctgagccacctgcccttttttctgcctcctttagtaaaactccgagtgaactggtcttcctttttggtttttacttaactgtttcaaagccaagacctcacacacacaaaaaatgcacaaacaatgcaatcaacagaaaagctgtaaatgtgtgtacagttggcatggtagtatacaaaaagattgtagtggatctaatttttaagaaattttgcctttaagttattttacctgtttttgtttcttgttttgaaagatgcgcattctaacctggaggtcaatgttatgtatttatttatttatttatttggttcccttcctattccaagcttccatagctgctgccctagttttctttcctcctttcctcctctgacttggggaccttttgggggagggctgcgacgcttgctctgtttgtggggtgacgggactcaggcgggacagtgctgcagctccctggcttctgtggggcccctcacctacttacccaggtgggtcccggctctgtgggtgatggggaggggcattgctgactgtgtatataggataattatgaaaagcagttctggatggtgtgccttccagatcctctctggggctgtgttttgagcagcaggtagcctgctggttttatctgagtgaaatactgtacaggggaataaaagagatcttatttttttttttatacttggcgttttttgaataaaaaccttttgtcttaaaaaaaaaaaaaaaaaaaaaaaaaaaaaaaaaaaaaaaaaaaa

SEQ ID NO: 285609 - DNA, 1000 bp, Homo Sapiens; identical to SEQ ID NO: 221196

SEQ ID NO: 285610 - DNA, 1000 bp, Homo Sapiens
gccactgcccctgggtgcggggtgatcgagtgcatccccgactgcacctcccgggaccagctgggccgccagacagacttcggcatgtacgactacttcacacgccagtacggggatgagtccactctggccttccagcaggcccgctacaacttcatccgaagcatggccgcctacagcctcctgctgttcctgctgcagatcaaggacagacacaacggcaacattatgctggacaagaagggtcatatcatccacatcgactttgggttcatgtttgaaagctcgccgggcggcaatctcggctgggaacccgacatcaagctgacggatgagatggtgatgatcatggggggcaagatggaggccacacccttcaagtggttcatggagatgtgtgtccgaggctacctggctgtgcggccctacatggacgcggtcgtctccctggtcactctcatgttggacacgggcctgccctgttttcgcggccagacaatcaagctcttgaagcacaggtttagccccaacatgactgagcgcgaggctgcaaatttcatcatgaaggtcatccagagctgcttcctcagcaacaggagccggacctacgacatgatccagtactatcagaatgacatcccctactgaggaggggaccttcgagggcctctgccccatgtgccctcaaagctgtcccacaatcatggagccctgcgacctccctgccctgccgccacatgcagtggaggagaggcctgtggcccaaagaacctggtagcgcctcctggggcagcacgtgggtggcgcagccttggtaacgccatggactgcagcgacaatcaatggatggtgctgtctatgcacaggtgtgagtcctctgtttgcactggacatattccctacctgtcttatttcataggtacatgaagtattgtgtataaaaaaagagataagatttaaccaacatcaacaaaataaaaacccaaaatagtaaaaaccc

SEQ ID NO: 285611 - DNA, 1000 bp, Homo Sapiens; identical to SEQ ID NO: 115839

SEQ ID NO: 285612 - DNA, 1000 bp, Homo Sapiens; identical to SEQ ID NO: 221197

SEQ ID NO: 285613 - DNA, 1000 bp, Homo Sapiens; identical to SEQ ID NO: 221198

SEQ ID NO: 285614 - DNA, 1000 bp, Homo Sapiens; identical to SEQ ID NO: 115843

SEQ ID NO: 285615 - DNA, 1000 bp, Homo Sapiens; identical to SEQ ID NO: 221202

SEQ ID NO: 285616 - DNA, 1000 bp, Homo Sapiens
gaaccatccctcatgaatggggcagagtatcaggcgggcaggtttgccttgagtctgcggaagcactgcttcggtgtgattcttggagcaaatacccggccagacttggatctccgagaccccatctgtgatgacttcttccagttgtggcaagacatggctgagagcaacgccaatatctatgagcagatcttccgctgcctgccatccaatgccacgcgttccctgcggactctccgggagtacgtggccgtggagcccttggccacggtcagtccccccttggctcggtctgagctcacccaggtccagggccacctggtccacttccccctcaagttcctagaggatgagtctttgctgcccccgctgggtagcaaggagggcatgatccccctagaagtgtggacatagttgaggcccccgtcagggagaggtcaccagctgctgtgccccaccacgtctggctccctgccccttaaccccaaggactgagggcagtgccctttgagatctggggaggcaggcattcctgaagggaactagaggtgttacagaggacccttacgtgagaaatagctgaaaagggcactcccaaccctgggctggggaggaggagagagtcccagagctcatcccccctgctgcccagtgcaaaccacttctccatgctgcaaaggagaagcacagctcctgccagggtgagcagggtcaagcctcttattccaggagaagggggctctgccccaggccctactacccattgttcccttcctcttcctgcccttgaaccccctccctgtcccagggccctcccagcccattgctgccaaggtggagggaaggataaagccacttctggcttcagcccccaccaggggaaggaaggagggcacattaactccctccaccagcctgctgacagacactaactttgtatccgttcaataagcatttcataaataaaggtgtagaaaaggttaaaaaaaaaaaaaaaaaa

SEQ ID NO: 285617 - DNA, 1000 bp, Homo Sapiens
ccgcagcctgctctgattctatggcttggttgttactataagagtaattgcctaacttgatttttcatctctttaaccaaacttgtggccaaaagatatttgaccgtttccaaaattcagattctgcctctgcggataaatatttgccacgaatgagtaactcctgtcaccactctgaaggtccagacagaaggttttgacacattcttagcactgaactcctctgtgatctaggatgatctgttccccctctgatgaacatcctctgatgatctaggctcccagcaggctactttgaagggaacaatcagatgcaaaagctcttgggtgtttatttaaaatactagtgtcactttctgagtacccgccgcttcacaggctgagtccaggcctgtgtgctttgtagagccagctgcttgctcacagccacatttccatttgcatcattactgccttcacctgcatagtcactcttttgatgctggggaaccaaaatggtgatgatatatagactttatgtatagccacagttcatccccaaccctagtcttcgaaatgttaatatttgataaatctagaaaatgcattcatacaattacagaattcaaatattgcaaaaggatgtgtgtctttctccccgagctcccctgttccccttcattgaaaaccaccacggtgccatctcttgtgtatgcagggctatgcacctgcaggcacgtgtgtatgcactccccgcttgtgtttacacaagctgtggggtgttacgcatgcctgcttttttcacttaataatacagcttggagagatttttgtatcacattataaatcccactcgctctttttgatggccacataataactactgcataatatggatacgccttatttgatttaactagttccctaatgatggacttttaagttgtttcctttttttttcttttttgctactgcaaacgatgctataataaatgtccttatcaaaaaaaaaaaaaaaaaa

SEQ ID NO: 285618 - DNA, 1000 bp, Homo Sapiens
gtgaatataatttatattacaatgtaaaagcttctttaatactaagtatttttcaggtcttcaccaagtatcaaagtaataacacaaatgaagtgtcattattcaaaatagtccactgactcctcacatctgttatcttattataaagaactatttgtagtaactatcagaatctacattctaaaacagaaattgtattttttctatgccacattaacatcttttaaagttgatgagaatcaagtatggaaaagtaaggccatactcttacataataaaattccttttaagtaattttttcaaagaatcacagaattctagtacatgtaggtaaatcataaatctgttctaagacatatgatcaacagatgagaactggtggttaatatgtgacagtgagattagtcatatcactaatatactaacaacagaatctaatcttcatttaaggcactgtagtgaattatctgagctagagttacctagcttaccatactatatctttggaatcatgaaaccttaagacttcagaatgattttgcaggttgtcttccattccagcctaacatccaatgcaggcaaggaaaataaaagatttccagtgacagaaaaatatattatctcaagtattttttaaaaatatatgaattctctctccaaatattaactaattattagattatattttgaaatgaacttgttggcccatctattacatctacagctgacccttgaacatgggggttaggggagctgacaattcgtgggtccgcaaaatcttaactacctaatagcctactattgaccataaaccttactgataacataaacagtaaattaacacatattttgcgtgttatatgtattatacactatattcctacaataaagtaagctagagaaaatgttatttagaaaatcataagaaagagaaaatatatttactattcattaaatggaagtgggtcaacaaaaaaaaaaaaaaaaaaaaaaaaaaaaa

SEQ ID NO: 285619 - DNA, 945 bp, Homo Sapiens
ctgggtgtacagcgtcctcgaaaccacgagcaagtgagcagatcctccgaggcaccagggactccagcccatgccatggcggattctgagcgcctctcggctcctggctgctgggccgcctgcaccaacttctcgcgcactcgaaagggaatcctcctgtttgctgagattatattatgcctggtgatcctgatctgcttcagtgcctccacaccaggctactcctccctgtcggtgattgagatgatccttgctgctattttctttgttgtctacatgtgtgacctgcacaccaagataccattcatcaactggccctggagtgatttcttccgaaccctcatagcggcaatcctctacctgatcacctccattgttgtccttgttgagagaggaaaccactccaaaatcgtcgcaggggtactgggcctaatcgctacgtgcctctttggctatgacgcctatgtcaccttccccgttcggcagccaagacatacagcagcccccactgaccccgcagatggcccggtgtaggcgaacttccctcatttctctctgcaatctgcaaataactcctccattgaaataactcctccccaccccaacaacaacattcccagcagaccaactcccaccccctctttgaggtaaaagtgcctttattgggagacttttgtcttccagcctgccaatcaaccctcctgggtgtggccaccatatgtgtgtgcctaggtcctccttctgcacgatccaataggagacaccagttctgactgaaccatgcccccacctaagtcacaaaatgagggaagtggggagttagatttcagagtccaggccctaggttgggacccactccaaataatctcctcggtgtgggtggtggttctatagagggataaatgaataataaacattgttaaaatataaaaaaaaaaaaaaaaa

SEQ ID NO: 285620 - DNA, 1000 bp, Homo Sapiens; identical to SEQ ID NO: 115845

SEQ ID NO: 285621 - DNA, 1000 bp, Homo Sapiens
taacacagctttaactatgtcatgcaacatatatatgttggtaggatgttattagagagatatgtgtgcatatatatttttttgcacctgaatcacccagcttttcataagtggtatgtttaattggtcattcagccaaccatcagtattttccccccacgacatgtgtaacacttttcagtctgtggatatctgatacattaagatttctttttataagtattcattttgaatgtgcatatagtcatttgaccccttccaaatacttgtagccaaacattggctagaacatcccaagatatgctgacactgtcctgttagcttcatattatacttgctagtttaggtctctatagaagccctatataatttagaatatgcccactgaatatctttaatagaaagtaacataaagctagtattcaatgtagagtattttcatatgtttttcacagcccgttacaaattggcaatgtttggttaatgtttgtattacttggaaatcgctacagcttggactatttttttctaaatttttagcattagtccatttctgctgctaacaattgaatccagaaatctactttctccatcttccactgttagtgccagtgagcaatactgttgtgcaacaaaaatgtcactttatctcagtgtgaatgagtagtctaaattccctttctaccattgatttaaatatatatattggtaagagagactgcccatgtgtttagaatagaattttttaaatgaaatgatcaacaggtggaatttgaaatatattcttctacaaaagagatttctttcccttttatattttgatgattgttttcttaagattaagatatgttcttgctcttttataagattatttaaattatgtttccctctgattttttttcaccattgtatttactaagttattggatttacatgaaatctggcactttagggtgttctttttctcacagagtatatttaataaaaatgctgtgtatat

SEQ ID NO: 285622 - DNA, 1000 bp, Homo Sapiens; identical to SEQ ID NO: 115846

SEQ ID NO: 285623 - DNA, 757 bp, Homo Sapiens
agcaggctgacagagaaatttttcattttctttcttgtttgactgtatgcaaacatcaaactaagaatggcaaaaatgaatctctcttcctatatattaatactaactttttctttgttttctcaaggtattttactttcagcatccaagtccataagaaatttagatgatgacatggtatttaatacattcaggttggggaaaggctttcagaaggaagacactgcagaaaaatcagttattgctccttccctggaacaatataaaaatgatgagagcagtttcatgaacgaagaggaaaataaagtttcaaagaacacaggctccaaacataatttcttaaatcatggtctgccactgaatctggctataaaaccttatcttgcactaaaaggatctgtagctttcccagctgagaatggagttcagaatactgaatcaacacaagaaaagagagaaattggggatgaagaaaactcagctaaatttcctataggaaggagagattttgacatgctcagatgtatgctgggaagagtctaccgaccttgttggcaagtctgatacctgttggtccacatcatcttttcagaagaaaataaaagcatttaattgccaatgggaggagaagcccatactgctactataacttgtgtatgttaaatgtctgttttaaaagaaagtagtgttaagatgtatcagtaactgaaatgatatgctttctctgtgcattaaactttgtgaaaattctgcataa

SEQ ID NO: 285624 - DNA, 1000 bp, Homo Sapiens
tcctcacagattgttgttagtttctggggaaagaatagtaaccatgcaatggaaaaaaatggacaacctcttgactaggttatcaaaattaacctcaccaataaagggtggatgttcaacatgtgccttcaaatgtgacccactgagaaggaaacaacatcactgtaacaacaacaaccagaaacgacagggggttttgactgaattcttcaaaaatgtcaatgtcatagaagacaaagaaaggttgtggaaatgtttcagattaaatgatagtaaaaacacctgacaactaaacatagtaagtaatactagactggattctgtaccagaggtaacataagtgctccaaaggacaatgttaggtcaactggcaaattggaatatagacagtcaatcagataagaagtatactttgattaagtaaaaaaaatccctattcttggaaaatacacaataaagtattttgaggtaaagggccataatgtatgcaatctactctcaaaaaattcagaaacatatatttgtgtgcatttgcatgtgcaacagtacacacaaacatacataaagagagcaattgataaggcaaataaggtaacatttaacaataatctgatacacataaatagagaaagagcaattgataaagtaaatgaggtaaaatttaacaataatctgagcaaaaggtatatgtgttttctttgagacagtctgattcttgcaacttattctgtaagttggaacttatttccaaacatgattgaaaaaaaaccccgcacttggcaacttcttctctttttcagcctagaaatgtctgtgttaagtggttttttatttattgttgttgtttgttgttattgttgttttgttgccaggctccaactcacaaaatacgagtttaaaaactgcgttgttatttttagagatttgtgataatacaacttgttataaaatttattcctcaataaatataatttctctactatgcaaaaaaaaaaaaaaa

SEQ ID NO: 285625 - DNA, 1000 bp, Homo Sapiens
ccttttaatccagcaggcccgagagatgcccctgctcaagtctgaagttgcagccggagtgaagaagagcggaccgctgcccagtgctgagagattggagaatgttctctttggacctcacgactgctcccatgcccctccggatggctatccaatcatcccaaccagtggatctgtgccagttcagaagcaggcgagcctcttccctgatgaaaaagaagataacttgctgggtaccacatgcctgattgccacagctgtcatcacgttatttaatgaacctagtgctgaagacagtaaaaagggtccattgacagttgcacagaaaaaagcccagaacatcatggagtcctttgaaaatccatttaggatgatcagcaaccgctggaagctggcccaggtacaagtacaaaaagactctaaagaagctgtcaagaagaaggcagctgagcaaacagctgcccgggaacaggcaaaggaggcgtgcaaagctgcagcagaacaggccatctccgtccgacagcaggtcgtgctagaaaatgctgcaaagaagagagagcgagcaacaagcgacccaaggaccacagaacagaaacaagagaagaaacgactcaaaatttccaagaagccaaaggacccagagccaccagaaaaagagtttacgccttacgactacagccagtcagacttcaaggcttttgctggaaacagcaaatccaaagtttcttctcagtttgatccaaataaacagaccccgtctggcaagaaatgcattgcagccaaaaaaattaaacagtcggtgggaaacaaaagcatgtcctttccaactggaaagtcagacagaggcttcaggtacaactggccacagagatagtcctggaagacacgtggcgcctgtggaccggaagcaccaaatgctggtgctgcttttgtacatacatatttttaaaccattaaaattcttcctgaagaaaaaaaaaaaaaaaaaaaaaaaaaaaaa

SEQ ID NO: 285626 - DNA, 1000 bp, Homo Sapiens
ttgtctactgacaagtccatttgaagacattttcaagcagtgtctacgaacaattattgaaggcacaagaagctccggctcccaccttgtctttgtcccgtcattgagagatgtgcaccatgagcctgtgtacccccagccgcctttcagctactccgatctgtctcgagaggacaaaaagcaagtacagtttgtgtccgagccctgcagcctctccataaacggagtgatcttcggcttgacatccacagatctgcttttccacctgggggccgaggagatcagtagttcttccggaacttcagacagattcagccgaatactcaagcacatcttgacccagaggagctactacccactctacccgccccaagaagacatggccattgactatgagtcgttctatgtttacgcacagctgcctgtcaccccagatgtcctcatcatcccgtcagagctgaggtacttcgtgaaggatgtcctcggctgtgtctgtgtgaaccctgggcgccttaccaaagggcaggtgggaggcaccttcgcccgactctaccttaggaggccggcagcggacggggcagagaggcagagcccatgcattgctgtgcaggtcgtcaggatctgaggcttctgtcctctgctgttctctgctgtgtgggcccttaaagtcttagccaagagccaagacatagccctgtgacaaggtgaacagttgggtgggaaaggagagaggagccagccagggaggggcagctgcagtgaccaggcccagcagggaggacttgtgcagccgggcctgcctctgagtggtgcctctcctggaaggaagctcttgcttctcagtccatgctccgtgtccagaagtaagccagctgtggatcccgcccactcagaaaaggcgagaaggctttgtgattttctacatgaatcaaacacagaaacaacttttggagaaattaaattctgagtgtgaaaaaaaaaaaaaaaaaaaaaaaaaaaa

SEQ ID NO: 285627 - DNA, 1000 bp, Homo Sapiens
cccacacaaaataaagagtggagctgaagctaagaaattgcctggagtaggaacaaaaattgctgaaaagattgatgagtttttagcaactggaaaattacgtaaactggaaaagattcggcaggatgatacgagttcatccatcaatttcctgactcgagttagtggcattggtccatctgctgcaaggaagtttgtagatgaaggaattaaaacactagaagatctcagaaaaaatgaagataaattgaaccatcatcagcgaattgggctgaaatattttggggactttgaaaaaagaattcctcgtgaagagatgttacaaatgcaagatattgtactaaatgaagttaaaaaagtggattctgaatacattgctacagtctgtggcagtttcagaagaggtgcagagtccagtggtgacatggatgttctcctgacccatcccagcttcacttcagaatcaaccaaacagccaaaactgttacatcaggttgtggagcagttacaaaaggttcattttatcacagataccctgtcaaagggtgagacaaagttcatgggtgtttgccagcttcccagtaaaaatgatgaaaaagaatatccacacagaagaattgatatcaggttgatacccaaagatcagtattactgtggtgttctctatttcactgggagtgatattttcaataagaatatgagggctcatgccctagaaaagggtttcacaatcaatgagtacaccatccgtcccttgggagtcactggagttgcaggagaacccctgccagtggatagtgaaaaagacatctttgattacatccagtggaaataccgggaacccaaggaccggagcgaatgaggcctgtatcctccctggcagacacaacccaataggagtcttaatttatttcttaacctttgctatgtaagggtctttggtgtttttaaatgattgtttcttcttcatgcttttgcttgcaatgtagtcaataaaacc

SEQ ID NO: 285628 - DNA, 1000 bp, Homo Sapiens
cagaaggttggtttgaagatcaagtgtttcatgtcaatgcctttggatttccacccactgagccctctagtactactagggcatactatggaaatattaatttttttggaggtccttctaatacatctgtgaagacttctgcaaaactaaaacagctagaagaggagaataaagatgctatgtttgtgtttttatctgatgtttggttggaccaggtggaagtattggaaaaacttcgcataatgtttgctggttattcaccagcacctccaacctgctttattctgtgtggtaatttttcatctgcaccatatggaaaaaatcaagttcaagctttgaaagattccctaaaaactttggcagatataatatgtgaatacccagatattcaccaaagtagtcgttttgtgtttgtacctggtccagaggatcctggatttggttccatcttaccaaggccaccacttgctgaaagcatcactaatgaattcagacaaagggtaccattttcagtttttactactaatccttgcagaattcagtactgtacacaggaaattactgtcttccgtgaagacttagtaaataaaatgtgcagaaactgcgtccgttttcctagcagcaatttggctattcctaatcactttgtaaagactatcttatcccaaggacatctgactcccctacctctttatgtctgcccagtgtattgggcatatgactatgctttgagagtgtatcctgtgcccgatctacttgtcattgcagacaaatatgatcctttcactacgacaaataccgaatgcctctgcataaaccctggctcttttccaagaagtggattttcattcaaagttttttatccttctaataagacagtagaagatagcaaacttcaaggcttttgagattcttaaagatcatctgaagaaaattcatcagttttctgcttaactctatatcttatgtgattctgatattacaataaaattatggtaaa

SEQ ID NO: 285629 - DNA, 1000 bp, Homo Sapiens; identical to SEQ ID NO: 115847

SEQ ID NO: 285630 - DNA, 1000 bp, Homo Sapiens
tttgtgttctttccagaggagcccaaggtgggcatcaagaccatcaaggtgtactgccagcgcatgcaggaggagaacatcacacgggctctcatcgtggtgcagcagggcatgacaccctccgccaagcagtccctggtcgacatggcccccaagtacatcctggagcagtttctgcagcaggagctgctcatcaacatcacggagcacgagctagtccctgagcacgtcgtcatgaccaaggaggaggtgacagagctgctggcccgatataagctccgagagaaccagctgcccaggatccaggcgggggaccctgtggcgcgctactttgggataaagcgtgggcaggtggtgaagatcatccggcccagtgagacggctggcaggtacatcacctaccggctggtgcagtagctaccgcctgacagcccctagaggcggacacacagcgacccccatccctgcaggacaaacgcccctgccctgccagaatccggcccccacagctctcacggctgctgctcctctggactccccaaggcaggtggcctccacccacgttctcccgtcctggggtgaggcttcctgtggcccagcccgccccattcacctgtggatttgtgcgagatgcagcctcagaaggaacaaggcccccagagggaggtcacctgggggcagctggtgccgggtcttcacccagaccacgctgggtcccctctgttgggggtttggggtccgggtctcccaccagccactgcttcctcctgggccctcggcttccacccctcgtcttccctccctcggggccctgatgcgtggcggcccccacccggcctcggctctttactccattcacagccatgcacgcgctcaagtacaccagggtgcgagatgccagctctggagttctcggttgttgtaggaggttgggtgttttcaaatggtaaagatgttttgacgaaataaatttgcttgatacagaaaaaaaaaaaaaaaa

SEQ ID NO: 285631 - DNA, 828 bp, Homo Sapiens
tagtcgcaccaagcgcggaactggggttgcggcgtctaagtgtttccggtggattcccagggactgtcggaggtgtggactctgcctgcctacctggtctgggaagatgttctaccatatctccctagagcacgaaatcctgctgcacccgcgctacttcggccccaacttgctcaacacggtgaagcagaagctcttcaccgaggtggaggggacctgcacagggaagtatggctttgtaattgctgtcaccaccattgacaatattggtgctggtgtgatccagccaggccgaggctttgtcctttatccagttaagtacaaggccattgttttccggccatttaaaggggaggtcgtggatgctgttgtcactcaggtcaacaaggttggactcttcacagaaattgggcccatgtcttgcttcatctctcgacattccatcccttcagagatggagtttgatcctaactccaacccaccatgttacaagacaatggatgaggatattgtgattcagcaggacgatgagatccgcttaaagattgtggggacccgtgtggacaagaatgacatttttgctattggctccctgatggacgattacttggggcttgtaagctgagcctggtggcctcctacccttggtcctactctaggaagtgtgattgtcacacttatcatgttgtccagaggtccagtctggctgctgttgtggaggcaaggaaggcaactcatcccagaaggcatctggtgcttcttgtagcttaactactgcctcctcatttttcagtatgtgttctaagtataaaaagtcctttggttctc

SEQ ID NO: 285632 - DNA, 1000 bp, Homo Sapiens; identical to SEQ ID NO: 221207

SEQ ID NO: 285633 - DNA, 1000 bp, Homo Sapiens
ggcgccagaaggagaaacgcatcaacccctgcagtgcggcccccatgctgcccagcccagggaagccggccagctacagcccccatatggtcacaccccaagggggcgcggggaccttaccgttgtcccaagcttccagcagtctgagcacaacagttactaccttatcctcagctgtggggacgctccaccccagccggacagctggagggggtgggggcgggggcggggctgcgccccccctcaattccatcccctctgtcactcccccacccccggccaccaccaacagcacaaaccccagccctcaaggcagccactcggctatcggcttgtcaggcctgaaccccagcacgggccctggcctctggtggaaccctgccccttaccagccttgatggcagcgggaatctggtgctgggggcagccggtgcagccccggggagccctggcctggtgacctcgccgctcttcttgaatcatgctgggctgcccctgctcagcaccccgcctggtgtgggcctggtctcagcagcggctgcggctgtggcagcctccatctccagcaagtctcctggcctctcctcctcatcctcttcatcctcatcctcctcctcctccacttgcagcgagacggcagcacagacccctggaggtccaggggggcccgaggcagggtccaaacctgagtgagggccagccatgcctcccctcccattcctctggtccctgccttggtcccttgcctgggaagaggggcaggaggccagtggtggggacgcagagggtcctcagagcaggagtgacaagggaggaaagaccaaaaaaacaaccaaccaaaaaaaaaaaaaaaaaaggaaagaaactaaccaacaaaagagaaaaccaaaaataatcacaacagaaaccagctgccccaaaggaaccagaggtgaaaaacaaacaaaaaaaaccaaaaacaaaccaaaaaaaaaaaaaaacctctaccccctctagagcc

SEQ ID NO: 285634 - DNA, 1000 bp, Homo Sapiens; identical to SEQ ID NO: 221208

SEQ ID NO: 285635 - DNA, 1000 bp, Homo Sapiens; identical to SEQ ID NO: 115848

SEQ ID NO: 285636 - DNA, 1000 bp, Homo Sapiens
gaggccctgcagagtggcaggctgacccctgctcagtatgaccgctatgtcaacaaggatatgtccatccaggagctggcggtcttggtatctgggcagaagtaggcacagctcttgcaactcttcgtaacggcagacgctggccctctcctacgacgcagtgacctccttggtgtcgtcctctccctagccctggtgcaggccaagcattttatacataccctcgctgccaggctgctcagagtcccgcccacatatgagacaggcactggctgaagacaggcaactctcgtcccaaccatcattcaccctgagtgacgtacttcatcctccaatgactggacaactgcgatgccttttcctcccttttcctgtacactcccagcaacaaactcctcatgataactgcacacaatctgaaaaccactgaaggacaagccaaccacagcagccaagcccactccttgcagcatgggtactggtggcacaccagacagtgacactgccccacaaaggcctgggcccgtgggggctgctgcctggcatgacatctctccagatttctggcttaaaaccaactttccatccgagaagcctcctcagtagttactctgctcatgagacagatctgggctccaagccaggaaaggtgaacagaaaccacaagtgtccagccctcggtgctggagtggacgttaattgtcagccaccagactgtcccggcacctacagagaatgtttcacagttctggcatttaaatcctttgatagtggattgtgctgctgttagccttagtttcagtgctttacaagtctcgcttattatctcattggtatttaggtatacaaaacagttgattattcaccacgccaatatctgggtctctgtatctcatgtagaacataagaaaatgggaactaatagggaaatttatttatagcatgaaaataaacctggtggctggagtctgcttgtacggtcaaaaaaaaaaaaaaaaaa

SEQ ID NO: 285637 - DNA, 1000 bp, Homo Sapiens; identical to SEQ ID NO: 284862

SEQ ID NO: 285638 - DNA, 1000 bp, Homo Sapiens
gaggtgcatcacacatccgcttcatatgttgggtaagaaacataacttagtctttattttgctgggcttctgacttttagaaacaaaattctaaaaatttgcaagtcaagtaagtgtgggtagcaaaaacaattatctttaaaaaaaaaatcacatcagtataggccatcaatatcacaatagatttctcaaggtaagagaaaataagctcatgagatgacattcacccttcaacataaaagaacattgggttaatgcagccttggtttcctgctgagctccagtattttgatagttaattatttcaactaatatatctatgtctatatcatctatcaatttattaagcaggtctatctttaatttgttatctcaaaccagtctgctggttaaatggaaacttaaaaatatccatggcaagctttgtatataaatgaacaaaaaagcaagcaaagcaaaacaataaactagcagaagaactagtaaaaatacaagcagattcctctactgatttctgtttttgtgatctctgactttcctttcaaatttttactgagaatatcgaaattggattatgcaataggatcttatttagttatttgaatctgtcttagccagttcctgtagaactgagaaataagattgactttgaatctgcaacgagatctgaaataaatgagaagccaagctcttcaagcacctctatctctgtactcctatatgaagagaacagtaaaaaaaattactggtatttatttggttaaattcatttgcttattttttctgtttttggaaataatttgtaataaaaatcatggcaacataattcactttccatcttttaaaaatatattttgccattaatccaatatgtttccatcactttgccaaaacctatttaaaacagtgaattaaattttcactaggtttgaatgatcatgttttataagaaatgtctttattttagtgtgttaaaaccttattaaacaaacaactgttt

SEQ ID NO: 285639 - DNA, 1000 bp, Homo Sapiens; identical to SEQ ID NO: 115849

SEQ ID NO: 285640 - DNA, 1000 bp, Homo Sapiens
ttcaatagactgccctggctctttcctaggccttccactacctcctttctttctcccactttctaggatcatttttatgtaaagtcacatatcccaggccctcaggttgaatccagagctgtagaggttacagtagcatcaccagccttgggggtccagagcctaatttatattcactatccttccaagtcccgggtagcagaagggttgccatagatctcagtttgatcaaaaagaaggcttagaattctgcagttaagctgaggtttaaactaaaaaatgtttccttgggtcagtggttttgaggtccagtagctaggcttttctcttttgtccttcctgttggaatgaaaacatttcgattttccttcatctgtgactggtgccatagacacaggtttatagttttaacttacagtattgtttgaaatttacctgtttttcttgtcaaacctgagcactcctcctgctgaagtttcttatttaattccagagtactgtcctctactctaaggcattacttttaagtgtattatgaaggcagttttcaaaggatatgaccagttggggtaattcaaattaaaaaggaaaagatttgtttggaagtaactggtgtctctaagaggaatttttagatgtcagtttggaggctctttcccccctcaattgagagctcttgttattcagagctccaagactagacctggctaacaaacataggagacaaagttaggaaacattgatacaagctttgtacagagatttgtacatttgtgtaataggccttttcatgctttatgtgtagctttttacctgtaacctttattacattgtaaattaaacgtaacttttgtcatttgggtgcaggctgtgaatttgtctctcagtcactgattgccactgccatctggaaatgtttgctaaaggcacagtcactgggcttgggaggcaatgctccatccccattatattacaaataaagatgccctaaatgagtgtg

SEQ ID NO: 285641 - DNA, 1000 bp, Homo Sapiens; identical to SEQ ID NO: 115850

SEQ ID NO: 285642 - DNA, 1000 bp, Homo Sapiens; identical to SEQ ID NO: 115851

SEQ ID NO: 285643 - DNA, 1000 bp, Homo Sapiens; identical to SEQ ID NO: 115852

SEQ ID NO: 285644 - DNA, 1000 bp, Homo Sapiens; identical to SEQ ID NO: 221212

SEQ ID NO: 285645 - DNA, 1000 bp, Homo Sapiens; identical to SEQ ID NO: 115853

SEQ ID NO: 285646 - DNA, 944 bp, Homo Sapiens; identical to SEQ ID NO: 115855

SEQ ID NO: 285647 - DNA, 1000 bp, Homo Sapiens; identical to SEQ ID NO: 115856

SEQ ID NO: 285648 - DNA, 874 bp, Homo Sapiens
aggaagcaaagaaggacctgggctttgggaagatctaaagacccaggaaggtctctgggtgggataaagccaagatgaaactccccttacttctggctcttctatttggggcagtttctgctcttcatctaaggtctgagacttccacctttgagacccctttgggtgctaagacgctgcctgaggatgaggagacaccagagcaggagatggaggagaccccttgcagggagctggaggaagaggaggagtggggctctggaagtgaagatgcctccaagaaagatggggctgttgagtctatctcagtgccagatatggtggacaaaaaccttacgtgtcctgaggaagaggacacagtaaaagtggtgggcatccctgggtgccagacctgccgctacctcctggtgagaagtcttcagacgtttagtcaagcttggtttacttgccggaggtgctacaggggcaacctggtttccatccacaacttcaatattaattatcgaatccagtgttctgtcagcgcgctcaaccagggtcaagtctggattggaggcaggatcacaggctcgggtcgctgcagacgctttcagtgggttgacggcagccgctggaactttgcgtactgggctgctcaccagccctggtcccgcggtggtcactgcgtggccctgtgtacccgaggaggccactggcgtcgagcccactgcctcagaagacttcctttcatctgttcctactgagctggtcccagccagcagttcagagctgccctctcctgggcagctgcctcccctcctctgcttgccatccctccctccacctccctgcaataaaatgggttttactgaaatggaaaaaaaaaaaaaaaaaa

SEQ ID NO: 285649 - DNA, 1000 bp, Homo Sapiens
aaaagctattttaatgctggatgatgaccactggcattggcatgttcagaaaactggatttaggaataatgttttgctacagaaaatcttcatagaagaactggaaggctatataagaaagggaatcaattctctggtattctggaaacctaaaaatatttggtgcactgctcaattaacaaacctacatggagaccttaattttgacttaacaaatagtttatgtactgctcttaggttgttttgataaagtgacattatagtgattaaattcttccccctttaaaaaaacagttagtggttttcactatttataaaaaattaattttgaactttttgttaaatttttaagttatagctttaaaggttttaataggaccttcttgaacgacttttctgtaatctgtttatctcccacttaatggaaaggcaaaggggtaccccaaatccagagctgcctacatttcaggcagccttggagtattttaaaaggaaaacattctttacttttatatgacattcttatactgctgtctcaaatccaaaaacatttcagagctcttgtctcagagatgtgtgttctttttgtcagagatatggttgatgagaatcttaaatgcttgttttgcactatcacttagtacctgtttgaccaaggtgttaaggggatagtacctcccaattcaagcagagaaactgacctgactaaagttaatcgcagatgaactagaagtcacaggttaattaaatgtaagtagattgtagatactgttttatatcaaacaatgtttataatgtgtatatagaattgttcactgtaaaaaaaatggccaaaatgtgttttttttttaataagtaacttgactataaaataaagccgtccgtgggacgactgacctcgtaaaaaaaaaaaaaaaaaaaaaaaaaaaaaaaaaaaaaaaaaaaaaaaaaaaaaaaaaaaaaaaaaaaaaaaaaaaaaaaaaaaaaaaaaaaaaaaaaa

SEQ ID NO: 285650 - DNA, 1000 bp, Homo Sapiens
gcaaatgaacgaagcgccaaccttcctttcggagtaatcctgcctgggaaggagagatttttagtgacatgttcagtgggttgcttgctagaatttttttaaaaaaacaacaatttaaaatcttatttaagttccaccagtgcctccctccctccttcctctactcccacccctcccatgtccccccattcctcaaatccattttaaagagaagcagactgactttggaaagggaggcgctggggtttgaacctccccgctgctaatctcccctgggcccctccccggggaatcctctctgccaatcctgcgagggtctaggcccctttaggaagcctccgctctctttttccccaacagacctgtcttcacccttgggctttgaaagccagacaaagcagctgcccctctccctgccaaagaggagtcatcccccaaaaagacagagggggagccccaagcccaagtctttcctcccagcagcgtttccccccaactccttaattttattctccgctagattttaacgtccagccttccctcagctgagtggggagggcatccctgcaaaagggaacagaagaggccaagtccccccaagccacggcccggggttcaaggctagagctgctggggaggggctgcctgttttactcacccaccagcttccgcctcccccatcctgggcgcccctcctccagcttagctgtcagctgtccatcacctctcccccactttctcatttgtgcttttttctctcgtaatagaaaagtggggagccgctggggagccaccccattcatccccgtatttccccctctcataacttctccccatcccaggaggagttctcaggcctggggtggggccccgggtgggtgcgggggcgattcaacctgtgtgctgcgaaggacgagacttcctcttgaacagtgtgctgttgtaaacatatttgaaaactattaccaataaagttttgtttaaaaaaaaaaaaaaaaaa

SEQ ID NO: 285651 - DNA, 1000 bp, Homo Sapiens; identical to SEQ ID NO: 115858

SEQ ID NO: 285652 - DNA, 1000 bp, Homo Sapiens
ttgaagatggagagaaaattgtggtccagggagagcctggggacgacttttacatcatcacggagggcaccgcgtccgtgctgcagcgccggtcccccaatgaggagtacgtggaggtggggcgcctgggaccctctgactacttcggggagattgcactgctgctgaaccggccccgggcggccactgtcgtggcccgggggcccctcaagtgtgtgaagctggaccggccccgcttcgagcgtgtgctggggccctgctctgagatcctcaagaggaacattcagcgttacaacagcttcatctccctcaccgtctgagcacagctcccgccctgcagccccagctccccagtgtggtggccgtgccctgctcgtctgtgtcgggggcccgggagccgctgtgtgaggtgtgggccgggtggggctgggtcccggcagcgtgaggactgccccttccccggactcactttttggaataaatgatcaccttgtgcatttccaaatcaaaggacaagcggacaaaatgcatcccaagatcaaggaagggacaggccagcttcctccccacacgcctccccggctgcctctgtgggcttctcctggggggcccaccccacccctgccagtctcctggagatgcttgaggatcggtcctccccagaaccaggccaggacgttgcccctggggcctggtgaccctgtgaggtcaggtcccccagattgaggtctgagtgtgggcaagtgtgtcaaaaggggctgccccccaggggagatgaggctgagagcagggagttgaggccgaagaagtcaaggcccctcccgcaaatgtgtacccctgcccgcgccactgcaccccgccgcacccccacctcccccgggggccctgctgcggatgccggagtgggagagtctctgagctgtgagattgatcttgcccctaattggagaggaagccgggcgccaagacacacggggctcctgccttgggagccagggcc

SEQ ID NO: 285653 - DNA, 1000 bp, Homo Sapiens
ttcattgatatgctcagtatgctgccacataagatgaatttaattatattcaaccaaagcaatatactcttacatgatttctaggccccatgacccagtgtctagagacattaattctaaccagttgtttgcttttaaatgagtgatttcattttgggaaacaggtttcaaatgaatatatatacatgggtaaaattactctgtgctagtgtagtcttactagagaatgtttatggtcccacttgtatatgaaaatgtggttagaatgttaattggataatgtatatataagaagttaaagtatgtaaagtataacttcagccacatttttagaacactgtttaacatttttgcaaaaccttcttgtaggaaaagagagctctctacatgaagatgacttgttttatatttcagattttattttaaaagccatgtctgttaaacaagaaaaaacacaaaagaactccagattcctggttcatcattctgtattcttactcactttttcaagttatctattttgttgcataaactaattgttaactattcatggaacagcaaacgcctgtttaataaagaactttgaccaaggctataaatgccacgtacattattttcagtattgttggttatatttaaattttccttacaataaagcacacttttataataaaatacatgaattattgtttttcatacttttttgcttgtttctttaaagttttctgacgtgcataatgcataattcattgaaaagcatgatagcaatgtggcatgtggaagcgaacccccagggcataacatagtaagaaagtatggttctgtatggcaataggtttttaaaattattagctattcatcatgtgtgggagaaataattgtggtgtgttgcagatttatttggccatttagaataaccaaatcaatctggctaactaggaatttatgtgtaaaattatctgattaaaacagctcaagtttgaaaaaaaaaaaaaaaaaa

SEQ ID NO: 285654 - DNA, 1000 bp, Homo Sapiens; identical to SEQ ID NO: 115859

SEQ ID NO: 285655 - DNA, 1000 bp, Homo Sapiens; identical to SEQ ID NO: 221213

SEQ ID NO: 285656 - DNA, 1000 bp, Homo Sapiens
ggctggaacgattggagatcccgcctcctttcagaccccgcccgtgtggccgcagcggcgagaactttgacaagttcttcacgcgggcggcgccagcgctgacccctccagaccgcctagtcctggccagcatcgaccaggccgatttccagggcttcacctacgtgaaccccgacttcgtgcacccggatgcccgcagccccaccagcccagtgcctgtgcccgtcatgtaatctcacccgccgccactaggtgtccccaacgtcccctccgccgtgccggcggcagccccacttcacccccaacttcaccaccccctgtcccattctagatcctgcaccccagcattccagctctgcccccgcgggttctagacgcccctcccaagcgttcctggccttctgaactccatacagcctctacagccgtcccgcgttcaagacttgagcggagcccgatattctccctgaccttagcgttctggactctgccccaatcgggtccagagaccacaccactaaccatccccaactccatggggttcgagactccatcttggtagttctgtgcctccccccagaccccgcccctggggaaatagcctcacggggttggctgttccagactcaggttccagaacagccctcggcctccgaggctccccgcctccactctagttctagatgagtgggaggcgtgcccccctcctccagtacgtcccgctgctgtgctctggggatttctgggatatatggaggattctttccccagaggctcccaatcagcttttgttctagacttccccatcccgaagccatcacttctccccgcagcccgcctgccgtgcatggctcctgtctggctcggacccaccccaactctccccagtgcctgccactctctgggactctcctcctcccctcctcttcccttagcctctcccacccggccacagctgctggagaataaatttgggatgctgatgaaaaaaaaaaaaaaa

SEQ ID NO: 285657 - DNA, 1000 bp, Homo Sapiens; identical to SEQ ID NO: 115860

SEQ ID NO: 285658 - DNA, 1000 bp, Homo Sapiens
gtcgcccacagaggaggaggaggaggaggaggaggaggaggaagaagaggctgaagaagaggaggaggaggaggattccgaggaggccccaccgccactgtcacccccgcagccggccagccctgctgaggaagacaaaatgccgccctacgacgagcagacgcaggccttcatcgatgctgcccaggaggcccgcaacaagttcgaggaggccgagcggtcgctgaaggacatggaggagtccatcaggaacctggagcaagagatttcttttgactttggccccaacggggagtttgcttacctgtacagccagtgctacgagctcaccaccaacgaatacgtctaccgcctctgccccttcaagcttgtctcgcagaaacccaaactcgggggctctcccaccagccttggcacctggggctcatggattggccccgaccacgacaagttcagtgccatgaagtatgagcaaggcacgggctgctggcagggccccaaccgctccaccaccgtgcgcctcctgtgcgggaaagagaccatggtgaccagcaccacagagcccagtcgctgcgagtacctcatggagctgatgacgccagccgcctgcccggagccaccgcctgaagcacccaccgaagacgaccatgacgagctctagctggatgggcgcagagaacctcaagaaggcatgaagccagcccctgcagtgccgtccacccgcccctctgggcctgcctgtggctctgttgccctcctctgtggcggcaggacctttgtggggcttcgtgccctgctctggggcccaggcggggctggtccacattcccaggccccaacagccttcaaagatgggtaaaggagcttgccctccctgggccccccaccttggtgactcgccccaccacccccagccctgtccctgccacccctcctagtggggactagtgaatgacttgacctgtgacctcaatacaataaatgtgatcccccacccaaa

SEQ ID NO: 285659 - DNA, 1000 bp, Homo Sapiens; identical to SEQ ID NO: 284868

SEQ ID NO: 285660 - DNA, 1000 bp, Homo Sapiens; identical to SEQ ID NO: 115861

SEQ ID NO: 285661 - DNA, 1000 bp, Homo Sapiens; identical to SEQ ID NO: 115863

SEQ ID NO: 285662 - DNA, 1000 bp, Homo Sapiens
tctcatagaacattgatctgttttacaggaaacaaaccttgccttgaaatttacacagtgagactgtacataattgcatgaaaatagctatttttttcctaagacatttttcattcatgaatattttcaagtttttcatactgtacacatttcttaaaacacatgataccagcagcaactgaaaatgaatgccgaatttggtacacatgtgttatctacctcaaggtaacaagagtatgtggcaaaacatataccacccatagtgcttcacaaaatgcacttctatttagccagcgtttattgtagtaaactattcttaataaaactcactcactgtttataaatgttctggtatgcattctttatagtgaagtgttaatacatcacatcttatttattttagcaaatcagtatattttctgtatttaattataaaaaattaacttagtttttaaaatttatttgcaaatatactttttccatttggcactatggtttgttgcctacctagctgcatctataatgtcagcttatcctaaggctgtccacgtacttaatttacttaagtgttcattttaagtaacgtgctcactgtgtataggaatttgtattttggaggtgcttgatctatctacaaagaaaaattaattaggaattactttattataaaatgctcctagaagtcttaattgtgtttattttttaaaaaaacaaatgttagacttgtgtgcatggaagtaattaaggtacatcattattgtagtttgaaagttgtacatgataagacattttgtttttactgtatgtttttactgaatgatctattccccatcccaaggcaagcatgaataaaattaggttaaacgtagcatgtggcatcgcagtctcttagaatttgtttcatctattttattttattgaatactgtctgtatctttggttatcctgtttgaagaaaaaggacaaataaaacatggccagcaaatacaaaaaaaaaaaa

SEQ ID NO: 285663 - DNA, 1000 bp, Homo Sapiens; identical to SEQ ID NO: 115864

SEQ ID NO: 285664 - DNA, 1000 bp, Homo Sapiens; identical to SEQ ID NO: 221216

SEQ ID NO: 285665 - DNA, 1000 bp, Homo Sapiens
cttcttgtgaaatgtctgttccagctgttgtgactgctgccatttttggaaacatctgcccaatcctgggtgatcaccacatcttttaggggaagtgacaagatgctctggtcatactctttttcccaactttggaaaacataaaaatcactcatataacagctcaaagagtaaaacatttggttcttctgacacttgtggtatagtattagtggaaagtgatttgtaatatgattttatatccacctacctattcatctacctgtgtgtatgtgtgtgtttgtgtgtctatttggcaattcacaagtcctgccaagtggtttctatgagcatctctgtttggtaaggaggacaattgtcagttttgagggggacatgtgttaaatcacagaaaaaaatggtgccttcttctgcgtttgtccctcctgccatgtgtaagttgtaaggattgcctttgtagttaatgtactctttggctttgtttgtttgttttcttcttcagtgaagcagccttactattcatagaagggctagaataggagaaaatgaaaggtagtgagtaattctttgataagatgaggaaataatgggaaaggttgaattaattcctgggcatggactaccagatgaccacaagttgcgttgaggccgcatctttcttcagcagcgtgcaatagctggctcctctataggagatgagcttcattgggagttcctagcaagttgactaaacagcaaaagttctttctcgtgggtaaatatacccacaggttctatgatttgtagctctaggtttcttgatgatcaaggagtgaagtaattgacagggaaaatatagacctatgataaataaccaggaagcattgcttttggacaaggaagaacagagggttttgattttaaaaagaagaaaaaaaaaccttattttttctttcttggcctcaagttcaatatggagaggattgcttccctgaatcctctcttccttccccttttagag

SEQ ID NO: 285666 - DNA, 1000 bp, Homo Sapiens; identical to SEQ ID NO: 115865

SEQ ID NO: 285667 - DNA, 1000 bp, Homo Sapiens
ttgctccagctgctgagtgaacagagtgcaagacagcactggcttgggttttatttttgcagccagttaactttgcatcaggtctacacagtccttgcagcctttgatttctccagttgtacagatttgaaatggggtgcccgggttcctctcgtttttccttcaatctacctagcatgcattttacacacattggaggagtcgtatgcactgtttttctcttgctgatggaggcaagaacgccttctaattagtataacttaaatggacgggattcacttaaaagcaagaagaaaagcacatgaacaggtgtcttaatgcatttggatactttggggtgtgtgcctgtctgtgtgtgtgtcttggtgaaggtgggctgtattttcaccaagccttttcataatcaagtttgctttgcaaaccatctggccttgcccccagcagtacagtccttcctaataacggggatgctctgtcatgtttctctgtaaattgttgtgtgttgggaagttctgttgaggcttagtttgatcttccatggtggacatgtctgttctgtatataaaaagcattacatctgtgttttagcaggtgggatttgaagcttttccacagtccttgtgctctgagatggctgttgagctctgctcagctgtcacagctgaattctttttttgtgctgaacactgggcagcctcaccttgttgccaacgtgcttctggggcccctgtgactgctgccggatgctgtgcacacaggcagagtgccttggcaggtttgtgcaccccttggcgagccagaactgggaaccccgcggagtgaccccaccttctcatggggggtcagggaggggagtgcctatttttaatcttgtttgttgcgcaatggaaatcactgtgatttgtacatatgccctaggaaaattttaccgctgtctaatttatgtaataatactgatgattctaggtttgtttaataaaactttatatcttttcagaag

SEQ ID NO: 285668 - DNA, 1000 bp, Homo Sapiens; identical to SEQ ID NO: 221218

SEQ ID NO: 285669 - DNA, 1000 bp, Homo Sapiens
ttgagaataaaatccaccccacccttgtttccccttggtatttgatgacaaattcagcagaagacccggcttgctccagtgtagctttctacatcccacatcaggtatattagagcttatccgaactggggaaagacggattgagattaactgctgggacctcctacctgcattatctcattctggcttccttgataattctgtgggccttgcagctttaactatagctcagctgctgcaagatttcagacttttgaggatgttgtgtgagggtgtttgactgtgactggggaagctcagactactttgtatgtgaatgcttcagggttttctttgttgagaacaactagcaacaaaggcaacccatgtgtgaccagttctccccaaggtctatgctaaattatagcaagagccctgggcaaccccaaacctagtcctggtagctgagcaccctgtaaggcaggagcaggcagctcagcttgagcagacattgggtggggggtggggggtggttgaggggggaggcagcacagtgcagcaaatgtttcttgggaggaagaagcctgatccatcaccatctgcttgactatgtagcttggattctcctttgtacctatccctttcgatttggctttaccttcatctatcttgatcctttcctggccaaatatcctcttgggcccaaatgaacattgtaccatagtcttctggaaagcaaacatgcttcctgctatgtaattgctaacattcatattagatgatgtgctgtagcttgatcttccttagcctactgccactgaggcagtaggttttaggtggtatcgtagtgccttttgattaatttaagtatttaattttcatcttccttctttggatctatttggcctctcaaatgaactgagattcctgttaaaaaagattgatgttattgtctcttgtagaggaaactaataaagtgtgtgtacctgtgtgaaaaaaaaaaaaaaaaaaaaaaaaaaaa

SEQ ID NO: 285670 - DNA, 1000 bp, Homo Sapiens; identical to SEQ ID NO: 115866

SEQ ID NO: 285671 - DNA, 1000 bp, Homo Sapiens; identical to SEQ ID NO: 221219

SEQ ID NO: 285672 - DNA, 1000 bp, Homo Sapiens; identical to SEQ ID NO: 115868

SEQ ID NO: 285673 - DNA, 1000 bp, Homo Sapiens; identical to SEQ ID NO: 115869

SEQ ID NO: 285674 - DNA, 1000 bp, Homo Sapiens; identical to SEQ ID NO: 115871

SEQ ID NO: 285675 - DNA, 1000 bp, Homo Sapiens
gtgggtgcaccctggaccccaccatggctcaccggccccccagccctgccctggcgtccgtgctgctggccttgctgctgagcggtgctgcccgagctgcggagatcgtgggcgggcacgaggcgcagccacactcccggccctacatggcctccctgcagatgcgggggaacccgggcagccacttctgcggaggcaccttgatccaccccagcttcgtgctgacggccgcgcactgcctgcgggacataccccagcgcctggtgaacgtggtgctcggagcccacaacgtgcggacgcaggagcccacccagcagcacttctcggtggctcaggtgtttctgaacaactacgacgcggagaacaaactgaacgacgttctcctcatccagctgagcagcccagccaacctcagtgcctccgtcgccacagtccagctgccacagcaggaccagccagtgccccacggcacccagtgcctggccatgggctggggccgcgtgggtgcccacgaccccccagcccaggtcctgcaggagctcaatgtcaccgtggtcaccttcttctgccggccacataacatttgcactttcgtccctcgccgcaaggccggcatctgcttcggagactcaggtggccccctgatctgtgatggcatcatccaaggaatagactccttcgtgatctggggatgtgccacccgccttttccctgacttcttcacgcgggtagccctctacgtggactggatccgttccacgctgcgccgtgtggaggccaagggccgcccctgaaccgcccctcccacagcgctggccgggaccccgagcctggctccaaaccctcgaggcggatctttggacagaagcagctcttccccgaacactgtggcgtccgggacggccccacccgtccccccacactccctcccacggggctccgggagacaggccggccctgcacctcaccccaccgtgacctcaataaacgttgaaactcc

SEQ ID NO: 285676 - DNA, 1000 bp, Homo Sapiens
tctgcaagggagcccctagcccctagcccctggcagacatagctgcttcagtgccccttttctctctgctagatggatgttgatgcactggaggtcttttagcctgcccttgcatggcgcctgctggaggaggagagagctctgctggcatgagccacagtttcttgactggaggccatcaaccctcttggttgaggccttgttctgagccctgacatgtgcttgggcactggtgggcctgggcttctgaggtggcctcctgccctgatcagggaccctccccgctttcctgggcctctcagttgaacaaagcagcaaaacaaaggcagttttatatgaaagattagaagcctggaataatcaggctttttaaatgatgtaattcccactgtaatagcatagggattttggaagcagctgctggtggcttgggacatcagtggggccaagggttctctgtccctggttcaactgtgatttggctttcccgtgtctttcctggtgatgccttgtttggggttctgtgggtttgggtgggaagagggccatctgcctgaatgtaacctgctagctctccgaagccctgcgggcctggcttgtgtgagcgtgtggacagtggtggccgcgctgtgcctgctcgtgttgcctacatgtccctggctgttgaggcgctgcttcagcctgcacccctcccttgtctcatagatgctccttttgaccttttcaaataaatatggatggcgagctcctaggcctctggcttcctggtagagggcggcatgccgaagggtctgtctgggtgtggattggatgctgggggtgtgggggttggaagctgtctgtggcccacttgggcacccacgcttctgtccacttctggttgccaggagacagcaagcaaagccagcaggacatgaagttgctattaaatggacttcgtgatttttgttttgcactaaagtttctgtgatttaacaataaaattctgttagcccccccg

SEQ ID NO: 285677 - DNA, 1000 bp, Homo Sapiens
cgcagtgacccagtcaccctgaatgtcctctatggtccagacctccccagcatttacccttcattcacctattaccgttcaggagaaaacctctacttgtcctgcttcgccgagtctaacccacgggcacaatattcttggacaattaatgggaagtttcagctatcaggacaaaagctctctatcccccaaataactacaaagcatagtgggctctatgcttgctctgttcgtaactcagccactggcaaggaaagctccaaatccatcacagtcaaagtctctgactggatattaccctgaattctactagttcctccaattccattttctcccatggaatcacgaagagcaagacccactctgttccagaagccctataagctggaggtggacaactcgatgtaaatttcatgggaaaacccttgtacctgacatgtgagccactcagaactcaccaaaatgttcgacaccataacaacagctactcaaactgtaaaccaggataacaagttgatgacttcacactgtggacagtttttccaaagatgtcagaacaagactccccatcatgataaggctcccacccctcttaaccgtccttgctcatgcctgcctctttcacttggcaggataatgcagtcattagaatttcacatgtagtagcttctgagggtaacaacagagtgtcagatatgtcatctcaacctcaaacttttacgtaacatctcaggggaaatgtggctctctccatcttgcatacagggctcccaatagaaatgaacacagagatattgcctgtgtgtttgcagagaagatggtttctataaagagtaggaaagctgaaattatagtagagtctcctttaaatgcacattgtgtggatggctctcaccatttcctaagagatacagtgtaaaacgtgacagtaatactgattctagcagaataaaacatgtaccacatttgctaaaaaaaaaaaaaaaaaaaaaaaaaaaaa

SEQ ID NO: 285678 - DNA, 1000 bp, Homo Sapiens
accttacacatcataaagcgaggcgatgggactggaggagtaactggatatttcactgtcaccttatactcggagactcccaagccctccatctccagcagcaacttaaaccccagggaggtcatggaggctgtgcgcttaatctgtgatcctgagactccggatgcaagctacctgtggttgctgaatggtcagaacctccctatgactcacaggttgcagctgtccaaaaccaacaggaccctctatctatttggtgtcacaaagtatattgcaggaccctatgaatgtgaaatacggaacccagtgagtgccagccgcagtgacccagtcaccctgaatctcctcccgaagctgcccatgccttacatcaccatcaacaacttaaaccccagggagaagaaggatgtgttagccttcacctgtgaacctaagagtcggaactacacctacatttggtggctaaatggtcagagcctcccggtcagtccgagggtaaagcgacccattgaaaacaggatactcattctacccagtgtcacgagaaatgaaacaggaccctatcaatgtgaaatacgggaccgatatggtggcatccgcagtaacccagtcaccctgaatgtcctctatggtccagacctccccagaatttacccttcattcacctattaccgttcaggagaaaacctcgacttgtcctgctttgcggactctaacccaccggcagagtattcttggacaattaatgggaagtttcagctatcaggacaaaagctctttatcccccaaattactacaaatcatagcgggctctatgcttgctctgttcgtaactcagccactggcaaggaaatctccaaatccatgatagtcaaagtctctgagacagcatctccccaggttacctatgctggtccaaacacctggtttcaagaaatccttctgctgtgacctcccaaagtgctaggattaaaacatgacccaccatgaaacccgccca

SEQ ID NO: 285679 - DNA, 1000 bp, Homo Sapiens
gggaccgatatggtggcatccgcagtgacccagtcaccctgaatgtcctctatggtccagacctccccagaatttacccttcgttcacctattaccattcaggacaaaacctctacttgtcctgctttgcggactctaacccaccggcacagtattcttggacaattaatgggaagtttcagctatcaggacaaaagctttctatcccccagattactacaaagcatagcgggctctatgcttgctctgttcgtaactcagccactggcaaggaaagctccaaatccgtgacagtcagagtctctgactggacattaccctgaattctactagttcctccaattccatcttctcccatggaacctcaaagagcaagacccactctgttccagaagccctataagtcagagttggacaactcaatgtaaatttcatgggaaaatccttgtacctgatgtctgagccactcagaactcaccaaaatgttcaacaccataacaacagctgctcaaactgtaaacaaggaaaacaagttgatgacttcacactgtggacagtttttcccaagatgtcagaataagactccccatcatgatgaggctctcacccctcttagctgtccttgcttgtgcctgcctctttcacttggcaggataatgcagtcattagaatttcacatgtagtataggagcttctgagggtaacaacagagtgtcagatatgtcatctcaacctcaaacttttacataacatctcaggaggaaatgtggctctctccatcttgcatacagggctcccaatagaaatgaacacagagatattgcctgtgtgtttgcagagaagatggtttctataaagagtaggaaagctgaaattatagtagagtcccctttaaatgcacattgtgtggatggctctcaccatttcctaagagatacattgtaaaacgtgacagtaagactgattctagcagaataaaacatgtactacatttgctaaa

SEQ ID NO: 285680 - DNA, 1000 bp, Homo Sapiens
ttggttgcattgaaaagggcgcaatcagagcttgcagctcatcagaaaaaaattctccatgttgacaaccatattggtatctcaattgcggggcttactgctgatgctagactgttatgtaattttatgcgtcaggagtgtttggattccagatttgtattcgatagaccactgcctgtgtctcgtcttgtatctctaattggaagcaagacccagataccaacacaacgatatggccggagaccatatggtgttggtctccttattgctggttatgatgatatgggccctcacattttccaaacctgtccatctgctaactattttgactgcagagccatgtccattggagcccgttcccaatcagctcgtacttacttggagagacatatgtctgaatttatggagtgtaatttaaatgaactagttaaacatggtctgcgtgccttaagagagacgcttcctgcagaacaggacctgactacaaagaatgtttccattggaattgttggtaaagacttggagtttacaatctatgatgatgatgatgtgtctccattcctggaaggtcttgaagaaagaccacagagaaaggcacagcctgctcaacctgctgatgaacctgcagaaaaggctgatgaaccaatggaacattaagtgataagccagtctatatatgtattatcaaatatgtaagaatacaggcaccacatactgatgacaataatctatactttgaaccaaaagttgcagagtggtggaatgctatgttttaggaatcagtccagatgtgagttttttccaagcaacctcactgaaacctatataatggaatacatttttctttgaaagggtctgtataatcattttctagaaagtatgggtatctatactaatgtttttatatgaagaacataggtgtctttgtggttttaaagacaactgtgaaataaaattgtttcaccgcctggtaaaaaaaaaaaaaaaaaaaaaaaaaaaa

SEQ ID NO: 285681 - DNA, 949 bp, Homo Sapiens
gcgctccgggcctggaatccctacgcgtccctttgggtttagcacgatgagctcaatcggcactgggtatgacctgtcagcctctacattctctcctgacggaagagtttttcaagttgaatatgctatgaaggctgtggaaaatagtagtacagctattggaatcagatgcaaagatggtgttgtctttggggtagaaaaattagtcctttctaaactttatgaagaaggttccaacaaaagactttttaatgttgatcggcatgttggaatggcagtagcaggtttgttggcagatgctcgttctttagcagacatagcaagagaagaagcttccaacttcagatctaactttggctacaacattccactaaaacatcttgcagacagagtggccatgtatgtgcatgcatatacactctacagtgctgttagaccttttggctgcagtttcatgttagggtcttacagtgtgaatgacggtgcgcaactctacatgattgacccatcaggtgtttcatacggttattggggctgtgccatcggcaaagccaggcaagctgcaaagacggaaatagagaagcttcagatgaaagaaatgacctgccgtgatatcgttaaagaagttgcaaaaataatttacatagtacatgacgaagttaaggataaagcttttgaactagaactcagctgggttggtgaattaactaatggaagacatgaaattgttccaaaagatataagagaagaagcagagaaatatgctaaggaatctctgaaggaagaagatgaatcagatgatgataatatgtaacatttactccagcatctattgtattttaaatttctactccagtccaatgtaactatttagccctggattatacatactgtccaattttcattaaatttttgtcttataactataaaaaaaaaaaaaaaaaaaaaa

SEQ ID NO: 285682 - DNA, 1000 bp, Homo Sapiens; identical to SEQ ID NO: 115873

SEQ ID NO: 285683 - DNA, 872 bp, Homo Sapiens
aaggcagccatctcgccgtgagacagcaagtgtcgcgcagccgtgcgatgttgtcctctacagccatgtattcggctcctggcagagacttggggatggaaccgcacagagccgcgggccctttgcagctgcgattttcgccctacgttttcaacggaggtactatactggcaattgctggagaagattttgcaattgttgcttctgatactcgattgagtgaagggttttcaattcatacgcgggatagccccaaatgttacaaattaacagacaaaacagtcattggatgcagcggttttcatggagactgtcttacgctgacaaagattattgaagcaagactaaagatgtataagcattccaataataaggccatgactacgggggcaattgctgcaatgctgtctacaatcctgtattcaaggcgcttctttccatactatgtttacaacatcatcggtggacttgatgaagaaggaaagggggctgtatacagctttgatccagtagggtcttaccagagagactccttcaaggctggaggctcagcaagtgccatgctacagcccctgcttgacaaccaggttggttttaagaacatgcagaatgtggagcatgttccgctgtccttggacagagccatgcggctggtgaaagatgtcttcatttctgcggctgagagagatgtgtacactggggacgcactccggatctgcatagtgaccaaagagggcatcagggaggaaactgtttccttaaggaaggactgatctgtgtgctcttatcaccaatcagttcagacctggttgattttgtactttggaactgtaccttggatggttttgtttattaaaagagaaacctgaagt

SEQ ID NO: 285684 - DNA, 1000 bp, Homo Sapiens
ctggactgcaatttcttaaaggttgtatctagttctattgtagacaagtacattggtgaaagtgctcgtttgatcagagaaatgtttaattatgctagagatcatcaaccatgcatcatttttatggatgaaatagatgctattggtggtcgtcggttttctgagggtacttcagctgacagagagattcagagaacgttaatggagttactgaatcaaatggatggatttgatactctgcatagagttaaaatgatcatggctacaaacagaccagatacactggatcctgctttgctgcgtccaggaagattagatagaaaaatacatattgatttgccaaatgaacaagcaagattagacatactgaaaatccatgcaggtcccattacaaagcatggtgaaatagattatgaagcaattgtgaagctttcggatggctttaatggagcagatctgagaaatgtttgtactgaagcaggtatgttcgcaattcgtgctgatcatgattttgtagtacaggaagacttcatgaaagcagtcagaaaagtggctgattctaagaagctggagtctaaattggactacaaacctgtgtaatttactgtaagatttttgatggctgcatgacagatgttggcttattgtaaaaataaagttaaagaaaataatgtatgtattggcaatgatgtcattaaaagtatatgaataaaaatatgagtaacatcataaaaattagtaattcaacttttaagatacagaagaaatttgtatgtttgttaaagttgcatttattgcagcaagttacaaagggaaagtgttgaagcttttcatatttgctgcgtgagcattttgtaaaatattgaaagtggtttgagatagtggtataagaaagcatttcttatgacttattttgtatcatttgttttcctcatctaaaaagttgaataaaatctgtttgattcagttctcctacatataaaaaaaaaaaaaaaaaaaa

SEQ ID NO: 285685 - DNA, 1000 bp, Homo Sapiens
gttgctgggggagatccctgaccggctgcagttccgccagccctccctcaagcgctcactcatgccctatttccttctgactcaagctgtcaggacaggaaacctagccaagttcaaccaggtcctggatcagtttggggagaagtttcaagcagatgggacctacaccctaattatccggctgcggcacaacgtgattaagacaggtgtacgcatgatcagcctctcctattcccgaatctccttggctgacatcgcccagaagctgcagttggatagccccgaagatgcagagttcattgttgccaaggccatccgggatggtgtcattgaggccagcatcaaccacgagaagggctatgtccaatccaaggagatgattgacatctattccacccgagagccccagctagccttccaccagcgcatctccttctgcctagatatccacaacatgtctgtcaaggccatgaggtttcctcccaaatcgtacaacaaggacttggagtctgcagaggaacggcgtgagcgagaacagcaggacttggagtttgccaaggagatggcagaagatgatgatgacagcttcccttgagctggggggctggggaggggtagggggaatggggacaggctctttcccccttgggggtcccctgcccagggcactgtccccattttcccacacacagctcatatgctgcattcgtgcagggggtgggggtgctgggagccagccaccctgacctcccccagggctcctccccagccggtgacttactgtacagcaggcaggagggtgggcaggcaacctccccgggcagggtcctggccagcagtgtgggagcaggaggggaaggatagttctgtgtactcctttagggagtgggggactagaactgggatgtcttggcttgtatgttttttgaagcttcgattatgatttttaaacaataaaaagttctccacagtgaaaaaaaaaaaaaaaaaaaaaaaaaaa

SEQ ID NO: 285686 - DNA, 1000 bp, Homo Sapiens
caccttctgcacgggcatccgcgtggcccatctggctctgaagcaccgacaaggcaagaatcacaagatgcgcatcattgcctttgtgggaagcccagtggaggacaatgagaaggatctggtgaaactggctaaacgcctcaagaaggagaaagtaaatgttgacattatcaattttggggaagaggaggtgaacacagaaaagctgacagcctttgtaaacacgttgaatggcaaagatggaaccggttctcatctggtgacagtgcctcctgggcccagtttggctgatgctctcatcagttctccgattttggctggtgaaggtggtgccatgctgggtcttggtgccagtgactttgaatttggagtagatcccagtgctgatcctgagctggccttggcccttcgtgtatctatggaagagcagcggcagcggcaggaggaggaggcccggcgggcagctgcagcttctgctgctgaggccgggattgctacgactgggactgaagactcagacgatgccctgctgaagatgaccatcagccagcaagagtttggccgcactgggcttcctgacctaagcagtatgactgaggaagagcagattgcttatgccatgcagatgtccctgcagggagcagagtttggccaggcggaatcagcagacattgatgccagctcagctatggacacatctgagccagccaaggaggaggatgattacgacgtgatgcaggaccccgagttccttcagagtgtcctagagaacctcccaggtgtggatcccaacaatgaagccattcgaaatgctatgggctccctggcctcccaggccaccaaggacggcaagaaggacaagaaggaggaagacaagaagtgagactggagggaaagggtagctgagtctgcttaggggactgcatgggaagcacggaatatagggttagatgtgtgttatctgtaaccattacagcctaaataaagcttggcaactttt

SEQ ID NO: 285687 - DNA, 1000 bp, Homo Sapiens
acggtgggcactctgtcccagcggatcacaaaccaggtccatggtttgaagggactgaactccaagcttctggatatcaggagctacctggaaaaagtcgccacaggcaagctgcccatcaaccaccagatcatctaccagctgcaggacgtcttcaacctgctgccagatgtcagcctgcaggagttcgtcaaggccttttacctgaagaccaatgaccagatggtggtagtgtacttggcctcgctgatccgttccgtggtcgccctgcacaacctcatcaacaacaagattgccaaccgggatgcagagaagaaagaagggcaggagaaagaagagagcaaaaaggataggaaagaggacaaggagaaagataaagataaggaaaagagtgatgtaaagaaagaggagaaaaaggagaaaaagtaaaacatgtattaaatagcttttttaatttgtaaattaaaatcttacaaactaaatcagtgtgctgctagagggttctttttcacttgacatgcttattagaaagctgacccaacaagagctctctgcctccggtcactcttgctgtggtgctacgtggaagtgaatggagactgatctcaaatctgaactgcagctttcgctgctgtgagttggggatatgatagtcagctcaggcttcagattgtatgagaaaaatgaagagaagtcaacaaatattttggtactcttcattcatttatctctaaaaccaggagttgaattttcctcatcttgaaagactcttggggtctgtttctggtattttacaaaattgctaagtggaatgcatgaattgcattatgttctctggtaacacgtagagttcagacccttctgaactctgttgataataccacaccatgttctggacccatagctctggcatcctcaggggttgtgatccagctccatatattgtttaccttcaaagatacaattaaatggcttgatttttaaaaaaaaaaaaaaaaaa

SEQ ID NO: 285688 - DNA, 1000 bp, Homo Sapiens
gcccagctcaaatgctactactttgattacaaggagcagctccccgagtcagcctatatgcaccagctcttgggcctcaacctcctcttcctgctgtcccagaaccgggtggctgagttccacacggagttggagcggctgcctgccaaggacatacagaccaatgtctacatcaagcacccagtgtccctggagcaatacctgatggagggcagctacaacaaagtgttcctggccaagggtaacatccccgccgagagctacaccttcttcattgacatcctgctcgacactatcagggatgagatcgctgggtgcatcgagaaggcctacgagaaaatccttttcactgaggccacccggatcctcttcttcaacacacccaaaaagatgacagactacgccaagaagcgagggtgggtcctgggccccaacaactactacagttttgccagccagcagcagaagccggaagacaccaccattccctccacagaactggccaaacaggtcatcgagtatgcccggcagctggagatgatcgtctgagccccccgggcactgggtggggcagggcacgagttatttaaaacagttacactgcagggtttcgcccaataaaggtggactgacattccctcttccaggcccttgtctccccagttgggacggcagagagacaagttcttatatctgaagaacttggaggttttggggcattcaggagttggagatagcctccaactgggtcagcctctgtctggtgggcattgctcagggtctcaaacatggacgcccactgtggggccccagcagcactgtggcctgcaggagggcatggccccaggtagggggactgttctagccagctgtggacacataggaatgctggaccagggtaccagattttttcaacaaagggggtgaagtgtcctactaaaaagaataaatgttggcagtgaattaaacaatttttcaaatgaaaaaaaaaaaaaaaaaa

SEQ ID NO: 285689 - DNA, 1000 bp, Homo Sapiens; identical to SEQ ID NO: 115879

SEQ ID NO: 285690 - DNA, 1000 bp, Homo Sapiens
cgagctgccttaacttctgctcgaaccacagcaaatgccatctactgcccccctaaattgcaggccaccttggacatgcagtcgggtattatccatgcagcagaagagaaggactggaaaactgcgtactcatacttctatgaggcatttgagggttatgactccatcgacagccccaaggccatcacatctctgaagtacatgttgctgtgcaaaatcatgctcaacaccccagaagatgtccaggctttggtgagcgggaagcttgcacttcggtatgcagggaggcagacagaagcattaaaatgcgtggctcaggctagcaagaacagatcactggcagattttgaaaaggctctgacagattaccgggcagagctccgggatgacccaatcatcagcacacacttggccaagttgtatgataacttactagaacagaatctgatccgagtcattgagcctttttccagagtacagattgaacacatatctagtctcatcaaactctccaaggccgacgtggaaaggaaattatcacagatgattcttgacaagaaatttcatgggattttggaccagggggagggtgtcctgattattttcgatgaacccccagtagataaaacttacgaagctgctctggaaacaattcagaacatgagcaaagtagtggattccctctacaacaaagccaagaaactgacatagagttggatctgtagcggtcctttggagagtgtgtgtggcgggagagtgaaaccttgggggaaaatgctaggagattcttttttctttttgttctacttttcgctcggaaagtttttaaatcctcatttggtgcatctgtattccagccaataggtgtgccagttttcatgtaatctttactggcccaacttgggagtggggaaattgcttaaaaaaaaagaaaaagaaaaaaaaaaagattattctaaataaaaggaaaaaggcttacactaaaaaaaaaaaaaaaaaa

SEQ ID NO: 285691 - DNA, 1000 bp, Homo Sapiens
aggagaagaaggaagttgtggaagaggcagaaaatggaagagacgcccctgctaacgggaatgctaatgaggaaaatggggagcaggaggctgacaatgaggtagacgaagaagaggaagaaggtggggaggaagaggaggaggaagaagaaggtgatggtgaggaggagggtggagatgaagatgaggaagctgagtcagctacgggcaagcgggcagctgaagatgatgaggatgacgatgtcgataccaagaagcagaagaccgacgaggatgactagacagcaaaaaaggaaaagttaaactaaaaaaaaaaaggccgccgtgacctattcaccctccacttcccgtctcagaatctaaacgtggtcaccttcgagtagagaggcccgcccgcccaccgtgggcagtgccacccgcagatgacacgcgctctccaccacccaacccaaaccatgagaatttgcaacaggggaggaaaaaagaaccaaaacttccaaggccctgctttttttcttaaaagtactttaaaaaggaaatttgtttgtattttttatttacattttatatttttgtacatattgttagggtcagccatttttaatgatctcggatgaccaaaccagccttcggagcgttctctgtcctacttctgactttacttgtggtgtgaccatgttcattataatctcaaaggagaaaaaaaaccttgtaaaaaaagcaaaaatgacaacagaaaaacaatcttattccgagcattccagtaacttttttgtgtatgtacttagctgtactataagtagttggtttgtatgagatggttaaaaaggccaaagataaaaggtttctttttttttccttttttgtctatgaagttgctgtttattttttttggcctgtttgatgtatgtgtgaaacaatgttgtccaacaataaacaggaattttattttgctgagttgttctaacagaaaaaaaaaaaaaaaaaaaaaaaaaaaaaa

SEQ ID NO: 285692 - DNA, 1000 bp, Homo Sapiens
cgcgcgcctctgccgcctcttccagagacccagcttgccgagcggccgccgctgccgctgtcgccgccgccgccgccaccgcgccaggttccggccgcggccaccctccgccgtccagggcccctccgtctcggccccgggaccccggctccccgccagccccggccccggccccggcaccatgtcggagaaaagcgtggaggcagcggccgagttgagcgccaaggacctgaaggagaagaaggagaaggtggaggagaaggcaagccggaaagagcgaaagaaagaagtggtggaggaggaggagaacggggctgaggaggaagaagaagaaactgccgaggatggagaggaggaagatgaaggggaagaagaagatgaggaagaagaagaagaggatgatgaagggcccgcgctgaagagagctgccgaagaggaggatgaagcggatcccaaacggcagaagacagaaaatggggcatcggcgtgagcccctgccaacaggctggggttgggaggcctctctgggcctggaggtgggggtgggggcagccaagtccagccactcttcacctggctccctgctctgggccctgcaccagagctgccaccctcttctttctccccagccttctcatttccgcctctccagacactgcgccctccaccctcactctgccattgttccacctcctgacctgctccatctgagctctccagctggcccccaattgctcctctctctctttgctctctttctccctcccctaccagcctcattcttcctccggtagcctctcccacctaacctctgcatcccccagcctcatgtcctgccccatccctatcctgcctgatccctggatctccctcagatcccctcttctcagacagcgccaggccggggtggggccggggttggggccgagccccacagctgcccccctcccctccctttttgtataatttaataaagaaatggtcgcgcttctgtttttaa

SEQ ID NO: 285693 - DNA, 1000 bp, Homo Sapiens; identical to SEQ ID NO: 115882

SEQ ID NO: 285694 - DNA, 1000 bp, Homo Sapiens; identical to SEQ ID NO: 115883

SEQ ID NO: 285695 - DNA, 1000 bp, Homo Sapiens
tgtcctcccagcaacaagatggtgtggttatcttgggtcatttggatgttttgtttgtttctgtgtgtcagactgtaagggctgagctttctgtgcttctaggtggagctggaacaattcagattcacccgccctgatgctaaggaaaccctgacgtatgtactagatggcagggcactgggggtcaggctgaaggctgagcaacacctctctgccctccctccctttgtcccatctcccagcgacttccaatattcatgtttctgagaattgtgtccctcttcaggttccctcttggtgcctaacctggattagtaatgtgcattcaggtgaattttcagctgaggctctgagaactggtactctcagtgtgttctggtcatcttgtggcttagttgtagaagcaggtgtgtctcttgcctctgcttgcctcctactgcacactcagcacccaggactggaatcaccgactactgaatctcctacatgtattgctgctacttcaagctcctccacttgaaaccttatgattttcccaaggggagatgggacagtgtcatctaaatattccgaatgtttggccttctgagaaaagagcttctagtaattgaaccatgggaaacccagcttctggagggttggccgtggggctgtgtacatgtgtgtgcccaggggtgagtgtttctcaggattcctaacgattcaaattaccgttgagtatatataaagaatgagtctctgtatggaagaacaaatgtgtgcattcacccccagtcacaatggtctccattgcatttcaaaggagaggatcagactatctgaatataaacacaatctgatgttaatttattctaagaacaccatcattttgattgtcctaaagaattctgcctttgtgaataccgtgttaaatttttttaaatttgtgacaggattgtagcaaattattatttaaggaaaataaattgtgtaaacatttaaaaaaaaaaaaaaaaaaaaa

SEQ ID NO: 285696 - DNA, 1000 bp, Homo Sapiens; identical to SEQ ID NO: 115885

SEQ ID NO: 285697 - DNA, 1000 bp, Homo Sapiens; identical to SEQ ID NO: 115887

SEQ ID NO: 285698 - DNA, 1000 bp, Homo Sapiens
tgtcctatggagatattacagtggaactgaagaaggaggaggaatgtgagagctacaccgtccgagacctcctggtcaccaacaccagggagaataagagccggcagatccggcagttccacttccatggctggcctgaagtgggcatccccagtgacggaaagggcatgatcagcatcatcgccgccgtgcagaagcagcagcagcagtcagggaaccaccccatcaccgtgcactgcagcgccggggcaggaaggacggggaccttctgtgccctgagcaccgtcctggagcgtgtgaaagcagaggggattttggatgtcttccagactgtcaagagcctgcggctacagaggccacacatggtccagacactggaacagtatgagttctgctacaaggtggtgcaggagtatattgatgcattctcagattatgccaacttcaagtaagcggcaacaagggtccgtggaccaggaggattgcctttaatattttgtaatattctgttttgttaatataccccaaattgtgtatatatcttataactgttttagaaattggtacataggcttctattacctattaggtggaaattttatatgtaaatgtgttagcactgatagtcctttttccaatgttttattggggaattaaatagtgtgatgtttggattgatatcgtgaaatcctcagccgagaaattgggctggattgtgctttggttaatacatctttccctaaagaagataaacacaaaatccattccaggtagctcggcaccaactaagaaaaaaagcacaaagttctcagagctctcgaggaaagtggttgtccccgtaccaccatgcactgtaaatatccctcccctctctccctggtcccctcccccatccccaccactgatatcatggggagtaataggaccagagcggtatctctggcaccacactagggactatcaggtaataaaagctttgactccctgaaaaaaaaaaaaa

SEQ ID NO: 285699 - DNA, 1000 bp, Homo Sapiens
ttcagaagagaatacattgtcactcagggaccgcttcctggcaccaaggatgacttctggaaaatggtgtgggaacaaaacgttcacaacatcgtcatggtgacccagtgtgttgagaagggccgagtaaagtgtgaccattactggccagcggaccaggattccctctactatggggacctcatcctgcagatgctctcagagtccgtcctgcctgagtggaccatccgggagtttaagatatgcggtgaggaacagcttgatgcacacagactcatccgccactttcactatacggtgtggccagaccatggagtcccagaaaccacccagtctctgatccagtttgtgagaactgtcagggactacatcaacagaagcccgggtgctgggcccactgtggtgcactgcagtgctggtgtgggtaggactggaacctttattgcattggaccgaatcctccagcagttagactccaaagactctgtggacatttatggagcagtgcacgacctaagacttcacagggttcacatggtccagactgagtgtcagtatgtctacctacatcagtgtgtaagagatgtcctcagagcaagaaagctacggagtgaacaagaaaaccccttgtttccaatctatgaaaatgtgaatccagagtatcacagagatccagtctattcaaggcattgagaatgtacctgaagagctcctggataaaaattattcactgtgtgatttgtttttaaaaacttgcttcatgccctacagaggtgccagctatttctgttgatactatgtataatttattaatctggagaatgtttaaaattttatataatttaaaggtaacagatattattgtacatagttgtattttgtagtttcttctgtaaatatgtatttttcataatgtttaatattaagctttatataatactatttttccacactaaagtgttcatgacttgttctacataaaactaattcaacctgtaaa

SEQ ID NO: 285700 - DNA, 1000 bp, Homo Sapiens; identical to SEQ ID NO: 115888

SEQ ID NO: 285701 - DNA, 1000 bp, Homo Sapiens; identical to SEQ ID NO: 221224

SEQ ID NO: 285702 - DNA, 1000 bp, Homo Sapiens; identical to SEQ ID NO: 221225

SEQ ID NO: 285703 - DNA, 1000 bp, Homo Sapiens; identical to SEQ ID NO: 221226

SEQ ID NO: 285704 - DNA, 1000 bp, Homo Sapiens; identical to SEQ ID NO: 115889

SEQ ID NO: 285705 - DNA, 1000 bp, Homo Sapiens
gtagtgcccacttgaggctggcactcccctgacctcacctttgcaaagttacagatgcaccccaacattgagatgtgtttttaatgttaaaatattgatttctacgttatgaaaacagatgcccccgtgaatgcttacctgtgagataaccacaaccaggaagaacaaatctgggcattgagcaagctatgagggtccccgggagcacacgaaccctgccaggcccccgctggctcctccaggcacgtcccggacctgtggggccccagagaggggacatttccctcctgggagagaaggagatcagggcaactcggagagggctgcgagcatttccctcccgggagaggagatcagggcgacctgcacgcactgcgtagagcctggaagggaagtgagaaaccagccgaccggccctgcccctcttcccgggatcacttaatgaaccacgtgttttgacatcatgtaaacctaagcacgtagagatgattcggatttgacaaaataacatttgagtatccgattcgccatcaccccctaccccagaaataggacaattcacttcattgaccaggatgatcacatggaaggcggcgcagaggcagctgtgtgggctgcagatttcctgtgtggggttcagcgtagaaaacgcacctccatcccgcccttcccacagcattcctccatcttagatagatggtactctccaaaggccctaccagagggaacacggcctactgagcggacagaatgatgccaaaatattgcttatgtctctacatggtattgtaatgaatatctgctttaatatagctatcatttcttttccaaaattacttctctctatctggaatttaattaatcgaaatgaatttatctgaatataggaagcatatgcctacttgtaatttctaactccttatgtttgaagagaaacctccggtgtgagatatacaaatatatttaattgtgtcatattaaacttctgattcaaaaaaaa

SEQ ID NO: 285706 - DNA, 1000 bp, Homo Sapiens; identical to SEQ ID NO: 221227

SEQ ID NO: 285707 - DNA, 1000 bp, Homo Sapiens
ggaaggtggacccacctgtgcggcacctggaattcagaggaagggctcacatccttgtgggtaaatggtgaactggcggctaccactgttgagatggccacaggtcacattgttcctgagggaggaatcctgcagattggccaagaaaagaatggctgctgtgtgggtggtggctttgatgaaacattagccttctctgggagactcacaggcttcaatatctgggatagtgttcttagcaatgaagagataagagagaccggaggagcagagtcttgtcacatccgggggaatattgttgggtggggagtcacagagatccagccacatggaggagctcagtatgtttcataaatgttgtgaaactccacttgaagccaaagaaagaaactcacacttaaaacacatgccagttgggaaggtctgaaaactcagtgcataataggaacacttgagactaatgaaagagagagttgagaccaatctttatttgtactggccaaatactgaataaacagttgaaggaaagacattggaaaaagcttttgaggataatgttactagactttatgccatggtgctttcagtttaatgctgtgtctctgtcagataaactctcaaataattaaaaaggactgtattgttgaacagagggacaattgttttacttttctttggttaattttgttttggccagagatgaattttacattggaagaataacaaaataagatttgttgtccattgttcattgttattggtatgtaccttattacaaaaaaaatgatgaaaacatatttatactacaaggtgacttaacaactataaatgtagtttatgtgttataatcgaatgtcacgtttttgagaagatagtcatataagttatattgcaaaagggatttgtattaatttaagactatttttgtaaagctctactgtaaataaaatattttataaaactaaaaaaaaaaaaaaaaaaaaaaaaaaaaaaaaaaaaa

SEQ ID NO: 285708 - DNA, 1000 bp, Homo Sapiens
tcctgaagtgtccatctccggctatgatgacaactggtacctcggccgtactgatgccaccctgagctgtgacgtccgcagcaacccagagcccacgggctatgactggagcacgacctcaggcaccttcccgacctccgcagtggcccagggctcccagctggtcatccacgcagtggacagtctgttcaataccaccttcgtctgcacagtcaccaatgccgtgggcatgggccgcgctgagcaggtcatctttgtccgagaaacccccagggcctcgccccgagatgtgggcccgctggtgtggggggccgtgggggggacactgctggtgctgctgcttctggctggggggtccttggccttcatcctgctgagggtgaggaggaggaggaagagccctggaggagcaggaggaggagccagtggcgacgggggattctacgatccgaaagctcaggtgttgggaaatggggaccccgtcttctggacaccagtagtccctggtcccatggaaccagatggcaaggatgaggaggaggaggaggaggaagagaaggcagagaaaggcctcatgttgcctccacccccagcactcgaggatgacatggagtcccagctggacggctccctcatctcacggcgggcagtttatgtgtgacctggacacagacagagacagagccaggcccggccctcccgcccccgacctgaccacgccggcctagggttccagactggttggacttgttcgtctggacgacactggagtggaacactgcctcccactttcttgggacttggagggaggtggaacagcacactggacttctcccgtctctagggctgcatggggagcccggggagctgagtagtggggatccagagaggacccccgcccccagagacttggttttggctccagccttcccctggccccgtgacactcaggagttaataaatgccttggaggaaaacaaaaaaaaaaaaaaaaaaaaaa

SEQ ID NO: 285709 - DNA, 1000 bp, Homo Sapiens
cagtttcattttcctgtgccctgtggtagttggaaacaaatcataatgtattatttaaatgtttaacatcattgcataacagcgtttattatacagtggcagatttctttagctgccacagtaatactcattccttgtgtgtgtcttggagtgcatttgactccaggaaaagccattttggttttccttaactaaatgataaatgtacccctctcagtctgcagtattgagttgtttaaagtatatgtgcagtcttgcttacaaggaggggttaccatgtatcacacctaatcttcccaatgtttgggatattaaaacacaaagtccttaacatgccaggctcaaggtcttataagagttctagatttttaagagaattagacaaatttgtgtgtgttagaagcccattcattagaagtgtggtggttatttggtattaaactccaaatgagccataggaaggcactacatgaaataatgcactgagtatgcaatgctatcactgtctttgactgtgattttatgtttaaaaagtatgttctaaaattattatatatacatgggtgaattatgtttccgaggcactgttttatctctgtgaatcttgaataacttttttatatttgggttatgatgtcaaacgatcctaagcgaagatgatttcagttcatcaaatcatcattaatgactttatgtattatttgcacagggagaattgaaactgagtataatcaataagctagatacgaaatcagtttctcaaactgagcttcagaaaggggcattttgtactcttgtttttgcataactggttttgtttttttgcagaattaactataacaatcactggctaccgaagtaaactgatgtactgaattccataatacataacattcaatttttaccacttctgtttagcgaacttgtatacttattttctgttcagattaaaaaaaaaaaaaaaaaaaactcagatatcctataaaaaaaaaaggaattc

SEQ ID NO: 285710 - DNA, 1000 bp, Homo Sapiens
ggtgtgtagattgctttgtctgtggggtggggtggggaagcaatatgtattttattgtttcttagcacaagcaggtgtgctgggagcagctctgtgactccccctctttcacttcatagctcccaggactgttttataaactgctgctatttggaaaccccttctttacttcccaggccagcaagccttcactgaaactggttgaagagtgttgcacccttttgggcctagaattctgaactttatctgttctgtttctgtgggaggagaaggggaagtatgttttggggggctgcttcctgtctgagtaagccctcaggagcctcttgctcccctgtgaacccctgaaccttctgagcccccctgcttctatggggctctctcttctgccttctcaggaaagctgtgtctgattttggccatcaggactctgacgtctctttggtcttgttgatttacctctgggcatatcccttccccagatctgctcctcccctttcacaggtgggatcggcactcagggggtctggaaagaaggtcataagggagcatgataggatttggggcagagggacaggctcctctggggaaaccccccagagctctttaccaaggatgaaagaggagccaggccttgggctcctgatgaccagaaaggggccaccggggtctaatggtgacagtccaaaccactccactggcctcctggcagaagccgagtgtgctggggtctccgaagagggtccctcctttttgggggaaggtcagcccagcccctccaaaggtctgatgtctccactttcacccgcaggccttaccgctctgtttatagtgacccaccctagatcttccccaagagggactggggtttctggggtccattctctgagtcagtggttatttgaaaatttgattttgattttattttttctctgtaaacttccaagctggcttttcccatttcaattcctgtgatttatgccaataaagtttgcccatg

SEQ ID NO: 285711 - DNA, 1000 bp, Homo Sapiens; identical to SEQ ID NO: 115414

SEQ ID NO: 285712 - DNA, 1000 bp, Homo Sapiens
cctcctggccatgccgggaggggtcggatcctctaggcatcgccttcacagccccctgccccctgccctctgtcctggctctgcacctggtatatgggtcatggacccagatggggctttccctttgtagccatccaatgggcattgtgtgggtgcttggaacccgggatgactgagggggacactggagtgggtgcttgtgtctgctgtctcagaggccttggtcaggatgaagttggctgacacagcttagcttggttttgcttattcaaaagagaaaataactacacatggaaatgaaactagctgaagccttttcttgttttagcaactgaaaattgtacttggtcacttttgtgcttgaggaggcccattttctgcctggcagggggcaggtctgtgccctcccgctgactcctgctgtgtcctgaggtgcatttcctgttgtacacacaagggccaggctccattctccctccctttccaccagtgccacagcctcgtctggaaaaaggaccaggggtcccggaggaacccatttgtgctctgcttggacagcaggcctggcactgggaggtgggggtgagcccctcacagccttgcccctccccaaggctggcaacctgcctcccattgcccaagagagagggcagggaacaggctactgtccttccctgtggaattgccgagaaatctagcaccttgcatgctggatctgggctgcggggaggctctttttctccctggcctccagtgcccaccaggaggatctgcgcacggtgcacagcccaccagagcactacagccttttattgagtggggcaagtgctgggctgtggtcgtgccctgacagcatcttccccaggcagcggctctgtggaggaggccatactcccctagttggccactggggccaccaccctgaccaccactgtgcccctcattgttactgccttgtgagataaaaactgattaaacctttgtggctgtggttggctga

SEQ ID NO: 285713 - DNA, 1000 bp, Homo Sapiens
aggcaccagtggggcatctttaccaaacccaggctccctctgctgaggtggagatgacatcctatgtgctcctcgcttatctcacggcccagccagcccccacctcaggggacctgacctctgcaactaacattgtgaagtggatcatgaagcagcagaacgcccaaggtggtttctcctccacccaggacacagtggtggctctccatgccctgtccaggtatggagcagccactttcaccagaactgagaaaactgcacaggtcaccgttcaggattcacagaccttttctacaaatttccaagtagacaacaacaacctcctattactgcagcagatctcattgccagagctccctggagaatatgtcataacagtaactggggaaagatgtgtgtatcttcagacatccatgaaatacaatattcttccagagaaagaggactccccatttgctttaaaagtgcagactgtgccccagacttgcgatggacacaaagcccacaccagctttcagatctcactgaccatcagttacacaggaaaccgtcctgcttccaatatggtgattgttgatgtaaagatggtatctggttttattcccctgaaaccaacagtaaaaatgcttgaaagatctagctctgtgagccggacagaagtgagcaacaaccatgtcctcatttatgtggaacaggtgacaaatcagacgctaagtttttccttcatggttctgcaagacatcccagtaggagacttgaagccagcaattgttaaagtctatgattactatgagacagatgagtctgtggttgctgagtatatcgccccctgcagcacagatacagagcatggaaatgtttgaggaccatacaggctgtatattttggtggattctctgtcctatacatttacttagaaggaatggagttatttgtctctataaaatagacactaaaaatatttgctgaataaatatgtacttctggtcaaactaaaaaa

SEQ ID NO: 285714 - DNA, 1000 bp, Homo Sapiens
cggaggaggagcagcagcgggaggaggagccgtgtgccctggcactgagcggccgcggccatggcgtacgcctatctcttcaagtacatcataatcggcgacacaggtgttggtaaatcatgcttattgctacagtttacagacaagaggtttcagccagtgcatgaccttactattggtgtagagttcggtgctcgaatgataactattgatgggaaacagataaaacttcagatatgggatacggcagggcaagaatcctttcgttccatcacaaggtcgtattacagaggtgcagcaggagctttactagtttacgatattacacggagagatacattcaaccacttgacaacctggttagaagatgcccgccagcattccaattccaacatggtcattatgcttattggaaataaaagtgatttagaatctagaagagaagtaaaaaaagaagaaggtgaagcttttgcacgagaacatggactcatcttcatggaaacgtctgctaagactgcttccaatgtagaagaggcatttattaatacagcaaaagaaatttatgaaaaaattcaagaaggagtctttgacattaataatgaggcaaatggcattaaaattggccctcagcatgctgctaccaatgcaacacatgcaggcaatcagggaggacagcaggctgggggcggctgctgttgagtctgtttttactgtctagctgcccaacggggcctactcacttattctttcaccccctctcctcctgctcagctgagacatgaaactatttgaaatggctttatgtcacagaagactttaatccgtcaaattcttgtataactttgaataaatggttaatgttcacttaaaagacagattttggagattgtattcatatctatttgcatttgatttctaggtcaattgatgtgattatttttgttaaatgttgtcttgtgcccttaactacgaactgaattgtattaaacactacaaagtc

SEQ ID NO: 285715 - DNA, 1000 bp, Homo Sapiens
atcaagacctactcatgggacaatgcccaggtgctgctggtaggaaacaagtgtgacatggaggatgagcgggtggtgtcatcagaacgtggccggcagctagctgaccaccttgggttcgagttctttgaggcaagcgccaaggacaacattaacgtcaagcagacctttgagcgcctggtggatgtcatctgcgagaagatgtccgagtcgttggacacggcggaccctgcggtcacaggcgccaagcagggcccacagctcagtgaccagcaggtgccaccgcaccaggactgcgcctgctgagagccatcccactccctttcccctcttccctgtcttccccaccttcccccaactacccgggcctgacccggcccctaccagccacgggcacaagacccctgctcctgacttagcccgtcacccttatttattattgtagctatttatttatttattgaagatgtcccccaggggcccaggctcccctgcccgccccaagccctgcccctcctgtacatatagccctttccccactcagctgtggtgtctcgtggccccgtgaactcaccgctcaccctcctgaaccccccccccgcctttttttaaaattcacccccatccacagttgtcagttgtgaagaggggccagatgacaccctaaagcaggctgatcgggcaatgggaggtggccaggcctgccagcccctcggctctgccgcggtgggccgaggccgctgttgggggtttccctgtgtggaccatggggatcagagtctggcctgccaggctcctctccccgttttctcttttggtgggggggtgtgctgtgggtattcaccaccctgggaccccccccccccccgcccaccagacctgttctgacctcatgagtgtcaaacgtgccccccagttccttaggagatgtcatgacaacactacacgcacccaataaagcgaatggaccatcaaaaaaaaaaaaaaaaaaaaaaaaaaa

SEQ ID NO: 285716 - DNA, 1000 bp, Homo Sapiens; identical to SEQ ID NO: 115895

SEQ ID NO: 285717 - DNA, 1000 bp, Homo Sapiens
gggctagtaccacagaggcctcctgtggtgccctcgtatcataccacctgttcctgtggagagggaatgaccggcactgaaggtaccttacaactggctcatattatcagaggaccttggtcctttctaaatctctagtctctcttcatatccttcatcaggtgttttaagatgtctctgagaagccatcaaggcaaaagagaactttaagttccttgttccagcccggagttttgggaaagaaagaaaggaaaggtcacagtgacctaggattggaaccttcctgcccttttggcttgcagactgccttctatcccagaacagctgagaaatctatgaagctgagattctgaaggacccagcttaggttcttccacttaggcctcaattcccttccttttccaggggcagccttagttcccatggccctgaaacacacacatttcccccttcctttcccagaagccactggccccccatagcacccagtgcatcctttttacaagtggaagaactaggatggctttccaaagtcttctagaaatgaagttctttctctgtgcagctttcccccttggagcaggagtgaagatgtttcattatcttgggcctgggaaaccacttccccaggcttctccctccccccacccccataggaacaggatttggccttagcttctgggcctatcggctgccttccctctacttcctaccacctcttctgccttcctttgagctctgttgggcttggggatcttagttttcttttgtttatttcccagctcatttttttcttctggtcagtttttttaagggggggtgttgtggttttttgtttttgttttgcttctgagaaagcatttgcctttcttcctctcccaacataacaatcgtggtaacagaatgcgactgctgatttaccgatgtatttaatgtaagtaaaaaaaggaaaaaaagaaaaaaaaaaaaaaaaaaaaaaaaaaaaaaaaaaaaaaaaaaa

SEQ ID NO: 285718 - DNA, 1000 bp, Homo Sapiens; identical to SEQ ID NO: 221231

SEQ ID NO: 285719 - DNA, 1000 bp, Homo Sapiens
caagttttcgacccttgcacaaacctcagtggtttctaataaataaaaagtatcgggaaaattgcctggcagcaaaagcactttttcctgacttctgcctaccagctttatgcctccaaactcagctattgccataccttgctctactaaccattccaatgagaaatcaagctcagatttcttttatccaagatattggaaggctccctctgaagcgacactttggaagattgaaaatggaagccctgactgacagggaacatggaatgatagaccctgacagcggagatgaagcccagcttaatggaggacattctgcagaggaatctctgggtgaacccactcaagccactgtgccggaaacctggtctcttcctttgagtcagaatagtgccagtgaactgcctgctagccagccccagcccttttcagcccaaggagacatggaagaaaacataataatagaagactacgagagtgatgggacatagaagccagcctgctaatcagattgctacttcacagcttcatttttgtttcattcagtggtacttcagcagagttaatatgcttttctgatgaattacacaacagtttgttaattcttcattcttgtagtatttcatcacaagaaacctactcttctgtcatcttgaagtaaatagaagatcaagccttcaaatctcttaattttttcggtatttattaaatctgtgagtggtttaaggagcggtcagtgtgtataaagtgtgtttgaacattatgccaaatatcaagatgtgaaggactaattcaggatgcaaaaacgttattggggggttgtaaatatcaactattcaacagtttaggatgcaattacgagtgtaaactgtgtgccttatttacactttattgtctcccgcttctcagatagttttgatgtgttgtacagtggaatatcttagatactttttggaaagtatttacataagttatatcacaattaaaatgttgaatttaa

SEQ ID NO: 285720 - DNA, 1000 bp, Homo Sapiens; identical to SEQ ID NO: 115896

SEQ ID NO: 285721 - DNA, 1000 bp, Homo Sapiens
cagacctggtgtctccagctgatgatttgtccctgtctgaaggcacttctggatccagctgtgtgatagccgcactaggaaatacctggagtcacagtgtgaatacccggctgatcctccagtaccttgattcagagagaagacagattcttattgccaagtcccctctggctcccttcacctcatttgtctacaccatcaaggaggaaggcctggttcttcaagcctatggaaattcctagagacagataaatgtgcaaacctgttcatcttgccaagaaaaatccgcttttctgccacagaaacaaaatattgggaaagagtcttgtggtgaaacacccatcgttctctgctaaaacatttggttgctactgtgtagactcagcttaagtcatggaattctagaggatgtatctcacaagtaggatcaagaacaagcccaacagtaatctgcatcataagctgatttgataccatggcactgacaatgggcactgatttgataccatggcactgacaatgggcacacagggaacaggaaatgggaatgagagcaagggttgggttgtgttcgtggaacacataggttttttttttttaactttctctttctaaaatatttcattttgatggaggtgaaatttatataagatgaaattaaccattttaaagtaaacaattccgtggcaactagatatcatgatgtgcaaccagcatctctgtctagttccaaatattttcatcaccccaaaagcaagacccataaccattatgcaagtgttcctatttccccctcctcccagctcctggaaacccaccaatctactttgttgctatggctttacctattctggatatttcatataaatggaatcatatagtgtctgtcttctttcactagtatgttttcaagtctcctccatggtgtagcgtgcatcagtacttcattctttttatggctgaataatattgcattgtcaggaaaaaaaaaaaaaaaaaa

SEQ ID NO: 285722 - DNA, 1000 bp, Homo Sapiens; identical to SEQ ID NO: 221233

SEQ ID NO: 285723 - DNA, 1000 bp, Homo Sapiens; identical to SEQ ID NO: 115897

SEQ ID NO: 285724 - DNA, 1000 bp, Homo Sapiens
ccagggaccacactttgaaaaccagtgatctagactgaactccaaatgagtactatactgacagccacctagatattgagagacacagacttcagactcatgtcacacattttggagtgctgtctactacagttagagaataatctctattgaaatctaagctaaagaggacatataccatttatactaagactaactgttgtgtgtgaaatagaataaacattgcaggtagtttttgatcattttcacattattacaggaacattttgactatggttttcaatgttaattcagaagttgactttaaatgaaaatgtggttagaatagaggcaaagcctaagtgatcagaatcaacattccccttctccccaacctaggggaaaaaaaatttgaaaagtatgtcttcaataaaaggggacactttatttgtcttctcttcaacattaaaaaacaaagattttaagttttcatggcaagggttctaaaaatcattgtgccagagaatttaaatcttcatatcatggtaagcacatgcgtatgtctgtgactcagtttcttagccagacttccaggtgttagttaattccttctcatttagttctactgtaatccattctgggaaaatgcataccacaaaactgtgtatcttgcagcttctttcgttatgcatcttaattccctcagaaggtcccagaactttatgttaaagatctgggtttttaaagacaatttgggggccttctaaagaaacaatagtagatctaattacaagtagtggattgcttacttcaaatttctcttttacaatttagaaagtttagtaccagtttatagactgagggagtagtagctactatttagatgctgagaataatattatcatgcttgggtggggaagaaaggcccttactcaaatctccattttcatttttaatgcttcctggacttcagttattttcttgcttttgcctcaagaataataaatatttttggttaaaa

SEQ ID NO: 285725 - DNA, 1000 bp, Homo Sapiens; identical to SEQ ID NO: 115900

SEQ ID NO: 285726 - DNA, 1000 bp, Homo Sapiens
catctttactggccactcagctgttgtagaggatgtggcctggcacctgctgcacgagtcattgtttggatctgttgctgatgatcagaaacttatgatatgggacaccaggtccaataccacctccaagccgagtcacttggtggatgcgcacactgccgaagtcaactgcctctcattcaatccctacagcgaatttattctagccaccggctctgcggataagaccgtagctttatgggatctgcgtaacttaaaattaaaactccataccttcgaatctcataaagatgaaattttccaggtccactggtctccacataatgaaactattctggcttcaagtggtactgaccgccgcctgaatgtgtgggatttaagtaaaattggggaagaacaatcagcagaagatgcagaagatgggcctccagaactcctgtttattcatggaggacacactgctaagatttcagattttagctggaaccccaatgagccttgggtcatttgctcagtgtctgaggataacatcatgcagatatggcaaatggctgaaaatatttacaatgatgaagagtcagatgtcacgacatccgaactggagggacaaggatcttaaacccaaagtacgagaaatgtttctgttgaatgtaatgctacatgaatgcttgatttatcaagcgccaaaaaggcattgtatagtaggaaatgtaagtggggtggcttatggcttctttatcctctgattctagcactttcaagtgagctgttgcgtactgtatcatattgtagctattagggaagagaagaatgttgcttaagaaagaacatcaccattgattttaaatacaagtagcagggtattgcctttgattcaactgttttaagtcctcattttctcaaactaagtgcttgctgttcccaaatatgcaagaataacttttacactttttccttccaacacttcttgattggctttgcagaaataaagttttaaaat

SEQ ID NO: 285727 - DNA, 1000 bp, Homo Sapiens; identical to SEQ ID NO: 221234

SEQ ID NO: 285728 - DNA, 1000 bp, Homo Sapiens; identical to SEQ ID NO: 221235

SEQ ID NO: 285729 - DNA, 720 bp, Homo Sapiens
gggggggggcggagggcgctcatttccgggccgcccaccacccgcgtagcaccggcagccgctgtcccggcagtctccagccgtcccgcccgcttgtggccaaactggctccagtcactcccgaaatgccagtcgacttcactgggtactggaagatgttggtcaacgagaatttcgaggagtacctgcgcgccctcgacgtcaatgtggccttgcgcaaaatcgccaacttgctgaagccagacaaagagatcgtgcaggacggtgaccatatgatcatccgcacgctgagcacttttaggaactacatcatggacttccaagttgggaaggagtttgaggaggatctgacaggcatagatgaccgcaagtgcatgacaacagtgagctgggacggagacaagctccagtgtgtgcagaagggtgagaaggaggggcgtggctggacccagtggatcgagggtgatgagctgcacctagagatgagagtggaaggtgtggtctgcaagcaagtattcaagaaggtgcagtgaggcccaagcagacaaccttgtcccaaccaatcagcaggatgtgtgagccaggatccctctttgcacagcatgaggcaaaaatgtccagccacccctaggcatctgttagcagagtctgtctcttggctttgtcacttttccttttcttaaaacaaagccatgccaataaagtgacctgtgttcaaaa

SEQ ID NO: 285730 - DNA, 1000 bp, Homo Sapiens
cactgcagctggaccagagaggcttccgagtcctggccagctgcctgaccccctccggggccgaggacctgcagcgggtggcctcctcccgcctccacaccaccctgttggatatcactgatccccagagcgtccagcaggcagccaagtgggtggagatgcacgttaaggaagcagggctttttggtctggtgaataatgctggtgtggctggtatcatcggacccacaccatggctgacccgggacgatttccagcgggtgctgaatgtgaacacaatgggtcccatcggggtcacccttgccctgctgcctctgctgcagcaagcccggggccgggtgatcaacatcaccagcgtcctgggtcgcctggcagccaatggtgggggctactgtgtctccaaatttggcctggaggccttctctgacagcctgaggcgggatgtagctcattttgggatacgagtctccatcgtggagcctggcttcttccgaacccctgtgaccaacctggagagtctggagaaaaccctgcaggcctgctgggcacggctgcctcctgccacacaggcccactatgggggggccttcctcaccaagtacctgaaaatgcaacagcgcatcatgaacctgatctgtgacccggacctaaccaaggtgagccgatgcctggagcatgccctgactgctcgacacccccgaacccgctacagcccaggttgggatgccaagctgctctggctgcctgcctcctacctgccagccagcctggtggatgctgtgctcacctgggtccttcccaagcctgcccaagcagtctactgaatccagccttccagcaagagattgtttttcaaggacaaggactttgatttatttctgcccccaccctggtactgcctggtgcctgccacaaaataagcactaacaaaagtgtattgtttaaaaaataaaaagaaggtgggcagaaatgtgcccagtggaaaaaaaaaaaaaaaaaa

SEQ ID NO: 285731 - DNA, 1000 bp, Homo Sapiens; identical to SEQ ID NO: 115905

SEQ ID NO: 285732 - DNA, 1000 bp, Homo Sapiens; identical to SEQ ID NO: 221237

SEQ ID NO: 285733 - DNA, 808 bp, Homo Sapiens
gatataaagctcctacagctacctggcctgagaagccaactcagactcagccaacagagattgttgatttgcctcttaagcaagagattcattgcagctcagcatggctcagaccagctcatacttcatgctgatctcctgcctgatgtttctgtctcagagccaaggccaagaggcccagacagagttgccccaggcccggatcagctgcccagaaggcaccaatgcctatcgctcctactgctactactttaatgaagaccgtgagacctgggttgatgcagatctctattgccagaacatgaattcgggcaacctggtgtctgtgctcacccaggccgagggtgcctttgtggcctcactgattaaggagagtggcactgatgacttcaatgtctggattggcctccatgaccccaaaaagaaccgccgctggcactggagcagtgggtccctggtctcctacaagtcctggggcattggagccccaagcagtgttaatcctggctactgtgtgagcctgacctcaagcacaggattccagaaatggaaggatgtgccttgtgaagacaagttctcctttgtctgcaagttcaaaaactagaggcaactggaaaatacatgtctagaactgatccagcaattacaacggagtcaaaaattaaaccggaccatctctccaactcaactcaacctggacactctcttctctgctgagtttgccttgttaatcttcaatagttttacctaccccagtctttggaaccctaaataataaaaataaacatgtttccactattgtgctgtc

SEQ ID NO: 285734 - DNA, 1000 bp, Homo Sapiens
ggaggagttttgttgttggttttagcttccagtggcttctttctgcggggcatcaggctgctggggtagccgcccgccgagcctggaagctgctcgttctccgctggactcagaagccaagctgcttcccgcctagactcggcgcagggccccgcaccggtgaggaaggtgcttttggccccattgcgaggggccttggccaggactggccctgtggccaggaggcgagaaggtggctgttcccggattgacggctttttcccgggggcctttggaagatttggtggaaggacaagagggcctgtccctgtccccgtccccaggaggtaccgacagtccctgtgctggttagacacggagcgctgcacaccgaaagcccaaattgggagctctgcctgccggcaactttgctgatggggtgattgctgcttctggggggtaaggaaacaagttacagaaattaccgcgttctgtgtgaagggactgagggtgtggtgtcattggcagagggtcattttaggagagctgccccagcccctcgaacgcctggcttggggtgtcattctgcctggcggccaggcctccagcttcccctgccccgggcctggggctgtcactggccctgatccgaacacctccagattccggcttctacatgggacagacggggacgcacaggccaccttccttctggcagggactcttatttattcccattgctctagggctttcggtttccccttcttccggtaggccgcgtagaggcatgcaccgggtaggtttccgcggtgaccccgcggcggcctgagggacgctccctgccccatcccggctgttgggctgggccgctttgcctctgcttcgccctgtgctgtgttctccagctttgtagcagcagccttgacaaacccaggcgcactgtaccaaggcaatgtaacttttgattttcggtcaatttaagttcttttgtcaccaaatattaataaacagttttgacttc

SEQ ID NO: 285735 - DNA, 1000 bp, Homo Sapiens; identical to SEQ ID NO: 115906

SEQ ID NO: 285736 - DNA, 1000 bp, Homo Sapiens
cttttgtaggcttaagaatttatcctaatggcctttataggaccaatgctgattttttttaaaggcagttcctattatgtggtgaaattttgtaaataaatgattatacaaaacagtcaccacctagaactgggtattctttgtacattgtcagatatctttcaaagtataaattaggaataaaaatgttccacatgatatgtgtacaaattctttttaagattgtcatcttgtacagcaaaatattatgttggtatattacttccttattaatttgcaaatgattggattaaaaaagctcactgtattccttactaacctgttgtgtgaaacataacattggcagtcgaggagtcagaactcggattcccagcctcactccctctgtgtgtgttgaccacgtctctgctgtgaataggatttcatgcagtggtctgttatggggctttgcagcgtggggggctgcagaagattctcagacattcttatccttctggagtctcaacccatcaggttcagaccagtaggaaccaggctgggtcaggctcttaatttcactatggtgggggacaaaatgaacactggcttttgttcactttgcccctgagagatctagtcctgtcctgtgatggcttccacaaaccctgttggaagtttgggttattcctataactgtatgtgttgagtggccgtgaggctatggacctagcctggaatttagatgtctagctattttttaatcttgttggtaaatgctcagaggtctgtgctacctctgtgaggtatatactaaaatgaatgtaaaataaggatcgtattccctgctttaaggaactggtagtcttgtttgggtgatgagacaaagttcttgagacatttaaactgtatttaccagtgtgaaaaatgtcatttatggagattaattcattatggaaataaaacattgcctaagcccttgaaaaaaaaaaaaaaaaaaaaaaaaaaaaaaaaaaaaaaaaaa

SEQ ID NO: 285737 - DNA, 1000 bp, Homo Sapiens
tgatcttaatttactttaagcattggttattcaagtattcattgttgatcctcctattctcttccgtctaatctctcacctgctaaaggagatttacacattagaaagcaaagattattttcatttatccagatgaccattttctgccacaggtaacatgattgtttgacacaccattatatttaattctagtttctctcaatgaataattgtatttttgtaggaaatgtaagatttcattctgaaacataattattggtatggacaaaattgcagataccatttctgttgaggctgcagatttccaacttttatttcagtggttcagattagtattaggtcggtactaagaaataagcatgttttcactaatttaagtacttgagactcttgaagaaaattcagaatgaagttctggagaaaggtatgttactgtagtaattactctttgaacaggttttgtgttttgtcattagctctgccctttttaattaaatattttggttcatggaccaaagggtttacttgacaaatttgtgtgacagactccgaacaattcctttactacgaagtataatttataaaataaaatatacccattttaagggtacagtttgatttttgaccagtgaaactatgatcccaatcaaggtatagatgccgtcaccccaaaaagttccctccatatccctttgcagtcagttcatccctaccctggcccagatgatcactgatcttgtcattatagatgagttttgccagttcaagaatttaatggaatcagatattgtaagcattcttgtgtaatacttcattctctctcattattgagattcatccatattgttgaatgtttcactagttaatgtttattgttcaatatttttgtatatacttttaaagcctattcacttgctgatggatctttggtttgtttccaggtttggttattatgaataaagttgctgtgaatacttacgtgtaaaaaaaaaaaaaaaaa

SEQ ID NO: 285738 - DNA, 1000 bp, Homo Sapiens; identical to SEQ ID NO: 115908

SEQ ID NO: 285739 - DNA, 1000 bp, Homo Sapiens
tgggcggagccgcagctgcaaactctgacacaaaagacgtgccttaaggaacccgccgcgtgcccaggtgccccgcggggcatccagctcggccccttggccgcccccctcccaggccccagcgtcttctccccagccccgtcctcccaccaccccagggggcaggcaggcaggccccctcccgtgcgaaactgttaacttattcagctcgctggctttgcacagcctgtcctgggcccagccctgagccccgggccggcgcaggtgggcgtcacctggggactccccactgtcagcagcagccccgggacaccctacccccagcaaccccactgcttccccttcttggtattaagtgcaattaaagccgtgggtgtcgcatcttctccagcgctgggccctcccttgcccccaagctcaagaagggggcactgcccggcccggctgtgaggagggcggcagggggcacggcctccagcttccaaagagcagcgagccgcggagccggggagtgcccacagaccccagcccccgcgcccccgccctccgccgctggtttgtaatggaaccttttctgtgcccctatcttcccggagaccacgcttctcctccgtgccgtgcgacccccaccccatgactattgtgcgattcgtgagcgccgcccgagcggagttggtaacttgttgggtttttttccaaccatcatggccttatctgttccagttttctcagtgttttcagcctgtgagatagatgtttatggcaagaaaaaggaaaaaaaaatggaaatctgacctattgtataaaaatcactattttgtgtgctccgcgtgctatagcttttggggcggccctgcccagtccccgtgcccacggggctccctctcccggtggtgaaagtgtccacacgtgtggtagtctagtgtgccgagctgttttctacctttttgtagtctttcttaaaacaataaattccgctgtgaaaaaaaaaaaaaaaaaa

SEQ ID NO: 285740 - DNA, 1000 bp, Homo Sapiens; identical to SEQ ID NO: 115909

SEQ ID NO: 285741 - DNA, 1000 bp, Homo Sapiens
tctgtgaagaaaatattgaattctggctggcctgtgaagacttcaaaaaaaccaaatcaccccaaaagctgtcctcaaaagcaaggaaaatatatactgacttcatagaaaaggaagctccaaaagagataaacatagattttcaaaccaaaactctgattgcccagaatatacaagaagctacaagtggctgctttacaactgcccagaaaagggtatacagcttgatggagaacaactcttatcctcgtttcttggagtcagaattctaccaggacttgtgtaaaaagccacaaatcaccacagagcctcatgctacatgaaatgtaaaagggagcccagaaatggaggacatttcattctttttcctgaggggaaggactgtgacctgccataaagactgaccttgaattcagcctgggtgttcaggaaacatcactcagaactattgattcaaagttgggtagtgaatcaggaagccagtaactgactaggagaagctggtatcagaacagcttccctcactgtgtacagaacgcaagaagggaataggtggtctgaacgtggtgtctcactctgaaaagcaggaatgtaagatgatgaaagagacaatgtaatactgttggtccaaaagcatttaaaatcaatagatctgggattatgtggccttaggtagctggttgtacatctttccctaaatcgatccatgttaccacatagtagttttagtttaggattcagtaacagtgaagtgtttactatgtgcaagggtattgaagttcttatgaccacagatcatcagtactgttgtctcatgtaatgctaaaactgaaatggtccgtgtttgcattgttaaaaatgatgtgtgaaatagaatgagtgctatggtgttgaaaactgcagtgtccgttatgagtgccaaaaatctgtcttgaaggcagctacactttgaagtggtctttgaatacttttaataaatttattttgataaataatattg

SEQ ID NO: 285742 - DNA, 1000 bp, Homo Sapiens
aaatttaagattctggctggcagtggaggacctgaaaaagaggcctattaaagaagtaccctcaagagttcaggaaatatggcaagagtttctggctcccggagcccccagtgctattaacttggattccaagagttatgacaaaaccacacataacgtgaaggaacctggacgatacacatttgaagatgctcaggagcacatttacaaactgatgaaaagtgattcatacccacgttttataagatccagtgcctatcaggagcttctacaggcaaagaaaaagtctggaaactcaatggatcgcagaacatcttttgaaaaatttgcacagaatgtggggaaatctctcacgtccaagaggttaacaagccttgctcagtcttactaaacggatcatcttgtagcatgaatgcagactggagtcactgcacacactttgtagctcaatgttgtgacctggagcagaggacattagaacaagatgttgcatgagcaaaggacctaaattgttatttttgtgtgtacattccatctccaatggactcttccgtctcaatgcctccattccaaactgttgtctgctttctttctccttctactatgctggatctgtgtctcttcctttttaacaagttcaagtgaagtaaaaccttttctttttttccttctttctctctctctctctctcaaagcttcagttagacacacagttcactgaaaattcagtcagtcaaaaactggaagaactgtaaaagaaaaaagtatatatcaataagtatacatgtggcttcacatttattaaacaataaattccgcacagaaagtttcatttcaccaatgtgtcacagtcagaaacaaactcatgtcttcgtctgttgtctgtacattctccgttaatgtttctcgcatttatttttataccatatttaaagaagaaacaccttttactccaaatgtattaaagttgatcccttctctgtcaaaaaaaaaaaaaaaa

SEQ ID NO: 285743 - DNA, 1000 bp, Homo Sapiens
gtgtcctgagaggctcttgcaggaatgatacgtggcagtgcctgcagcgaggtctgggaacaccctgggtgaggcctgggggtttccgaaaatggaggcattcctttccaaatctggacagcgatcgtttttagtgtttctgtctcaagactggaaaacaatagcatttgtcttgagtgaggaagtgaagcccgctgtgttcatagcaggagagggctcccagacacaggcccgtcctcggaagagccttgagagtgcagctcggacccaccggcggcccccgtagcaggtggtgtgggtgctcgggagtggaggtgacgtcagcagcgctctctgaccgcgggtgtcacgggcatttctcaaaggaagcaggggattcagtgagtgtgaaggtgaacaggatggcctggcagcagggatgtttccgtgagccacaaataccagaaactgaggcgaggctcccagcagccggtagggaaaggtgtttccaggggtccgagggccgtggcctgcgtggccatcccctggagagaggagccgctcagggtgcgcgtcatggagtgtgctcaggggtgcgtggacacctctgctgtggtttgctgctgggggcgatgggagcgcctctccgtcctgtgccctggtccaggatgctgacagcagtgagaggcctgccgtgaggtttggtcttgtcagacctgtagcctggacctcgccgggggaccagggagtgcacgtctgtagatctgtacatatctgggcctttggaggccacgtgtggcatgggaggggctacctggtccctttcacagccaggacacgcctggatgagaaagcctgaggtgcctggcatgcccaccggtgccactctgcagcctccacccctggcctgagtccccctccatccgtcttggtggacacctgtgtggctctcacctgcgttttgagtctgttcttccaggagtaataaattctggacatcatcaaaaaaaaaaaaaaaaaa

SEQ ID NO: 285744 - DNA, 1000 bp, Homo Sapiens; identical to SEQ ID NO: 115910

SEQ ID NO: 285745 - DNA, 735 bp, Homo Sapiens
gctgcccctgaaccccagaacaaccagctggatcagttctcacaggagctacagcgcggagactgggaaacatggttccaaaactgttcacttcccaaatttgtctgcttcttctgttggggcttctggctgtggagggctcactccatgtcaaacctccacagtttacctgggctcaatggtttgaaacccagcacatcaatatgacctcccagcaatgcaccaatgcaatgcaggtcattaacaattatcaacggcgatgcaaaaaccaaaatactttccttcttacaacttttgctaacgtagttaatgtttgtggtaacccaaatatgacctgtcctagtaacaaaactcgcaaaaattgtcaccacagtggaagccaggtgcctttaatccactgtaacctcacaactccaagtccacagaatatttcaaactgcaggtatgcgcagacaccagcaaacatgttctatatagttgcatgtgacaacagagatcaacgacgagaccctccacagtatccggtggttccagttcacctggatagaatcatctaagctcctgtatcagcactcctcatcatcactcatctgccaagctcctcaatcatagccaagatcccatctctccatatactttgggtatcagcatctgtcctcatcagtctccataccccttcagctttcctgagctgaagtgccttgtgaaccctgcaataaactgctttgcaaattc

SEQ ID NO: 285746 - DNA, 1000 bp, Homo Sapiens; identical to SEQ ID NO: 115912

SEQ ID NO: 285747 - DNA, 1000 bp, Homo Sapiens; identical to SEQ ID NO: 221241

SEQ ID NO: 285748 - DNA, 1000 bp, Homo Sapiens; identical to SEQ ID NO: 221243

SEQ ID NO: 285749 - DNA, 1000 bp, Homo Sapiens; identical to SEQ ID NO: 115916

SEQ ID NO: 285750 - DNA, 1000 bp, Homo Sapiens; identical to SEQ ID NO: 115917

SEQ ID NO: 285751 - DNA, 1000 bp, Homo Sapiens; identical to SEQ ID NO: 115305

SEQ ID NO: 285752 - DNA, 541 bp, Homo Sapiens
cttttcgatccgccatctgcggtggagccgccaccaaaatgcagattttcgtgaaaacccttacggggaagaccatcaccctcgaggttgaaccctcggatacgatagaaaatgtaaaggccaagatccaggataaggaaggaattcctcctgatcagcagagactgatctttgctggcaagcagctggaagatggacgtactttgtctgactacaatattcaaaaggagtctactcttcatcttgtgttgagacttcgtggtggtgctaagaaaaggaagaagaagtcttacaccactcccaagaagaataagcacaagagaaagaaggttaagctggctgtcctgaaatattataaggtggatgagaatggcaaaattagtcgccttcgtcgagagtgcccttctgatgaatgtggtgctggggtgtttatggcaagtcactttgacagacattattgtggcaaatgttgtctgacttactgtttcaacaaaccagaagacaagtaactgtatgagttaataaaagacatgaactaaca

SEQ ID NO: 285753 - DNA, 1000 bp, Homo Sapiens; identical to SEQ ID NO: 284139

SEQ ID NO: 285754 - DNA, 1000 bp, Homo Sapiens; identical to SEQ ID NO: 115919

SEQ ID NO: 285755 - DNA, 1000 bp, Homo Sapiens; identical to SEQ ID NO: 115920

SEQ ID NO: 285756 - DNA, 576 bp, Homo Sapiens; identical to SEQ ID NO: 115921

SEQ ID NO: 285757 - DNA, 649 bp, Homo Sapiens
agaatacactcacaagccactccgctgctcgcctctccgccccgcgtccagctcgcccagctcgcccagcgtccgccgcgcctcgccaaggcttcaacggaccacaccaaaatgccatctcaaatggaacacgccatggaaaccatgatgtttacatttcacaaattcgctggggataaaggctacttaacaaaggaggacctgagagtactcatggaaaaggagttccctggatttttggaaaatcaaaaagaccctctggctgtggacaaaataatgaaggacctggaccagtgtagagatggcaaagtgggcttccagagcttcttttccctaattgcgggcctcaccattgcatgcaatgactattttgtagtacacatgaagcagaagggaaagaagtaggcagaaatgagcagttcgctcctccctgataagagttgtccaaagggtcgcttaaggaatctgccccacagcttcccccatagaaggatttcatgagcagatcaggacacttagcaaatgtaaaaataaaatctaactctcatttgacaagcagagaaagaaaagttaaataccagataagcttttgatttttgtattgtttgcatccccttgccctcaataaataaagttcttttttagttcc

SEQ ID NO: 285758 - DNA, 1000 bp, Homo Sapiens; identical to SEQ ID NO: 115922

SEQ ID NO: 285759 - DNA, 1000 bp, Homo Sapiens; identical to SEQ ID NO: 115923

SEQ ID NO: 285760 - DNA, 1000 bp, Homo Sapiens; identical to SEQ ID NO: 115924

SEQ ID NO: 285761 - DNA, 1000 bp, Homo Sapiens
tacaaaggcaaagatctaagcatgattgtgctgctgccaaatgaaatcgatggtctgcagaagcttgaagagaaactcactgctgagaaattgatggaatggacaagtttgcagaatatgagagagacatgtgtcgatttacacttacctcggttcaaaatggaagagagctatgacctcaaggacacgttgagaaccatgggaatggtgaatatcttcaatggggatgcagacctctcaggcatgacctggagccacggtctctcagtatctaaagtcctacacaaggcctttgtggaggtcactgaggagggagtggaagctgcagctgccaccgctgtagtagtagtcgaattatcatctccttcaactaatgaagagttctgttgtaatcaccctttcctattcttcataaggcaaaataagaccaacagcatcctcttctatggcagattctcatccccatagatgcaattagtctgtcactccatttagaaaatgttcacctagaggtgttctggtaaactgattgctggcaacaacagattctcttggctcatatttcttttctatctcatcttgatgatgatagtcatcatcaagaatttaatgattaaaatagcatgcctttctctctttctcttaataagcccacatataaatgtacttttccttccagaaaaatttcccttgaggaaaaatgtccaagataagatgaatcatttaataccgtgtcttctaaatttgaaatataattctgtttctgacctgttttaaatgaaccaaaccaaatcatactttctcttcaaatttagcaacctagaaacacacatttctttgaatttaggtgatacctaaatccttcttatgtttctaaattttgtgattctataaaacacatcatcaataaaataatgactaaaaaaaaaaaaaaaaaaaaaaaaaaaaaaaaaaaaaaaaaaaaaaaaaacccaaaaaaaaaaaaaaaaaaaaaaaaaaa

SEQ ID NO: 285762 - DNA, 1000 bp, Homo Sapiens; identical to SEQ ID NO: 115925

SEQ ID NO: 285763 - DNA, 1000 bp, Homo Sapiens; identical to SEQ ID NO: 221247

SEQ ID NO: 285764 - DNA, 1000 bp, Homo Sapiens
gggagaagtttgatcccgatgcgacccagtttatagagttctctaaactctctgattttgcagctgccctggatcctcctcttctcatagcaaaacccaacaaagtccagctcattgccatggatctgcccatggttagtggtgaccggatccattgtcttgacatcttatttgcttttacaaagcgtgttttgggtgagagtggggagatggattctcttcgttcacagatggaagaaaggttcatgtctgcaaatccttccaaagtgtcctatgaacccatcacaaccacactaaaacggaaacaagaggatgtgtctgctactgtcattcagcgtgcttatagacgttaccgcttaaggcaaaatgtcaaaaatatatcaagtatatacataaaagatggagacagagatgatgatttactcaataaaaaagatatggcttttgataatgttaatgagaactcaagtccagaaaaaacagatgccacttcatccaccacctctccaccttcatatgatagtgtaacaaagccagacaaagagaaatatgaacaagacagaacagaaaaggaagacaaagggaaagacagcaaggaaagcaaaaaatagagcttcatttttgatatattgtttacagcctgtgaaagtgatttatttgtgttaataaaactcttttgaggaagtctatgccaaaatcctttttatcaaaatattctcgaaggcagtgcagtcactaactctgatttcctaagaaaggtgggcagcattagcagatggttatttttgcactgatgattctttaagaatcgtaagagaactctgtaggaattattgattatagcatacaaaagtgattgattcagttttttggtttttaataaatcagaagaccatgtagaaaacttttacatctgccttgtcatcttttcacaggattgtaattagtcttgtttcccatgtaaataaacaacacacgcatacagaaaaaaaaaaaaaaa

SEQ ID NO: 285765 - DNA, 760 bp, Homo Sapiens; identical to SEQ ID NO: 115927

SEQ ID NO: 285766 - DNA, 1000 bp, Homo Sapiens; identical to SEQ ID NO: 221250

SEQ ID NO: 285767 - DNA, 360 bp, Homo Sapiens
atggcaggcctgatgaccatagtaaccagccttctgttccttggtgtctgtgcccaccacatcatccctacgggctctgtggtcatcccctctccctgctgcatgttctttgtttccaagagaattcctgagaaccgagtggtcagctaccagctgtccagcaggagcacatgcctcaaggcaggagtgatcttcaccaccaagaagggccagcagttctgtggcgaccccaagcaggagtgggtccagaggtacatgaagaacctggacgccaagcagaagaaggcttcccctagggccagggcagtggctgtcaagggccctgtccagagatatcctggcaaccaaaccacctgctaa

SEQ ID NO: 285768 - DNA, 1000 bp, Homo Sapiens; identical to SEQ ID NO: 115933

SEQ ID NO: 285769 - DNA, 1000 bp, Homo Sapiens; identical to SEQ ID NO: 115934

SEQ ID NO: 285770 - DNA, 1000 bp, Homo Sapiens
tcatggtcactggggccttggacaagttgttactgactatgttcatggggatgccttgcagaaagctgccaaggcagggcttttggcactttcagctttaacctttgctgggctttgctatttcaactatcacgatgtgggcatctgcaaagctgttgccatgctgtggaagctctgacctttttgacttcatactttgaagaattgatgtatgcctctttgcctctgctttgtcatgccattaagctcacaataaggaagaaataacagataagtccattggtggacagccttcttctcttaatcacaagattattttcagaatttaatctttgaggaaaaggtttgagaggaattatatctaagttgtgagactgagttctatattctggtgagttaatggggttgcctcccagcttcttataagactcacagtataactaaacatgatatatcagcttttgcctttcaatttatcaatctcttaaagagaatccaactttattacgattagtatatgatcaaacttccatatttgccttgggaataatggacaaagggaaatactcttaattcatgaataaaaactttgcagaaaattagacagtgtttaattttcgaaaacttccctctctagacagtagataccacctactgatggttacatatactagggaaattttaaaattaggaaatgctgatagctcatattataaatttctaaatcctaggaagaaacgcttggagtgcttctgaatatacagaagttccatttaagggcaagtttccccgtagatgtatcaaaatactaccaactgtaaattgagatttaattcccaaatgtattctacttgttctaaaacaatctgtccacaaatataaaactataagtaataaattgttattttcgcacaatgggaatctctaatgtgaaaatgtattctatgaaaataattttttaaataaaatgttatataataaaagtgtcttctatgctttt

SEQ ID NO: 285771 - DNA, 1000 bp, Homo Sapiens; identical to SEQ ID NO: 115935

SEQ ID NO: 285772 - DNA, 1000 bp, Homo Sapiens; identical to SEQ ID NO: 221255

SEQ ID NO: 285773 - DNA, 1000 bp, Homo Sapiens; identical to SEQ ID NO: 115937

SEQ ID NO: 285774 - DNA, 1000 bp, Homo Sapiens; identical to SEQ ID NO: 221258

SEQ ID NO: 285775 - DNA, 1000 bp, Homo Sapiens; identical to SEQ ID NO: 115940

SEQ ID NO: 285776 - DNA, 1000 bp, Homo Sapiens; identical to SEQ ID NO: 115942

SEQ ID NO: 285777 - DNA, 1000 bp, Homo Sapiens
cagctctacattaaaaaggagaaagagaaataacctgtctctcattcctaagttgcctcattaattttcatgaacaagaatatgtacctttttgatgctatattactgcgattaaaaaagttcttgcaggtaatgtttatgtatagttaaacgttgtaatttcttatcgtaattataacattcccattctttgtagatgaaactctacatatgaaccacagattttctgagcttctaaatgtagcctttcattgcacatttcagtgatcagaatagatatccttttacacgcacaaaagcaatagattcattcagtggacaagttccttgtttaactacacagctatgatggaatcatatatccaagttccttgcctcagtgaaatatgcatatgtatatcatgaagtgggatgccaagtaagcttaaaatgcattctctagcaaagagattagacttttaaataactcttataaaacaggttggcgatcatttcccaagattggtttcccttgagtttttgttaaaacaaatcttagtagttttgcccgtttaaaacaactcacaatcgtaaatgctactattcctaagatatcttacctttttatttcagtttagccatgtattgtatgagtgtattagtctaagcagtgagaatcttttctatgcctctattccagcaaaaagtagaagtatcaaataaaaagggcaacttttaaaatattaagcctgaagacttctaaaaagacaagaaacatggcctaaataaccaacatagatttacatagtaagtttcacactaccttattaccaaaagcaaacacctcttactttaaactacattatcatgtatatctattgtatgctggtctttactttttgccaaaatcaacatataatgaagagatgcctttgtttgatgagattcaaacttgatgctatgctttaaaataaactcagtacttttagaaacataaaaaaaaaaaaaaaaaaaaaaaaaa

SEQ ID NO: 285778 - DNA, 1000 bp, Homo Sapiens; identical to SEQ ID NO: 115943

SEQ ID NO: 285779 - DNA, 1000 bp, Homo Sapiens
attacgattataaaaagaaacgagtaggtaagataccagacgaagaagtcagacaagcggtagaaaaatttgaagagtcaaaggagttggctgaaagaagcatgtttaactttttagaaaatgatgtagaacaagtcagccagttggctgtgttcatagaggcagcattagactatcacagacagtccacagagattctgcaggagctgcagagcaagctacagatgcgaatatcagctgcatccagtgtccccagacgagaatacaagccaaggcctgtgaaaaggagttctagtgagctcaatggagtttccaccacctctgtagtgaagacgacaggttctaacattcccatggaccagccctgctgtcgtggtctctatgactttgagccagaaaaccaaggagaattaggatttaaagaaggggacatcattacattaaccaatcaaatagatgaaaactggtatgaaggaatgatacacggagaatcgggattcttccccattaattacgtggaagtgatcgtgcctttacctcagtaaatgtgtaacacaaactctggacatactttcgtaactgaaatgaattcacaccagtgtgctctcagtgcggtgttctgtgacatcctttgctctctgaccaacttaatgacttttgtatgtgtgctctctttataatgtattttatatcactttaatttgtataaatgattttcttgtccttgctacatgaaaatattgttttcttttttgcttcctgtcctaaaagtcattggttaaatgtatttgcttcctgtggctaaaaataagtctcacccattgcagttatgtcaacgaatggcctatattcctcagctgcaatgaaatggtaacatttgaaactaagaaatgctaaatattttgtttctcgacattcctgatgacgtctggtcttttcttttcattgtattttaagcttacctgtgaatagcccaataaacatgacacactgtgttggc

SEQ ID NO: 285780 - DNA, 1000 bp, Homo Sapiens; identical to SEQ ID NO: 221261

SEQ ID NO: 285781 - DNA, 1000 bp, Homo Sapiens
cctgtgttcttgctgagcaccctctccggtttgggttgggataacagaggcaggagtggcagctgtcccctctccctggggatatgcaacccttagagattgccccagagccccactcccggccaggcgggagatggacccctcccttgctcagtgcctcctggccggggcccctcaccccaaggggtctgtatatacatttcataaggcctgccctcccatgttgcatgcctatgtactctacgccaaagtgcagcccttcctcctgaagcctctgccctgcctccctttctgggagggcggggtgggggtgactgaatttgggcctcttgtacagttaactctcccaggtggattttgtggaggtgagaaaaggggcattgagactataaagcagtagacaatccccacataccatctgtagagttggaactgcattcttttaaagttttatatgcatatattttagggctgtagacttactttcctattttcttttccattgcttattcttgagcacaaaatgataatcaattattacatttatacatcacctttttgacttttccaagcccttttacagctcttggcattttcctcgcctaggcctgtgaggtaactgggatcgcaccttttataccagagacctgaggcagatgaaatttatttccatctaggactagaaaaacttgggtctcttaccgcgagactgagaggcagaagtcagcccgaatgcctgtcagtttcatggaggggaaacgcaaaacctgcagttcctgagtaccttctacaggcccggcccagcctaggcccggggtggccacaccacagcaagccggccccccctcttttggccttgtggataagggagagttgaccgttttcatcctggcctccttttgctgtttggatgtttccacgggtctcacttataccaaagggaaaactcttcattaaagtccgtatttcttctaaaaaaaaaaaaaaaaaaaaaaaaaaa

SEQ ID NO: 285782 - DNA, 1000 bp, Homo Sapiens
ccaccagcaaggactccagcatcgccgatctcagactgaaagccaaaaagcacgccgcagccctgggtctgtgacgccaacgccagcaccaatgtcgcgcctgtcccgcggcactcagcctgcacgccctccgcgccccgctgcttctccgttacccctttgagacctcgggagccggccctcttcccgcctcactgaccatccctcgtcccctatcgcatcttggactcggaaagccagactccacgcaggaccagggatctcacgaggcacgcaggctccgtggctcctgcccgttttcctactcgagggcctagaattgggttttgtaggagcgggtttgggggagtctggagagagactggacagggtagtgctggaaccgcggagtttggctcaccgcaaagctacaacgatggactcttgcatagaaaaaaaaaatcttgttaacaatgaaaaaatgagcaaacaaaaaaatcgaaagacaaacgggagagaaaaagaggaaggcaacttatttcttaactgctatttggcagaagctgaaattggagaaccaaggagcaaaaacaaattttaaaattaaagtattttatacatttaaaaatatggaaaaacaacccagacgattctcgagagactggggggagttaccaacttaaatgtgtgttttaaaaaatgcgctaagaaggcaaagcagaaagaagaggtatacttatttaaaaaactaagatgaaaaaagtgcgcaggtgggaagttcacaggttttgaaactgacctttttctgcgaagttcacgttaatacgagaaatttgatgagagaggcgggcctccttttacgttgaatcagatgctttgagtttaaacccaccatgtatggaagagcaagaaaagagaaaatattaaaacgaggagagagaaaaataatggcaaaactgtctggactgctgacagtaaattccggtttgcatggaaaaaaaaaaaaaaaaaaaaaaaaaaa

SEQ ID NO: 285783 - DNA, 1000 bp, Homo Sapiens
ttcagtttcacagaaaataaggcacccatctgtctgccaacctaaaactctttcggtaggtggaagctagacacatgaaggtaaataaaaagaaaggctgttaaatacaggaaacagttgcatgtagtaacactaatatatttaaaaataagtcaacagtaaaccactgaaaaaatatatgtatatacacccaagatgggcatcttttgtattaagaaaggaagcattgtaaaataattctgagttttgtgtttgttgtagattgattgtattgttgaaaaagtttgtttttgcgtgggagtgtgtgcctgcgtgggtgtgtgcgtgtttgggtttttttcctttaactgacaagccatcttgagtggtcatgggccactgcttttccctttgtgagtcaatacatagtgctgctgtgtgctttttttgtgtgtatttgctaatttttattaattttagtttttcattaaataaatttgacttttctgtaattcaggtttttcctttttttgtaccattttaaagttagtatcttttgatatgcatatttgtttatggtaaaaaatttataacgtgttcaatattttcttttcccccattaatcagttcattagaaatattttaaaatcagctattttgtgaagccatgagttccagaaagtaaaggtgacatcggaaaaataatcaaaagctatttaaagcatctataaggtgctctctttctgtcttctacagatgagtcacacctttgagcttaatctttgaaaggttagagaataaattgatttttataaatactgcaaatcaggcttttgtttcctttttcagatatcttggacaaatcacatattttaaaatttgttcttgtatttattggttttgcagaagaaggcatcgtcatgcacagtatttgtaattaaaagcaaatcatttgtttaaaaaggcagtttgcaaaaaatgtttttggtcttttataattctcattaaaagaatatctggc

SEQ ID NO: 285784 - DNA, 1000 bp, Homo Sapiens
gtgccactctgggcaaatgctcttccttgagcctgtttccacacctgtaaagtggggatgatgatcctatctcactgcttttgtgaggattacaggaaagcacctgtcctggctctgtacctggcacgtagtaggtgctcagttcatgctggtttccttcctgcctttagtagggacctgctctgtgctcacacctcggctgcatgcaccctgctgtgacggaggctagtgtggaagaggtcctgtcctcagggaattaactgtcttattgggagacaacaactgtcctccttggaacacccaagaaaccatgcaaagcagtggacaacacagaacacgccctcctcctcgctgcctgcagctccaatctgattctgcttgggaatgggcggagcacgtgggctgcttaactgctgtataggacaagccccttacccctctctgggcccatgaattcctggcttggtttatgttctgatttgacacactgattttaatcttcgaatcatgacactgagtgcagaggaggtggcattccgacagcaggacatacatgttggtgtgaagactgggacgacactgggtagaatctagtttttaattattattaatataaaggatcaaattaatttaaatatgattctgaagtctacagaacttttagttctgtgctgtctatgtggacactttggtaaaatgcaaattatgatatggacgttatcattggtctggtgagatgtttcatatttgtgacagttaatttaaaaattatgagttaatgctgcctgtgtctatggggttctgtcttctttgatagccatctattcatctggatcatgggaccctctctaatccttccaccaatcaaataagctattgctattggtttggagttgagatatcagtctcggaaacttctgaaaaatgctaataattacccaaggattatgtcaaattttaaaataaatgtgtgtgtgtttctttaaaaaaaaaaaaaaaa

SEQ ID NO: 285785 - DNA, 1000 bp, Homo Sapiens
ttataaccacagttacatctacatgcctgccttttctatgaagacaggaacagagccatctttgagggtttattatacactgtcagatgttggtgccaatcaaacagtgctgtttgccaaccccaactttctgcgtagcattggaaagttctggaaaagtagaggaatccatgccaagcgcctgtccacaggactttttctggtgagcgcagctctgggtctctgtgaagaggtggccatctatggcttctggcccttctctgtgaatatgcatgagcagcccatcagccaccactactatgacaacgtcttacccttttctggcttccatgccatgcccgaggaatttctccaactctggtatcttcataaaatcggtgcactgagaatgcagctggacccatgtgaagatacctcactccagcccacttcctaggaacaatggaagaagaaaggactgaaccagggtatttttgttaggttttctatgtgactccaagagggaatggtcaagttgtttcatgagtttgcatgggcccttggaaaaacaggaaaggagcaatgaagatccaagcaaaactttactttcagcgttggcttggaggacaaataagaaatgaaacatcctatgaaatactttatagcacatggcagatttgcaactagtaaaatgctggtgaaatgctgttggtaaagcacatggttcaaatctagaagatgcagttcaaaaacaagacagactcgagttgttagggctgaggaaccaatcaaggtagaacaaagaaaatgttggggtaaaagtgttgctgattgtcaacacaaactggcttaataatattaataagaacctgtcttattaagactggctttagaaccgtaggtttttttaaaaaattattatttatttttgccctctttggggaagtgggtgggtagatttaaaaaatcccttcctgagtaataaagatacaaaatgttactgctgataaaaaaaaaaaaa

SEQ ID NO: 285786 - DNA, 1000 bp, Homo Sapiens; identical to SEQ ID NO: 221262

SEQ ID NO: 285787 - DNA, 1000 bp, Homo Sapiens
cctctgcttgctggaacattctaacatttacacttttgttataagctatttaaaaccagtaaggagacttgaaattcagaaaatcaacacatttttaaatgactaacttctaaaagccccaacacatgacgccatctgaagacccgcaacggagtgggggtggcggccgccccaccctccccacccggggaagccatcacagctcatctgcccgcggctgcgtgaggacagcaggggtttttcttcagagtctattttttcagcgacaaggacccaggtcttcctgctgctgccagggagagcagggacagtgccgcgtgcgagatgagctcgaacactgcccgccttactgccgcctaccccgcccgccacgccgccgtcgatgccagcgctgtccccacgggtaccaggaagtgcagagccgcacaggagctgccccggagctgaggggacggtcttcggctcctctgcaccccgtgattctgcccacgctcctccaccacgaggcactgacctgcgtcgggtggtgaccgtggctggcggtcacgccctcagccctccgggcacacgtgccgcctgaccgggcgacccttttcagttcggcaaacgtcgctcccttcattttgggactgaggctgcagcattggaacaaaagagcattatttcaatttttctttctttttttttgttcgttcatttaaacgtatatttagaactgcactttgtccacaaccttcccttctctttctattccccagtgaactgaggtttttaccgactttatagagcagtcaaatccgaagtgctcgagtgcttagaaaccccctctggtgcttggttgaacaagggaatcacaaaaaaacgaaaatgcaaaaactgaacttcgggggtcgttctgtgccttccagcatcttgtacagcaaatcctgactcgtgtctttttacccccaagatatctgtcttcagtagcgactgaatctgccactctcagaataagttc

SEQ ID NO: 285788 - DNA, 1000 bp, Homo Sapiens; identical to SEQ ID NO: 221264

SEQ ID NO: 285789 - DNA, 1000 bp, Homo Sapiens
tcggtgactgccccagaaaagaggggctgggtcatcaaccccctgggagagaagagccccttccctgtgtggatgatggttgccagcctgctgcccgccatcctggtcttcattctcatcttcatggagacacagatcaccacgctcatcatctccaagaaggagcgcatgctgcagaagggctccggcttccacctggacctgctgctcatcgtggccatgggcggcatctgtgccctctttggcctgccctggttggctgctgccactgtccgctctgtcactcacgccaacgcgctcactgtcatgagcaaggctgtggcacctggggacaagcccaagattcaggaagtcaaggagcagcgggtgacggggctgctggttgccctgcttgtgggcctctccatagttatcggggatctgctccggcagatccccctggccgtgctctttggaattttcctgtacatgggagtcacctcccttaacgggatccagttctatgagcggctgcatctgctgctcatgccgcccaaacaccacccagatgtcacttacgtcaagaaggtccggaccctccgtatgcacctgttcacggccctgcagctgctctgcctggccctgctctgggccgtcatgtccacagctgcctccctggccttccccttcatcctcatcctcacagtgccgctccgcatggtggtgctcacccgtatcttcaccgaccgagagatgaaatgtctggatgctaacgaggcagagccggtgtttgatgagcgggagggtgtggacgagtacaatgagatgcccatgcctgtgtagccgccaccgagggacagccgagggaccgatggacgaggggacaggctggtgggatgggttccccctcccatgcccctccctcctttttatttaagtgaataatttaaagtattctcctcccccactgcccctgcagtaaagtgctttggcccccaaaaaaaaaaaaaaaaaaaaaaaa

SEQ ID NO: 285790 - DNA, 1000 bp, Homo Sapiens
cgtgttttatgactaatccttaataactatggtaaataactgtgactgtggggtttttaatctcttgtcattctcatccaaaagtgaccagcataccagttcttgcaataagatattaccctcagaatattaagcacattattgtagagaaaaaaaaatatgtgtacacatatgaacgcacaacatgcacattcatcatcacatgtggcacgtaaggtctcatttgatattgtgtaggaaatctgaagccttttcctgaggtcatctgtaaaatagtctcattgccaaggcatccccagtgccagctggtgaatccatgatcaaaatgcatacgtattgttaaatgataaggtttagaatgacaggaacccatcactgtgtctcatggtcccacttccccatctgtgtgtgaattcctttagactaagggcaggaagacttccagctttctctttgttcttcaatgtgaaactgagaccaagtctctctaagacaaatgcagtgtatttaatgtttgtaagcaattctaagtgagatgtttggcaagaaatcccctaactgatttccatccaaacctaccttatagagcacaatattaagtgttgtacaattactgtgagaactgtgaatatgtgtaacttttttttagtatttgcccggggggaaaaagatattgtattatcatatatgctttttttgcaataaggatttattctcagaacaccaagtaaatctatctctatataaaaaatatatgtaatatatacatattcaaagtatatacagagcctgttttaaaaaatacagtattatttagtaaaattatctgttctatggaccaaatgtaaaatatttataaatgaagatgcattttaaatgtctataaatggtgtcataactagagcacgggcgttatgtaagtttctaagaatttagaggataaataataaaggttctatgatatacaacaaaaaaaaaaaaaagaaaaaaaaaaaaaaaa

SEQ ID NO: 285791 - DNA, 1000 bp, Homo Sapiens
tgactgttgatccagtggtgcaagaagctacactccatgtgtcatcacgcttatgactcctaatgtatttttaaggcaaaaaatgtcagccgactccatcttcacccctcgattcctcgagtccagcctttctgtgccagtgcttcactgagccacaacgctctcgccatcgggacccggctgggcctggagtctcggggcacagttgccatggagccctcctgggtcattctacaaatgtgctgagtgccagctgaaaaccccacaggagatggagtaccttggccaagcttaaagagaagattttctcagggtatttattagtgtgtccagcagggtcaggaagcaggatggaaagatgcattcagactgttaatttattaacaaggcaaatgattttgtgtttcttgatgacagactattaagtttgggacttattttcccatttgagaagttataatatatatttaagatgataagtttcctgcttaagttgtgcctttcagcttcaatgagtttaaggagcactaagggtaatgataccaatgagggttggtttattatcaaacctgaatagctgtggtttctccagtaaatattttcttctactgaacatggagccattattaagagttgtgtgttttttattatgtacatttgtatatttttttgcttgtttgatgttctatttttctaatagttttcttttagtttcttaaagttgtgatactagatttagattctgatgctaactgcaaatcaggttggtctctgctgggtctctcctgcttttattttactttaaggacaagtgtagttgtcgtccaccacctttcaaaaaatgtgaaactgccctgcctcccctttttgctgacaacactgtgtacattgaccacttcctaccatactttatgttgtaaaatcaaactcttttgtggtacattatctcatgcttctgcaaattcgaataaattctatggcttccaaaaaaaaaaaaaaa

SEQ ID NO: 285792 - DNA, 1000 bp, Homo Sapiens
actttattgttttggggagattttttttccttacatgattatattaaacactttaaaatagccttccggtttctggattttgagaagcctgatctgttattgttgtggttgttggtgtttgtaatattcattattgtttgtatatacacggtttagtcttactgatttcaaatgcattttgttattgctcaacccaactggtaacactgtttgctgggagcattatacttaactttgattcaccatggttgatgccactgccatgatcgctgggtcttaaagagctttccctagccactgacagccccgtggagatcataatcagggccccaggctggttccaggatcaggcagcctatagagtgtgagcatctatgtgtagctacccttgttgggtgggctcttagactgatggggtaggatatgaagtgaaagacttcaaatgcaagtaaggtagtttgggctccttaattccaaacatcccatgagtatatcaagatgaataaggaccaagggacctctgtgactcatagaagggctggctgaatcctgaagtagcatagtgggacctggtctacaatttatgcacatgcactgacagccttgctgtgccacgtgtctcaccaagacccagttgggaaagagcgtcatattgccaacaggttgggtttctctggcctacacctgattaatgggccctttatctttggtgtcccctaggagtgtccagttgttttattgctgtattttgttattgcagtacttaataaaaattgttgatagggcccaaaaccctacagaaattctatgtctgtaaaaaccaacaaaggcattggacttgtgtgaatgtacagggtttttttagtagtaattttaaatttaaatgttttaagtgatcatcagtgttcctttttacttataaagttggattcttttttagaatttgtaataaataaaaactgctgctttaccactgtaaaaaaaaaaaaaaaaaaaaaaa

SEQ ID NO: 285793 - DNA, 1000 bp, Homo Sapiens; identical to SEQ ID NO: 115944

SEQ ID NO: 285794 - DNA, 1000 bp, Homo Sapiens
ctcattccttgcaccatagggatcgtcctcaaatccaaacggccacaatacatgcgctatgtcatcaagggagggatgatcatcattctcttgtgcagtgtggccgtcacagttctctctgccatcaatgtggggaagagcatcatgtttgccatgacaccactcttgattgccacctcctccctgatgccttttattggctttctgctgggttatgttctctctgctctcttctgcctcaatggacggtgcagacgcactgtcagcatggagactggatgccaaaatgtccaactctgttccaccatcctcaatgtggcctttccacctgaagtcattggaccacttttcttctttcccctcctctacatgattttccagcttggagaagggcttctcctcattgccatattttggtgctatgagaaattcaagactcccaaggataaaacaaaaatgatctacacagctgccacaactgaagaaacaattccaggagctctgggaaatggcacctacaaaggggaggactgctccccttgcacagcctagcccttcccctggtggcctggattctggtcccaaagcaattctgaaagccagtgtggtaaactagagagagcagcaaaaacaccagtcttgcctgagtctttctccagcatttccagtacatctatcagaatcatcaagtcttggccgggaacacagacagggtgtctacccaagaagcctcacctatccccaacttagaatttgctacttattttaaagacttgttcagtgactgtaaactctatgaaaccagaaaccgaatctgcctcttgctgggatctctaaaagtgtctgataagcatcttaaagtcactcaattcctgaactaatcaatatatatgtttaacccattactcaaatacccaaatcccattccaagttttgtgacccaaaagagaaataaatgctcacaagtgctgtagaattaaacttcagaagttctaacctt

SEQ ID NO: 285795 - DNA, 1000 bp, Homo Sapiens; identical to SEQ ID NO: 115945

SEQ ID NO: 285796 - DNA, 1000 bp, Homo Sapiens
tgccccatggagacccggatgtatgcaacccagaagcccacgaaggaatttcctctgggggaggacagtgatgaggagcctgaccatgaggagtagcagcagaaggtgctccttgaattcatgatgcctcagtgaccacctctttccctgggaccagatcaccatggctgagcccacggctcagtgggcttcacatacctctgcctgggaatcttctttcctcccctcccatggacactgtccctgatactcttctcacctgtgtaacttgtagctcttcctctatgccttggtgccgcagtggcccatcttttatgggaagacagagtgatgcaccttcccgctgctgtgaggttgattaaacttgagctgtgacgggttctgcaaggggtgactcattgcatagaggtggtagtgagtaatgtgcccctgaaaccagtggggtgactgacaagcctctttaatctgttgcctgattttctctggcatagtcccaacagatcggaagagtgttaccctcttttcctcaacgtgttctttcccgggttttcccagccgagttgagaaaatgttctcagcattgtcttgctgccaaatgccagcttgaagagttttgttttgttttttttccatttattttttttttttaataaagtgagtgatttttctgtggctaaatctagagctgctaaaagggctttaccctcagtgaaaagtgtcttctattttcattatctttcagaaacaggagcccatttctcttctgctggagttattgacattctcctgacctcccctgtgtgttcctaccttttctgaacctcttagactcttagaaataaaagtagaagaaagacagaaaaaataactgattagacccaagatttcatgggaagaagttaaaagaaactgccttgaaatccctcctgattgtagatttcctaataggaggggtgtaatgtgacattgttcatacttgctaataaatacattattgcct

SEQ ID NO: 285797 - DNA, 1000 bp, Homo Sapiens
agcaagctgggtttgcagtgtcttccaagcgacggtgttcagaatgtgaaccagtgactctcgggcgcccctgtggtaactttgcaggcggccctcagtgcatccccacgacccctgcctcgagggccgcctgccttagcaatgggggcctccgcttatcctgctagcaggccccctaggattccccctgccctgtgccgcactctggcggtggccacagcgtgctggcgacactcagggcagctgcctggccatgctgtccctgcactgtgccccgcgggctttgttgctggaagaggtgggtggtgggcttctgcgtccaccaggcctcactggctcatgccccttggggggcttgagacaaatcctttctgccccccagggctagtgaagtggcctcttggataccagctcaggggacactggccccacaggagttgtgagccctctagggcagggtgggagccgggaccctcaggtgtagctgagctgtgacattgctggtcatccttggtgctcttgcttttttgaaagatgctttttttttttttaactgacgtagaatgaagaactgcatgtggcttctctgtctctgtggaaaagccatctcaggttggcggcagacacattgtcatcagaggggagcagcggctctggtcctcggagctggttcctctctcccaccctaagggcagccctccatggtcctgtctgtccttctgaagtgtgtccatcctgacctgcgggtcctcagctgctcccacacttgtgccagcccggaggggactggtcccggtcaccgcggacgtgctggccttggtatgtgccaggcttgcctgggctgggcagccttgggggggctgcctttgtggtgggcgctggggaagtacgtcccagcggcctcagggtctaaggagcgctagtgccttgcccacaggtgcgggaccatctgatgtgatgtgaatactcttcccacatacattaaacacacttaagtgag

SEQ ID NO: 285798 - DNA, 1000 bp, Homo Sapiens; identical to SEQ ID NO: 115946

SEQ ID NO: 285799 - DNA, 1000 bp, Homo Sapiens
acacacacacacacacacccacagagagagagctgcaagagcatggaattcatgtgtttaaagataatcctttccatgtgaagtttaaaattactatatatttgctgatggctagattgagagaataaaagacagtaacctttctcttcaaagataaaatgaaaagcacattgcatcttttcttcctaaaaaaatgcaaagatttacattgctgccaaatcatttcaactgaaaagaacagtattgctttgtaatagagtctgtaataggatttcccataggaagagatctgccagacgcgaactcaggtgccttaaaaagtattccaagtttactccattacatgtcggttgtctggttgccattgttgaactaaagcctttttttgattacctgtagtgctttaaagtatatttttaaaagggaggaaaaaaataacaagaacaaaacacaggagaatgtattaaaagtatttttgttttgttttgtttttgccaattaacagtatgtgccttgggggaggagggaaagattagctttgaacattcctggcgcatgctccattgtcttactattttaaaacattttaataatttttgaaaattaattaaagatgggaataagtgcaaaagaggattcttacaaattcattaatgtacttaaactatttcaaatgcataccacaaatgcaataatacaataccccttccaagtgcctttttaaattgtatagttgatgagtcaatgtaaatttgtgtttatttttatatgattgaatgagttctgtatgaaactgagatgttgtctatagctatgtctataaacaacctgaagacttgtgaaatcaatgtttcttttttaaaaaacaattttcaagttttttttacaataaacagttttgatttaaaatctcgtttgtatactattttcagagactttacttgcttcatgattagtaccaaaccactgtacaaagaattgtttgttaacaagaaaaaaa

SEQ ID NO: 285800 - DNA, 1000 bp, Homo Sapiens; identical to SEQ ID NO: 115948

SEQ ID NO: 285801 - DNA, 1000 bp, Homo Sapiens; identical to SEQ ID NO: 115950

SEQ ID NO: 285802 - DNA, 1000 bp, Homo Sapiens
atgccttaatttgagctcgtatttacccctgctgataagtgacttgagagttcccggttttttcctcttgtccttccctcccttctgtccttccatgtgtggggaaagggtgtttttggtagagcttggtttccaaagcgcctggctttctcacttcacattctcaagtggcagtttcattatttagaatgcaaggtggacatcttttggatatctttttctatatattttctaaagctttacatatgagagggtatagggaggtgtttataaaacacttgagaacttttttccttaatatcagaaagcaaaaaaataaaaccacaattgagatttgcctttcaaaccctcaggtttgcctctaaccaggtgtccctggtcaccatcagagtactggaatacgggaaccgaggagaccttggtccttttgtttttgttctggactcttgggagtggaaatgagaatgagtttattctcactggagcttagttccaatgcatttggctccagaaagaccccagtgccttttgacaatggccagggttttacctacttcctgccagtctttcccaaaggaaactcattccaaatacttcttttttcccctggagtccgagaaggaaaatggaattctggttcatactgtggtcccttgtaacctcaggtctttaatgtgatcactttcaaatttaaaagatccaggtggaaatatttttactatagtaataattctacaaaatacctgaattcttaacactgttatatttcagtataagtggtggctttttcttttcatgtctttgatctggttttattcctgtaattcagccacctgattttgtgaggggggggaataatatgtggtttttgtacaaacatgtttctcagtgtgttgttattttggaaaaaatgaggggagggagtttggcaagaatggagaaaatgaatgaagaaggcctaatctctctctttttcagtgaataaatggaacaccatttc

SEQ ID NO: 285803 - DNA, 1000 bp, Homo Sapiens
atgtgattggaaatcctgaggaggagagacgagctgctttctaccaccagccctgggcccaggaagcagtaggcaggcacatctttgccaaggtgcagcagcgaaggcaggaactggaacaggtgctgggaattcgcctgacctaactgctcagggatctttcttcccagccctggagcctggagggagaccaccctctgggtccttgctggggccgcagacacgtaggctggggtgaggagtgtctgctgtcaccctctactctccagctttagttttataaatgtagtgataggattccttgttgcttggtccccaaagccttatactttttgcattggctttaattgggttcagcagatgcctcctctgcccccctgcaggcaggcccaagtaggactgctggaggctgtgctttgacattgtaagacatttccgaaccaaaggctgctgggtttgcatgtttacagactccccctggggcgagggtcagagctggctctggggagctgggctaggaagaggaggtgcagcccagactcttcctagcctttctaaaccaaagttctttgccattcctacaagcccagccttgctgctggttttttcctttcctttgggtatttgcactattttgggagcaagttttctatgtgggagccactttttttgtacaggggtaagttgggggttttcagggagcctgttaggtgcctccttcttttctttcctcaatctatgcaagcggctctggccgccatcatctcctgggatgccagagggctgcctctccagcggcttgggccggggaggggacactccagttctctagcatggcctgaggtatggggtatgtgcatgtggaggccagggtaaggtgaatggggaggctgggaggactggtgttgccctttggagcttggtgaggagggtgggcctagggcttggcgagtgccacatctggcaggtttggaaatttccaaataaatccttttgtcta

SEQ ID NO: 285804 - DNA, 1000 bp, Homo Sapiens
gtgttacgtggtttgtgtattaattttttttcttgtccatatcacaccaccaaaggcttttggaccatttagcatcatgagcctaatggctcagtcagtcacctttcttaagtgttgtgaagatggctcttttctttggatcttgtttctagccctcaactgctgaaagcctcagaatttagattaattgagaaaacacccacctcttttagagaattatcctttgatgctgcagaatctactcttacaatgccttcctacagctcactggggtgcttaccaaagccatagctttaaaccttcccagtccccatcagtagcttcctgaaagtctcctctcttgtttacttctgcaaagggtagcttcttaaaaacgtgatcatgtatgagtatgtatttgttcacttacccttttttacttttaatcaatgtcagataccaagagttgtgttaagctgagtgtagtgtgtaactaactacacttggatcttactgatccagaaatagtccccatagttagagtagttacttatgaagtggttattaaagtgaacacagcacatatacattatctatactgctttttgttatgattaatactgggtatgttctggtaaatccatccttattgtatagaaaaaaaattacttttttaccaggttttccaaagacagaatagatcacaaagctcaaggaatttaatattcttgtaatggactagataattcaaactgattagcccattccagaagaaaaacagctgggaattaagttaatccacttgaaattgttttacaataatcagaacatccaaacctcaaggctcaggatcccatagaccagagcccacctttttgataaacttagtaaagtcttggagactagaagcaagatagtttgtgacacataagcttcccaaaaactagaatagatttttactgaatagtggtatatctgatggtatatgtttcttaaaggtccaaatgtaataaaaaaaaaa

SEQ ID NO: 285805 - DNA, 1000 bp, Homo Sapiens
ccttgctttattttttaatacataaaacttacattctcataacgtgattgataacttaggaagttcacaatgtattttctacttctgcaattaaatattctttagtgcttgtttattattactaaatactaattaagtactaacaagtacttaaatactaatgtattaagtatttaagtactttctaataaaatctttaacaataataatgtaaatttcagaatgtgtctctggtacagaatagttgatattaacagaaaaaaaaaaatctgtagcttcatgaatatgccactctgttaatttcttgttccagacattttaatagagattgcttgagccatgttgtttgaattgctgccaatagcagaccatatccctatcatgttgttggctcaactgttttttttttttccctaatagagatggagtatcgctatgttgctcaggctggtcttgaactcctgggctcaagctatcctcctgcctcagcctcccaaagtactgggattataggtgtgagctactgtacccagccttaacctgtttcacagttgattatacttcatgctgttttccagcatggtattattaagggatttaaagtttgggttgcatgcctgtaatcccagcattttgggaggccgaggtgggcggatcacgaggtcaggagatcgagaccatcgtgactaacacagtgaaaccccgtctctaataaaaatacgaaaaattagccaggcgtggtggcgggcgcctgtaatcccagctactcgggaagctgaggcaggagaatggtgtgaacccagtgagccgagatcgtgccactgcactccagcctgggcaacagagtgagacttcgtctcaaaaaaaaaaaaaaaagtttgggttgaagatcaaattcgtgatatctctatatctaatctttaaaaatcagaatgctaatgctgacgcaaataaaattttcatttattagcaaaaaaaaaaaaaaaaaaaaaaaaaaaaa

SEQ ID NO: 285806 - DNA, 1000 bp, Homo Sapiens; identical to SEQ ID NO: 221269

SEQ ID NO: 285807 - DNA, 1000 bp, Homo Sapiens; identical to SEQ ID NO: 115956

SEQ ID NO: 285808 - DNA, 1000 bp, Homo Sapiens
tctgctccatgtttggacagggtcgtgcctgatctgagataaatggacaagaacaactgaagcctgtcttctggtgcatgtgtcacctgccgataactgcatcttgtgataaagttgggtgatttacagtctccaccaaatgctaaactctggggtcttacgcctttataactccatgggccccagcaaaggttcaggctcaaaacaggtgtcaaatagataactgttgaatgattgttccccagttgcaggctctgccacctggcgttcatactgtctgtgaaaggacccagctcacctttccctctttatctcccagtccttcccaacagcgccgacacctcatggaaactgattgcaaatgtgctacttctcacttctgtgtggcccgaggaggctgggttaatgctgggcttggtaccttaagcaccctttctcccttccccatcttcattctcagaattacacctgtctgaagcaggcattttccaatgccctagatgggaatataagtgtaaggagatgtgaagcatttgcctgtgtgtcagaacattcactgaggatcctcataggcacttctagaaaccaaatccttgaagatgactaaccagaaatgcccgtcatagcactgtttacagttgcaaaaactgaagccaattgaaatgtccatcaggaggggattaaatgaattatggtacagttacaccgttgaatattttacagccattgaagatgatatatagctatattcattgacaaggaaaactcatattttttagtgaaaaaagcaggttatagaattgcatgatattcacatttatataaaactttatatatgggaaggatgttgattgaattgttaataactatggtcacctctagagatggaagtttgcattacctttaatttttaataccattttgtattgcttaaaatttgtatgtattatcgttaaaataagaaaaatcaaataaagctattttcattatgggaaaacaa

SEQ ID NO: 285809 - DNA, 1000 bp, Homo Sapiens
ctgccatgttaggtaattctgaggatcatactgctttatctagagctttgtctcagcttgcagaggttgaggagaagatagaccagttacatcaagaacaagcttttgctgacttttatatgttttcagaactacttagtgactacattcgtcttattgctgcagtgaaaggtgtgtttgaccatcgaatgaagtgctggcagaaatgggaagatgctcaaattactttgctcaaaaaacgtgaagctgaagcaaaaatgatggttgctaacaaaccagataaaatacagcaagctaaaaatgaaataagagagtgggaggcgaaagtgcaacaaggggaaagagattttgaacagatatctaaaacgattcgaaaagaagtgggaagatttgagaaagaacgagtgaaggattttaaaaccgttatcatcaagtacttagaatcactagttcaaacacaacaacagctgataaaatactgggaagcattcctacctgaagccaaagccattgcctagcaataagattgttgccgttaagaagaccttggatgttgttccagttatgctggattccacagtgaaatcatttaaaaccatctaaataaaccactatatattttatgaattacatgtggttttatatacacacacacacacacacacacacacacacacacactctgacattttattacaagctgcatgtcctgaccctctttgaattaagtggactgtggcatgacattctgcaatactttgctgaattgaacactattgtgtcttaaatacttgcactaaatagtgcactgcaagaccagaaaattttacaatattttttctttacaatatgttctgtagtatgtttaccctctttatgaagtgaattaccaatgctttgaataatgttcacttatacattcctgtacagaaattacgattttgtgattacagtaataaaatgatattccttgtgaaaaaaaaaaaaaaaaaaaaaaaaa

SEQ ID NO: 285810 - DNA, 1000 bp, Homo Sapiens
ggatcagaagtaggaaggaaaaaataagagatagcagaggaaaaagaaaaacatttcctcttataacttctgaagtaatttgtaaaaaagatttgtagagtcaatcatgtgtttaaattattttatcacaaacttaacatggaagatattcctttttaactttgtggtaacttctttgaagttatttagaaatatcctttggaacaattattttattgtctaataaatattgacttctcttgaattattttgcagactagtgagtctgtaacataagtattaatcacctccactcatattaaagtgatcattaagaatccagaagctggcttctgcatttgctcagttatacttttaatggtagtatgtttttaggtggaataaattaatatgtgattggtttcaaggaaatgtactctattatgtaatacttccattttataagatgcccgtttctaatacaatgtgtgtaggaattatttgtatgtatgaggtatgattgtaaagattgagcattggaaggggtatcagagaccatgtagttcaactttccactcaaagtaagatttatgaattatttaaatgatagttgttacttggaacagccacttgagaggctctcttggtattgtttggaattgttttaaagtcagtttgagtctcacaagaaggtaagtagagtttcttaatagtcacaacttaatttgaaccacaagtatccagcttaatcacgtatcttactcacgataccactggtccagatgagtttaggtaattttcaaacattaaatccaacttcaacggaaacaaatacactcaagggaagttatttttaaaaaggtactctgcatgttcccgcagtaatgttctgcacaacagtattgtaattgtaatggaatcataacctgctaactagtttgctttaatatggcttgtaattcttgacatttttcttaaaattaaaacgaatttttattttgaatttaaaaaaaaaaaaaaa

SEQ ID NO: 285811 - DNA, 1000 bp, Homo Sapiens
gccacagcagctactgtggttcttcaagcaatgggccttgtaccaaaggacctcatggctaatgcacttgcttcaggagtgcctcacgtagatagattgaggttttataataatcatttcagaattttactctgcatcacaatgtatttcctctttaatgttgtaaatatttggcaatttaagacattgtgtaaaaagcaatctgtaaaaacatctccaggctttgatttttgtaccatggaaattgtatttaaccatacagggttttggtatgtttatattgtttaccttagtgatgtatttgtttaagtggctaacatccaaacgactgtttgaaggcatcagagtaatcttcagtgtggaatgttaaataacgcttttatactgtattttgtactatgatgtaactccccttccttatggctaggctactgtaacacttgcctgtaatcagtgaagggctgtgcaccttgtactatttcacaatgggttctgctggacagataatgggccagtgttattgaggtgatcaagatctgttccacagggctaatgccaccatctcccctcaaaattttgtagaggttctaaaaagaaagtggtatgttgtgtgatgatcagcactaagtcctgcattcctgttaaagccacttgggtcataagaagggagtaaaaaatgaagtctgactagaattctattggcagaggccaagtacatttagtatggcattgagttgtgatatagttttactttgatgtgcattttgaatttcagctacacctagatagacgtaaaatgataattaaaatgctgtaaccaacttatctaataaaattggcaaccagccactattttgttgactatgagaaagttaaaagtttatgttaatttttagggtctgatagaatatttcatgtgtattacagtggtattcatatgctatgtctctaaactttattttcaaaagcttaaggcccaaatacaaacttctctggaata

SEQ ID NO: 285812 - DNA, 1000 bp, Homo Sapiens; identical to SEQ ID NO: 115959

SEQ ID NO: 285813 - DNA, 1000 bp, Homo Sapiens
aaaagacaagagagatgaaaacgtttgattattttctcagtgtatttttgtaaaaaatatataaagggggtgttaatcggtgtaaatcgctgtttggatttcctgattttataacagggcggctggttaatatctcacacagtttaaaaaatcagcccctaatttctccatgtttacacttcaatctgcaggcttcttaaagtgacagtatcccttaacctgccaccagtgtccaccctccggcccccgtcttgtaaaaaggggaggagaattagccaaacactgtaagcttttaagaaaaacaaagttttaaacgaaatactgctctgtccagaggctttaaaactggtgcaattacagcaaaaagggattctgtagctttaacttgtaaaccacatcttttttgcactttttttataagcaaaaacgtgccgtttaaaccactggatctatctaaatgccgatttgagttcgcgacactatgtactgcgtttttcattcttgtatttgactatttaatcctttctacttgtcgctaaatataattgttttagtcttatggcatgatgatagcatatgtgttcaggtttatagctgttgtgtttaaaaattgaaaaaagtggaaaacatctttgtacatttaagtctgtattataataagcaaaaagattgtgtgtatgtatgtttaatataacatgacaggcactaggacgtctgcctttttaaggcagttccgttaagggtttttgtttttaaacttttttttgccatccatcctgtgcaatatgccgtgtagaatatttgtcttaaaattcaaggccacaaaaacaatgtttgggggaaaaaaaagaaaaaatcatgccagctaatcatgtcaagttcactgcctgtcagattgttgatatataccttctgtaaataactttttttgagaaggaaataaaatcagctggaactgaaccctaaaaaaaaaaaaaaaaaaaaaaaaaaaaaaaaaaaa

SEQ ID NO: 285814 - DNA, 1000 bp, Homo Sapiens; identical to SEQ ID NO: 221271

SEQ ID NO: 285815 - DNA, 1000 bp, Homo Sapiens; identical to SEQ ID NO: 115961

SEQ ID NO: 285816 - DNA, 1000 bp, Homo Sapiens; identical to SEQ ID NO: 221273

SEQ ID NO: 285817 - DNA, 1000 bp, Homo Sapiens; identical to SEQ ID NO: 115962

SEQ ID NO: 285818 - DNA, 1000 bp, Homo Sapiens
ttgtcaatgtttatgaacctcagttgcagcaccatgtggctcaaaagaagattccttatgtggatacccaaggacagttaattaagccagacaaacccaatggaataaagatggaaaaatttgtctttgacatcttccagtttgcaaagaagtttgtggtatatgaagtattgcgagaagatgagttttccccactaaagaatgctgatagtcagaatgggaaagacaaccctactactgcaaggcatgctttgatgtcccttcatcattgctgggtcctcaatgcagggggccatttcatagatgaaaatggctctcgccttccagcaattccccgcttgaaggatgccaatgatgtaccaatccaatgtgaaatctctcctcttatctcctatgctggagaaggattagaaagttatgtggcagataaagaattccatgcacctctaatcatcgatgagaatggagttcatgagctggtgaaaaatggtatttgaaccagataccaagttttgtttgccacgataggaatagcttttatttttgatagaccaactgtgaacctacaagacgtcttggacaactgaagtttaaatatccacagggttttattttgcttgttgaactcttagagctattgcaaacttcccaagatccagatgactgaatttcagatagcatttttatgattcccaactcattgaaggtcttatttatataattttttccaagccaaggagaccattggccatccaggaaatttcgtacagctgaaatataggcaggatgttcaacatcagtttacttgcagctggaagcatttgtttttgaagttgtacatagtaataatatgtcattgtacatgttgaaaggtttctatggtactaaaagtttgttttattttatcaaacattaagcttttttaagaaaataattgggcagtgaaataaatgtatcttcttgtctctggaaaaaaaaaaaaaaaaaaaaaaaaaaaaaa

SEQ ID NO: 285819 - DNA, 1000 bp, Homo Sapiens; identical to SEQ ID NO: 115963

SEQ ID NO: 285820 - DNA, 1000 bp, Homo Sapiens
ccaaggcctgcagcagatgatggaccatgaagcaagactgctggtggccaaggcctacagacacaccgagaaggtgctgcaggacaacctggacaagttgcaggcgctggcaaacgcccttctggaaaaggaagtgataaactatgaggacattgaggctctcattggcccgccgccccatgggccgaagaaaatgatcgcaccgcagaggtggatcgacgcccagagggagaaacaggacttgggcgaggaggagaccgaagagacccagcagcctccacttggaggcgaagagccgacttggcccaagtagttgggaggtgttggctgcacgtgcgggtggtccgggaagtgagggctcactcagccaccctgagttgcttttcagctgaggtttgcacttcctctcgcggccctcagtagtccctgcacagtgacttctgagatctgttgattgatgacccttttcatgattttaagtttctctgcagaaactactgacggagtcctgtgtttgtgagtcgtttcccctatggggaaggttatcagtgcttcccgagtgagcatggaacacttcgagttcccagggttatagacagtcgttcccagtgtggctgaggccacccagaggcagcagagcattcagactccaaacagacccctgttcatgccgacgcttgcacgaccgccccagttcctgtggctccctcggaatgctaaggggatcggacatgaaaggaccctgtgagccgattgtcctatctccagcggccctgtcatccagctcactcatcaatggggccagtcaggcccaggcactgggctccggaggactcaccactgccccctgctgccatgtggactggtgcaagttgaggacttcttgctggtctagtcacgcatgcagtgttggggatgccttggtttttactgctctgagaattgttgagatactttactaataaactgtgtagttggaaaatctaaaaaaaaaaaaaaa

SEQ ID NO: 285821 - DNA, 438 bp, Homo Sapiens
agcccagtaggtggggccttgctgccatctgccatatgacccttccagtcccaggcttctgaagagacgtggtaagtgcggtgcagttttcaactgacctctggacgcagaacttcagccatgaaggtaacaggcatctttcttctcagtgccttggccctgttgagtctatctggtaacactggagctgactccctgggaagagaggccaaatgttacaatgaacttaatggatgcaccaagatatatgaccctgtctgtgggactgatggaaatacttatcccaatgaatgcgtgttatgttttgaaaatcggaaacgccagacttctatcctcattcaaaaatctgggccttgctgagaaccaaggttttgaaatcccatcaggtcaccgcgaggcctgactggccttattgttgaataaatgtatctgaatatc

SEQ ID NO: 285822 - DNA, 1000 bp, Homo Sapiens
tcccggacagtcctggcctcaacagaaccgtggttaacatctcgtccctctgtgccctgcaacctttcaaaggctgggcgctgtactgtgcaggaaaggctgctcgtgatatgctgttccaggtcctggcgctggaggaacctaatgtgagggtgctgaactatgccccaggtcctctggacacagacatgcagcagttggcccgggagacctccgtggacccagacatgcgaaaagggctgcaggagctgaaggcaaaggggaagctggtggattgcaaggtgtcagcccagaaactgctgagcttactggaaaaggacgagttcaagtctggagcccacgtggacttctatgacaaataagcccatgtttttggcttcctgaacctttttgcccccacttttagacataccccagagccctgtggctccccacaccctgccataggggcagtcctgccttacacatagaagcattcatgcctgctgccctgccctcaggcacagccagctgtgagctcccaggtcattggccttaccagttgtcaggagtctgtgctgtgcaccctgggttataaggaggcttaggagagaggttatgggtattggtgtctctatccccaggaatagaacttaaggggtgggaagaacaggaaaagaagctggaacacagaagagaggaggttgtgtctcttgctcatagcaagcctgtgggtagaggaaagagtgatctggtgtcgaataggaggacccatgtagattcgcagatggcctggatgggaggaagggcagacggtacatgtcccagcccacatagatgccccttgctgagggtagcaggaccttctgttgaactttgtgtcctcactctgatgtctccttccttcagaatctaccacccctcccccaggctgggagaaggggctcctgggtgtctgtatacacgccaaaggcagatacaaataaaatacagattgtcctttaaaaaaaaaaaaaaaaaa

SEQ ID NO: 285823 - DNA, 619 bp, Homo Sapiens
agcagttctaagggaccatacagagtattcctctcttcacaccaggaccagccactgttgcagcatgagttcccagcagcagaagcagccctgcatcccaccccctcagcttcagcagcagcaggtgaaacagccttgccagcctccacctcaggaaccatgcatccccaaaaccaaggagccctgccaccccaaggtgcctgagccctgccaccccaaagtgcctgagccctgccagcccaagcttccagagccatgccaccccaaggtgcctgagccctgcccttcaatagtcactccagcaccagcccagcagaagaccaagcagaagtaatgtggtccacagccatgcccttgaggagccggccaccagatgctgaatcccctatcccattctgtgtatgagtcccatttgccttgcaattagcattctgtctcccccaaaaaagaatgtgctatgaagctttctttcctacacactctgagtctctgaatgaagctgaaggtcttagtaccagagctagttttcagctgctcagaattcatctgaagagagacttaagatgaaagcaaatgattcagctcccttatacccccattaaattcactttcaattcca

SEQ ID NO: 285824 - DNA, 1000 bp, Homo Sapiens
aaaggaatttagcacaatctataaacactttgatgagaatttgacagggcgcctgactcacaaagagttccggtcctgcctgagaggactcaattactacttgcccatggtggaggaggatgaacatgagcccaagtttgagaagttcctggatgctgtggatccagggaggaagggctatgtctcactggaggactatactgctttcctgattgacaaggagtcagaaaacatcaagtccagtgatgaaatagagaatgccttccaagccctggcagagggcaagtcatatattaccaaagaagacatgaagcaggcccttaccccagagcaagtgtcattctgtgccacacatatgcagcaatatatggacccacgggtcgaagccatctctctggctatgactacgttggcttcaccaattcctactttggcaactaataagcagctcctcgtggatcgtagaaaatcttagtgtcgtgggaaatttactggggggcaaagagtacaggcaaatgtggaagataaagatggcctcgtgtgtgtgtgtgtgtgtgtgtgtgtgtgtgtgtgcttgtgtttgtgtgcatattacatttattgtaggatctttaaaaaatctcaagggtgggagatagaaaggttaatagagttggaggagtggaagctattttgtatgcaactagtcactgctgaggggtgtcaaagtttctatttttatttgttctgttttgcacgtctttatcattttcctttattccgattatagaataaagtaattctttttaaaaatattttttggggcaaagttaagtaaaatgttgagcttctatatttctgggaactgtactcatataagagtgggcagctaattttactgtaaagaagggccatggtatagtagataaataaaatccaaggcaattttcaaacaatttttttaaactttggaatgtgtttaaatttaaatttgaaaataaagatatttgattttctgggg

SEQ ID NO: 285825 - DNA, 1000 bp, Homo Sapiens; identical to SEQ ID NO: 221275

SEQ ID NO: 285826 - DNA, 1000 bp, Homo Sapiens; identical to SEQ ID NO: 115965

SEQ ID NO: 285827 - DNA, 1000 bp, Homo Sapiens
aaagccttgaagaaaatgactttatttttctaagtgtaacctcagtatttatgtaatttgtacaggggccatgccccacccccctcctccccctttggggtagaccttgagggtgggccagcataggggggagggtcttttaccctgtgtcagagcctaccttcaccacctatatccagaaggggagctttttcagaaacagggcagcagtggggtgaaattttcttaacccctaagactgccttcagtaggaacaagctggcttctgtgattaggtgaagggatgggggaagattttatgcacagcctagttatcaaggggatgatttgccgacatgtttgagaaccccctaacctctaaccctcattgctgtcttgccccagtttggggtgccaagatggaagtcacctttctgggctttctcctggagatagctggggcttatgggtggctttcaaggctggggcatggcaaatcaggggccagagagcaggggagcttgggactcaggtctgtaactgcccagccccttttctctgctcttgtttcactccaccatcactcactcactccccactcccccacccatggggaggagacctttgatgaattcttcctctccttcccacaaaagacagacccagtgagtgaatcaggcaaagtgcttataatgtgtgttgtgtgagcgtggccttgggaggacatgcgtgtgtcagggatgagttgaggtgatatttttatgtgcagcgacccttggtgtttcccttcctcggtggctctggggtatgtgtgtgtgggtgtgtgcgcctgagtgagtgtgtgtgcttgaatgtgagtgtgtatgtcagtggtttctacttcccctgggatgctgacccaggaatagtggacatggtcacagtcctatgtacagagctttcttttgtattaaaaaaaaatactctttcaataaatgtatcatttttgtgcacagaaaaaaaaaaaaaaaaaaaaaaaaaa

SEQ ID NO: 285828 - DNA, 1000 bp, Homo Sapiens; identical to SEQ ID NO: 115966

SEQ ID NO: 285829 - DNA, 894 bp, Homo Sapiens
cggaaactcagagccgggttcctcccgggtttctgccgggtttctccctgcggctcctgggttgttgagactcttgtgaagatggcttgcgctgccgcgcggtccccggccgaccaggacaggtttatttgtatctatcctgcttatttaaataataagaagaccatcgcagagggaaggcgaatccccataagtaaggctgttgaaaatcctacagctacagagattcaagatgtatgttcagcagttggacttaacgtatttcttgagaaaaataaaatgtactctagagaatggaatcgtgatgtccaatacagaggcagagtccgggtccagctcaaacaggaagatgggagcctctgccttgtacagttcccatcacgtaagtcagtaatgttgtatgcagcagaaatgatacctaaactaaaaacaaggacacaaaaaacaggaggtgctgaccaaagtcttcaacaaggagagggaagtaaaaaagggaaaggaaagaaaaagaagtaacctagtatcagcatcaagtatgtggtactactgtaagagacatgaatggagacttctaatttgtatcggagggaaacagaagctttttgtttgcatcatttaactgaactgtgaacccttgtgcctctcatctttatcatcggagttgacagtgaaacaaatttacatcagaagtttgcatctcgcgtatatgccgtataaaagaatttttttgtctttcaatgcagttttttggaagaaaatatttttaaatggacaatggactgtacaataagttacttgaaataagttgtttcagataaatttcaattagatttaaaataaacattatgtccaccttttaagttaatgaaataaaatttgaaactgaaaaaaaaa

SEQ ID NO: 285830 - DNA, 1000 bp, Homo Sapiens; identical to SEQ ID NO: 115967

SEQ ID NO: 285831 - DNA, 1000 bp, Homo Sapiens
agactttgcaattttttttttaggatgagcctctcctagacttgacctagaatattacatattcctccagtaagtaatactgaagagcaaaagagaggcaggattggggtcacagccgcttcttcagcatggaccaagtgggccttggggattgcagcgttctcgaagtggctgtaggactcgaatttacagaaagccacagaggtgcaacttgaggctctgctagcaagccaccagtgaggctattgggtaaccacctttctatacaggagattggaatctactttgtcatttatccaccacagtgacaaaggaaaagtggtgccgttatgcaatccatttaactcataaacatattactctgagtaactggccagccattcatcggatccttcattgggtactcctgaaatcagacatgttcctgtagaaagaattttaagttaggctttctatgcacctatcaagaatcaagagaatagattgtatcaaacaacggcagggaaatccttcagcaattctaatccactttgggttttcagctgtttttacatctaaagcaatagactagaactgaattatcttctacatagtaaaatcacaattgtggaattacaggaattctggtgatattaaggtgaaataacaaaacacaaaaggccctattttaacagttgatgtgacagtaagttttaatagaacctgtaacttcattttggaaatgcttctccaccaaataagggctttttcccctatttaaggagccagatggattgaaagatgtggaaataggcagctgtagatcttgatcttccaggtaccccatgtacctttattgagcttaattataatactgtcaaattgccacgatctcactaaaggatttctatttgctgtcagttaaaaataaagccctaaatacatttttattctttctactgagggcattgtctgttttctttgtaaatgccgtacaataaacaaattatttaataaccta

SEQ ID NO: 285832 - DNA, 1000 bp, Homo Sapiens; identical to SEQ ID NO: 115968

SEQ ID NO: 285833 - DNA, 1000 bp, Homo Sapiens
gaagaagatgctgaggacatgtgcagtccacatcactctggatccagacacagccaatccgtggctgatactttcagaagatcggagacaagtgaggcttggagacacccagcagagcatacctggaaatgaagagagatttgatagttatcctatggtcctgggtgcccagcactttcactctggaaaacattactgggaggtagatgtgacaggaaaggaggcctgggacctgggtgtctgcagagactctgtgcgcaggaaggggcactttttgcttagttccaagagtggcttctggacaatttggttgtggaacaaacaaaaatatgaggctggcacctacccccagactcccctccaccttcaggtgcctccatgccaagttgggattttcctggactatgaggctggcatggtctccttctacaacatcactgaccatggctccctcatctactccttctctgaatgtgcctttacaggacctctgcggcccttcttcagtcctggtttcaatgatggaggaaaaaacacagcccctctaaccctctgtccactgaatattggatcacaaggatccactgactattgatggctttctctggacactgccactctccccattggcaccgcttctcagccacaaaccctgcctcttttccccatgaactctgaaccacctttgtctctgcagaggcatccggatcccagcaagcgagctttagcagggaagtcacttcaccatcaacattcctgccccagatggctttgtgattccctccagtgaagcagcctccttatatttggcccaaactcatcttgatcaaccaaaaacatgtttctgccttctttatgggacttaagttttttttttctcctctccatctctaggatgtcgtctttggtgagatctctattatatcttgtatggtttgcaaaagggcttcctaaaaataaaaaataaaatttaaaaaactgtgaaaaaaaaaaaaaaaaa

SEQ ID NO: 285834 - DNA, 1000 bp, Homo Sapiens; identical to SEQ ID NO: 115970

SEQ ID NO: 285835 - DNA, 1000 bp, Homo Sapiens; identical to SEQ ID NO: 221277

SEQ ID NO: 285836 - DNA, 1000 bp, Homo Sapiens
tgacagagcaggacatgagacatagatacagtggggaggagaagtggggaaaggtggagcagagagttcttacttattgaagattatacagccctttcggttatgaagtccctgcttgaaggcaatggacctggggaagagactatcacaaaaagtctccattttcattttacatcctctctattggaggcagcacttttccctcatgctgtcctataggactccactttgaaggttgtgcctacgttgcagggaactaggaacatggaggggaaccaacaacagcatcttagaagaaatgtagccaaattggagtccattcttctttagggcagtatatgaaatcctagcagatgtaaaatggaaaagaatcctaatgcttcttccttcagaaagtagaggaactaggggcccaattagcatcatctaggggaatctctattactctgtacttatactaatgtttacaagaatgcaatatactgtgatgccttcctactcaagcctcctagcattcaaacttccatcctattagtcattaacgtggttaaacttcaattcacaatcaccttggaatcaatgtcagtttgatttattttgttacagagcaataaaatcattagaacaatggtttttaaaagacttaagtggatgcatcctatgcatgtaagcattatttcccaaaccaaagcatcattcatctccatttatttcttttgttcccgctcagtgtgaagttgggaactgagaggggatggctgctggtttcacagaagtttggatgccttactcttatcttaaagccagcatccagaatttcctccctctctgatgccacatgcaaaaccaggtgtacgatgtcaagatggattctttgagagccagggtagatcatatgactgcctttctgtaaaattggatgcctagtacaaatgctctttgcctctaattcagtattccatttaataaaaacaatacagtggctggaaaggagcatcag

SEQ ID NO: 285837 - DNA, 1000 bp, Homo Sapiens; identical to SEQ ID NO: 115971

SEQ ID NO: 285838 - DNA, 1000 bp, Homo Sapiens
catcgtacgttggtcgtggtcttaactcagatcaactccatatgctggcagagaagcttacagtccaatctagctacagtgatggtcacctcacctgggccaagttctgcaaggaacatttacctggtaaatcatttaccttttggacatggcttgaagcaatattggatctaattaagaaacacattcttcccctttggattgatgggtatgtcatgggctttgttagcaaagagaaggaacggctgttgctaaaggataaaatgcctggcacctttttattaagattcagtgaaagccatctcggaggaataactttcacctgggtggaccattctgaaagtggggaagtgagattccactctgtagaaccctacaataaaggccggttgtctgctctgccattcgctgacatcctgcgagactacaaagttattatggctgaaaacattcctgaaaaccctctgaagtacctatatcctgacattcccaaagacaaagccttcggtaaacactacagctctcagccttgcgaagtttcaagaccaacagaaaggggtgacaaaggttatgttccttctgtttttatccccatctcaacaatccgaagtgattcaacagagccacattctccatcagaccttcttcccatgtctccaagtgtgtatgcggtgttgagagaaaacctgagtcccacaacaattgaaactgcaatgaagtctccttattctgctgaatgacaggataaactctgacgcaccaagaaaggaagcaaatgaaaaagtttaaagactgttctttgcccaataaccacattttatttcttcagctttgtaaataccaggttctaggaaatgtttgacatctgaagctctcttcacactcccgtggcactcctcaattgggagtgttgtgactgaaatgcttgaaaccaaagcttcagataaacttgcaagataagacaactttaagaaaccagtgttaataacaatattaacag

SEQ ID NO: 285839 - DNA, 1000 bp, Homo Sapiens
caggcactcaatgcagccagacctattcctcctgggcccctcatctgctcagcagctatttgaatgagatgattcagaaggggaggggagacaggtaacgtctgtaagctgaagtttcactccggagtgagaagctttgccctcctaagagagagagacagagagacagagagagagaaagagagagtgtgtgggtctatgtaaatgcatctgtcctcatgtgttgatgtaaccgattcatctctcagaagggaggctgggggttcattttcgagtagtattttatactttagtgaacgtggactccagactctctgtgaaccctatgagagcgcgtctgggcccggccatgtccttagcacaggggggccgccggtttgagtgagggtttctgagctgctctgaattagtccttgcttggctgcttggccttgggcttcattcaagtctatgatgctgttgcccacgtttcccgggatatatattctctcccctccgttgggccccagccttctttgcttgcctctctgtttgtaaccttgtcgacaaagaggtagaaaagattgggtctaggatatggtgggtggacaggggccccgggacttggagggttggtcctcttgcctcctggaaaaaacaaaaacaaaaaactgcagtgaaagacaagctgcaaatcagccatgtgctgcgtgcctgtggaatctggagtgaggggtaaaagctgatctggtttgactccgctggaggtggggcctggagcaggccttgcgctgttgcgtaactggctgtgttctggtgaggccttgctcccaaccccacacgctcctccctctgaggctgtaggactcgcagtcaggggcagctgaccatggaagattgagagcccaaggtttaaacttctctgaagggaggtggggatgagaagaggggtttttttgtactttgtacaaagaccacacatttgtgtaaacagtgttttggaataaaatatttttttcat

SEQ ID NO: 285840 - DNA, 1000 bp, Homo Sapiens
actccttcctttctatcattcccctgcccacctccttccagcactgactggaagggaagttcaggctctgagacacgccccaacatgcctgcacctgcagcgcgcacacgcacgcacacacacatacagagctctctgagggtgatggggctgagcaggaggggggctgggtaagagcacaggttagggcatggaaggcttctccgcccattctgacccagggcctaggacggataggcaggaacatacagacacatttacactagaggccagggatagaggatattgggtctcagccctaggggaatgggaagcagctcaagggaccctgggtgggagcataggaggggtctggacatgtggttactagtacaggttttgccctgattaaaaaatctcccaaagccccaaattcctgttagccaggtggaggcttctgatacgtgtatgagactatgcaaaagtacaagggctgagattcttcgtgtatagctgtgtgaacgtgtatgtacctaggatatgttaaatgtatagctggcaccttagttgcatgaccacatagaacatgtgtctatctgcttttgcctacgtgacaacacaaatttgggagggtgagacactgcacagaagacagcagcaagtgtgctggcctctctgacatatgctaacccccaaatactctgaatttggagtctgactgtgcccaagtgggtccaagtggctgtgacatctacgtatggctccacacctccaatgctgcctgggagccagggtgagagtctgggtccaggcctggccatgtggccctccagtgtatgagagggccctgcctgctgcatcttttctgttgccccatccaccgccagcttcccttcactcccctatcccattctccctctcaaggcaggggtcatagatcctaagccataaaataaattttattccaaaataacaaaataaataatctactgtacacaatctgaaaaaaaaaaaaaaaaaa

SEQ ID NO: 285841 - DNA, 1000 bp, Homo Sapiens; identical to SEQ ID NO: 115972

SEQ ID NO: 285842 - DNA, 1000 bp, Homo Sapiens
taggacgagtagcttctgacatgtgtgcctcagatctgttccaccccactcacagtggttctgtttgctccagactggggctagggcctaatctttgaagtttgttctttggtattgatgtgggtcagaaggagcctcatcctaatctcactcaggcctccagggatccatgggggagtgaaaccaattctcagagaacaacccaccagagacttttaaagagaggccaggcttgggaatgggttgggagaggcatctgttcattggagcatgagtggatgccagaactgtaggttataaggcagtcactttttctctctactcccacccacacctgcctccctcttacccctgctcccccacactgcaggaggatttgtctctaagaggtgctgccccaaagctccccaagcatcaatactcctagggctcaggacaagtggctcccctggccaggagagccacagccatgatacagggctcttatggagccctggagttgttgggcaaggatgctgtcattttttgaaccaaaagacaaacaggttaaaaggaaaaaaagtaatctgaatttcccaagtgcctacgctgcatattccccttgttagatcccattttcatgttactttgtagccttggccagaggctcaaaaaggacacaaccagtttggggaaggggtggctaaggaagatggtataggtgaaggcggctgtgtgaccactttcccccacccttcccaccctctagacaactctctcccttacctgtttttgctatggctgtaaaggtatttttcctctgccccactccctgccatacctttatcctgggatcctattttgggcctggggtgggtatacctggggctggtcttaggagggtgctaggctgcagactgccttgtactccctggacaccctcaaatggggttttctgtgttatttcataaaattctttgaagtccaataaagcatgtaggagattttaaccacaaaaaaa

SEQ ID NO: 285843 - DNA, 1000 bp, Homo Sapiens; identical to SEQ ID NO: 221278

SEQ ID NO: 285844 - DNA, 1000 bp, Homo Sapiens
ttccatgaaaataatgtgtcaactagagtttcttctctaccatcagagagcagttctggaaccaaccactcaaaaagacaaccagcattcgatccatggaaaagtcctgaaaatattagtcattcagagcaactcaaggaaaaagagaagcaaggatttttcaggtcaatgaaaaagaaaaagaagaaatctcaaacagtacccaattccgacagccctgatcttctgacgttgcagaaatccattcattctgctagcactccaagcagcagaccaaaggagtggcgccccgagaagatctcagatctgcagacccaaagccagccattaaaatcactgcgcaagttgttacatctctcttcggcctcaaatcacccggcttcctcagatccccgcttccagcccttaacagctcaacaaaccaaaaattccttctcagaaattcggattcaccccctgagccaggcctctggcgggagcagcaacatccggcaggaacccgcaccgaagggcaggccagccctccagctgccagacggtggatgtgatggcagaagacagagacaccattctggaccccaagatagacgcttcatgttaaggacgacagaacaacaaggagaatacttctgctgtggtgacccaaagaagcctcacactccgtgcgtcccaaaccgagcccttcatcgtccaatctccagtcctgctccctatccagtactccaggtccgaggcacttccatgtgcccgacactccaggtccgaggcactgatgctttcagctgcccaacccagcaatccgggttctctttcttcgtgagacacgttatgagggaagccctgattcacagggcccaggtaaaccaagctgcgctcctgacataccatgagaatgcggcactgacgggcaagtgacttctgcaagcctgcggctggtcccaatgccctgaatcacctctctcatggaagaaccaattaacaccaatgaatcaaccaaaac

SEQ ID NO: 285845 - DNA, 1000 bp, Homo Sapiens; identical to SEQ ID NO: 115973

SEQ ID NO: 285846 - DNA, 1000 bp, Homo Sapiens; identical to SEQ ID NO: 221280

SEQ ID NO: 285847 - DNA, 1000 bp, Homo Sapiens
cccttgcccctaaccacctgggcggtggtgctgtggttctgggggcagagtcccatgcctccaaggatgtcgccatcgacatgatggactctcggaccagccagcagctgcagctcattgacgagcaggattcctacatccagagtcgggcagacaccatgcagaacattgagtcgacaattgttgagttgggctccatctttcagcagttggcacacatggttaaggaacaggaggaaaccattcagaggatcgacgagaacgtgctaggagcccagctggacgttgaggccgcccattcagagatcctcaagtacttccagtctgtcacctccaaccggtggctcatggtcaaaatcttcctcatcctcattgtcttcttcatcatctttgtggtcttccttgcttgaaccctctctactctgaggcactctgttggggtttgggaccctcctgggaaggcaagtggccagtgctgccactgagcctgtgcagggtacttgggagaaaggccctgtttccctggaactgctaagaatgaccactgcccctgatcccccaccccttgcctctggccaccctgtcttccccccaccaccctcaggcctatgaaacacacagggttctagatttgaactctgctgtgaagtgactggaagggagcagaggccagctgggggccagtgggggaggttgtttccactaggagatttttataaaccctctccagcctctcccaaaggaagcgttggcagcaaagggagatgatgcccttacccaccttcctgtgagtgaagagaggaagcagccccagggaccaattttcccaattgacctctttcttcctctttcaccatgtgaggcagggagccctgagcccttcagctgcctgcacaacccctgacattggctgctggtgactcaatctgccaaatgtgctgcagctcgttttctcccaattacagcaagactgtcagcctcaaaaaaaaaaaaaaaaaaa

SEQ ID NO: 285848 - DNA, 1000 bp, Homo Sapiens
ttttccctagtccgccttcgttcaagggtcaggaatggaccagaacagatgggttctggaggcccctgaacagagggctatggctgtggagaaggttcttggcccgttggactcacacagaccctgtaccctctcggcaagcatcttcagtcagattatcctcagtttcagatacttcataataccttgtgttgtgtggggtcatacatcatcgtgtttgtaagagaagatggtcattttattctctgtataaaacttagctctaaagcagaaactaaagcagcaaatgcaggaaggctgtctcgccatcctcaagactcagcagctctcattctccagtggtgagcacaccatttgtgctgctgctgttgtcgtgaaatataataacagtggaagtcacaaaaatgtcccctgcccagccccctcgccgcccttgacctcctgcaggccatgtgtgtattacttgtctagtgatgtcctctcaaagtgctgtacgcgagctcggcgccacctccgcctccctttcagagcctgctccccgccctctctgctcgctgcattgtggtgttctcttctcaaggctttgaaatctccccttgcactgagattagtcgtcagatctctccccgtctccctcccaacttatacgacctgatttccttaggacggaaccgcaggcacctgcgccgggcgtcttactcccgctgcttgttctgtcccctccctcggaccaaacagtgctcatgcttcaggaccttgtttgtcgaagatgttggtttccctttctctgttatttatataaaaataatttatcaaaaggatattttaaaaaagctagtctgtcttgaaacttgtttaccttaaaattatcagaatctcagtgtttgaaagtactgaagcacaaacatatatcatctctgtaccattctgtactaaagcacttgagtctaataaataaagaaatcagcaccccttcccggtgtccagggggaaaaaaaaa

SEQ ID NO: 285849 - DNA, 1000 bp, Homo Sapiens; identical to SEQ ID NO: 115974

SEQ ID NO: 285850 - DNA, 1000 bp, Homo Sapiens
agaaggagaggttacaacaatgaatcatgaagatctcagtttattaaaggaaattttgaagaggcctgtggatcctataagggcagctggtcttcatccaactgctgagcagattgaaatgtttgcctaccatctccctgatgcaacactgtccaatctcattgatatttttgtagacttttcacaagttgatgggcagtattttgtctgcaatatggatgattttaaattttctgcagagttgatccagcatattccactaagtctgcgagtgaggtatgttttctgcacagctcctatcaacaagaagcagccttttgtgtgttcttcactgttacagtttgccaggcagtatagcaggaatgagcccctgacctttgcatggttacgccgatacatcaaatggcctttacttccacctaagaatattaaagacctcatggatcttgaagctgtccacgatgtcttggatctttacttgtggctaagctaccgatttatggatatgtttccagatgccagccttattcgagatctccagaaagaactagatggtattatccaagatggtgtgcacaatatcactaaattgattaaaatgtctgagacgcataagctgttgaatttggagggctttccatcagggagccagtcacgattgtcaggaaccttaaagagccaagctagaaggacacgcggcaccaaagctctagggagtaaagctactgagccacccagccccgatgcaggagagctgtcccttgcttccagattggtgcagcaaggactcctcactccagacatgctgaaacagctagaaaaagagtggatgacacaacaaactgaacacaacaaagaaaaaacagagtctgggactcatccaaaagggacgagaagaaagaagaaggaacctgattcggactagttttctgttcctgtttttttttttttatttaattttgcaaataaaaatttattttgaagaaaaaaaaaaaaaaaa

SEQ ID NO: 285851 - DNA, 1000 bp, Homo Sapiens
ggcggtggctgcgttgcagctggggctgcgggcggcggggctgggacgggccccggccagcgccgcctggaggagcgtcctcagggtctccccgcgcccaggggtggcctggaggccaagcagatgtggcagttctgcagcagaagcatctgccacaaaagcggaagatgactcctttcttcagtgggtcctgctcctcatccctgtgactgcctttggcttggggacatggcaggtccagcgtcggaagtggaagctgaacctgattgcagagttggagtccagagttctggctgagcctgtccctctgccagccgacccaatggaactgaaaaatctggagtataggccagtgaaggtcagggggtgctttgaccattccaaggagctgtatatgatgccccggaccatggtggaccctgtccgggaggcccgggagggcggcctcatctcctcctcaactcagagtggggcctatgtggtcactcccttccactgcaccgacctgggagtcaccatcctggtaaatagagggttcgttcccaggaagaaagtgaatcctgaaacccggcagaaaggccagattgagggagaagtggacctcattgggatggtgaggctgacagaaaccaggcagccttttgtccctgagaacaatccagaaaggaaccactggcattatcgagacctggaagctatggccagaatcacaggcgcagagcccatcttcattgatgccaacttccagagcacagtccctggaggacccattggagggcaaaccagagttactctgaggaacgagcatctgcagtacatcgtgacctggtatggactctctgcagctacatcctacctgtggtttaagaaattcctacgtgggacacctggtgtgtgacagatcagctgctgaagccctgtccctggataatgcagtatttcaagactgcctttatgctggatcatgtgctactggtataaagttctggccttctacctt

SEQ ID NO: 285852 - DNA, 1000 bp, Homo Sapiens
tgcctagcccgacatgaagctggttccccaaccacagaaactttgtactagtgaaagaaaggggtccctggcctacgggctgaggctggtttctgctcgtgcttacagtgctgggtagtgttggccctaagagctgtagggtctcttcttcagggctgcatatctgagaagtggatgcccacatgccactggaagggaagtgggtgtccatgggccactgagcagtgagaggaaggcagtgcagagctggccagccctggaggtaggctgggaccaagctctgccttcacagtgcagtgaaggtacctagggctcttgggagctctgcggttgctaggggccctgacctggggtgtcatgaccgctgacaccactcagagctggaaccaagatctagatagtccgtagatagcacttaggacaagaatgtgcattgatggggtggtgatgaggtgccaggcactaggtagagcacctggtccacgtggattgtctcagggaagccttgaaaaccacggaggtggatgccaggaaagggcccatgtggcagaaggcaaagtacaggccaagaattgggggtgggggagatggcttccccactatgggatgacgaggcgagagggaagcccttgctgcctgccattcccagaccccagccctttgtgctcaccctggttccactggtctcaaaagtcacctgcctacaaatgtacaaaaggcgaaggttctgatggctgccttgctccttgctcccccaccccctgtgaggacttctctaggaagtccttcctgactacctgtgcccagagtgcccctacatgagactgtatgccctgctatcagatgccagatctatgtgtctgtctgtgtgtccatcccgccggccccccagactaacctccaggcatggactgaatctggttctcctcttgtacacccctcaaccctatgcagcctggagtgggcatcaataaaatgaactgtcgactgaaaaaaaaaa

SEQ ID NO: 285853 - DNA, 1000 bp, Homo Sapiens
aagacttcgagtttgcactagacatgacgagggatgaatacaacgccctgcccgcctggaagcaggtgaacctgaagaaagcaaaaggcctgttctgagtggggagacgccagaggagcctcacggtcacgtccaacaacaccactgcaccagggaaatggatatatatttttggactggtgtttttcacaaagtatttttcaatcagagttttcagaacctgacattgttaaagatactgcttgtcccggagttgtgtattttgtaaatgttcaagggaactgtttggaaacttctttccaccattcaggaggttatcagaattaataaaagtatctgttatgtgcacttaagccgcagctgctatagatagcactgccttcttgttccagctaggcaatgcctttttttttttttttgaagcagttctctttataaagtgttattttgatagtttgtggattctaaaatatatatatatttatataaacaccatataagtcaaatatgtatttaacaaagcaatatgtattcattcactttcaagatttgttttggtgtcaaaataacatgaaaaggtagatggagttgcttctgttgaattagctctgccaccaatatgtatcttcatacacgtttggaaatgtttcctgcagcattaggtatgacttgttctgagtactgcttccggtgctaaaatgaacaaagaatttgtacttaatggcatggactctggagaatctatgcgaatcaacctttctaccttaatatctccccaaaaatgtatagtgccttgtttttatgtacagtttatatacagaaaagtttgctctgcatttttgatgatggtttggaacattatctacaattttactctcaaatagtcaaaataaaaacatctcaatttctaataccggttgtaaacaaacagtacacatgtcattttgtgatataggactcccaaataaaagtatcagaataaacacaacaattaactggt

SEQ ID NO: 285854 - DNA, 552 bp, Homo Sapiens
agctcagcgggacctcagccatgagacttctcatcctggccctccttggcatctgctctctcactgcatacattgtggaaggtgtagggagtgaagtctcacataggaggacctgtgtgagcctcactacccagcgactgccagttagcagaatcaagacctacaccatcacggaaggctccttgagagcagtaatttttattaccaaacgtggcctaaaagtctgtgctgatccacaagccacgtgggtgagagacgtggtcaggagcatggacaggaaatccaacaccagaaataacatgatccagaccaagccaacaggaacccagcaatcgaccaatacagctgtgaccctgactggctagtagtctctggcaccctgtccgtctccagccagccagctcatttcactttacaccctcatggactgagattatactcaccttttatgaaagcactgcatgaataaaattattcctttgtatttttacttttaaatgtcttctgtattcacttatatgttctaattaataaattatttattattaagaa

SEQ ID NO: 285855 - DNA, 1000 bp, Homo Sapiens
ttggggtagagaggacagtttaggacccaaggtggtcttggagaggaggtgtggagtggaggggtcagcaggggggttgggttccagacagagtggatctggagtctgaaggagaggagtgcgctagagcattctggggtggggcttggaagggcgctgagggcagggttctagaaggggcgaggctttaagcgaggcagaatggtgggctccagagtaggtgggtcttggattggtaccagagcctatggaaagggtgtggcttggaacatttgggagactgagcttgattctaaaggggacagatcttgagcaaggcaagaagtgggattcaggaatgggccaagccagggttccagacagggtggggcttagaatggggcttccatggtggtttcagaaagggcagcccctccccatggtgcagtgaagaaaatgttttacaatggctgggtttgggcagtggagaggggacttggataggagcttccagatgggttttgttaggggtgggggagaatggctctggctacgacttgggacggaagtggcctgagaagagtcgagtgatatggcttgtagggtgaggcgtgggatccagagagaagcaccccaccacacacacccttccccactcccgtgatgaaacagctaggttaataggaggacagaaccaacgggtctgtgggactggcccacccctcttcccccttcccctgcgccctccctccctccacacctccacccgtcctggggtggttggaggcctggtctggagcccctatcctgcaccctctgctatgtctgtgatgtcagtagtgcctgtgatcgtgtgttgccattttgtctggctgtggcccctccttctcccctccagacccctaccctttcccaaacccttcggtattgttcaaagaacccccctccccaaggaagaacaaatatgattctcctctcccaaataaactccttaaccacctagtcaaaaaaaaaaaaaaaa

SEQ ID NO: 285856 - DNA, 1000 bp, Homo Sapiens; identical to SEQ ID NO: 221282

SEQ ID NO: 285857 - DNA, 1000 bp, Homo Sapiens
ttatgttatttatacagttgggatctaattaggaaaatgtgttttgtagttctggataaactatttcatccgctgtttcctccccaaaacacacacacagagcaaactccctttcataaaagccctcatatccactggcagtccccgttcgcatcatggtctccatgtgtaccgccaaagtcaattatgtttgaaagcctttggtggatgttatggggcaaagttatgatttacacagaagcaactgccaaatctgtggtgcaaccactatctccagtgaaatattgtataacaccatttggaactactgaaaagacagtggcttttctacagtactcttccttattgcaccatttttgtattaacgtagaaactaagcatcagaatttatgaacaaagaatatgttatttttccttttgctctaaaatactgagatttggggaagcaattcttttttaaaaaaattttgaataactatcttttgataacacattcggcggttacgatgttggaatttagcagaactatcaaatccaaaattattttcaaatcaagatgtttaaattataagtttttttgttttgttttccagtaagtataaatgaaaatattcatatgtaaaatatgttttgcttaatgtggacaatttacacacccaacacatactgtttccaaaattatttctatatgacacaaagtatgatacctttaaaaaggtgagcttatatattgtttattaacctggaaatagacaatttggctctcataccataagcatttaaaaacatatgaaatattttgatttctttatatggtggtgtgtttttatttctgaattttccatgtgctttaatatttgtttaagaatattttttatatctgttcaatttttatcattccccttatcattagaaagtttgacaaaaatacttgaatcttggacctctaaatatacttttagttgtgtttaacttgtttaataaataactttttaagttg

SEQ ID NO: 285858 - DNA, 1000 bp, Homo Sapiens
cctcatttcgtttattttatttttgtaatagtcagttggcaaagcaaactgattttttagactatttatcttccttcccttcccctcccaccccgctctcctctctgccccctgccctcccctcccctcccttcccctccactccgctgagaatcctggaggaatacacaattcatcgttgcacccccacctcagagtgtaatcgcatttctgcttggtagaggccgagcccagcaaaggtggctccttctgaatgtgtggtcagcatctgtacaaatgcattttatttgctatagtttgtaaagctgtaaagttaaaagagatgaaaaccttttcagcataaatatattttacttgcactgtgttttttagctaaaagtgaaaacctagattaaataaaatcaaagttgagaagaatcatcaaaagactgtttctcggtgtgaatcaagtgttgaaaaatggttggtgtattttgtcagtaattgtacataacttttggcacatgacatagaaatggctatgtaaactataattattttgctaagagactgtatgcaagccttgggccgactttacagacgtccagagcaaagccccttctttgtacctatttttttattacaaatatactaattggttctttctattttcagaggttattgtatgaaattgtctattgatagtacttttatgactgtaaatactctggctttctccgtgtgaattctcacattagactttaattcgagcgcgtgtgaactgaacgctgatcagtattttttatcaacacctgagaactgttacaccttttattttgtcttttaggaaatccctgtctttccattttttcatgtaaattttgcacagttacttgttcatatgtaaatattttactttcagaaatgaagtttttaattgctattgttttatataggattgaaagaaaattaactcctttattaaaaacaaatttatctgtaaaaaaaaaaaaaaaaaaaa

SEQ ID NO: 285859 - DNA, 1000 bp, Homo Sapiens
ctcagcctcccgagtagggaggaccacaggtgtgagccaccacacctggctaatttttacttttttttttttttggtagagatggagtcttgctatattgcccaggctggtcttgaagtcctggcttcaggcaattctcctgcctttgcctccagaagcactgggatcacaggtgtcagccattgcacccagcccagattgtcttaatttctatcttgttccaaggccagggacagtaataagaatggaaaagagatatgggaacactggcagactgtgtaaaatgtaatgcaactacccaaaacaagcctggtaggaaagggcaagtctttaggtctttgtaagaactaaagaagatctgtaatttttattttcaccctctgtaccccatgaccttatccttcctctccttccttgttacccatgaaaaactggcaacattccaagaatagcatctgtacaaaggggaaagaacataaaggtaaaacaaaacaaaacaacattttgagaacaaagatgaccataaccactgaagggaatcacatcttttaagacaaattcatattcttttatttgttatggcagatgacaagatggtacaacctttattcttttccaaaataaaacaaagggcacagcatctgtagtcagccgacaactctttcggccttttgggggtgggtctggccgtacttgtgatttcgatggtacgtgaccctctgctgaagacttgccccctgcccgtgtacatagtgcattgtttctgtgggcgggcccagcactttccgtcaacgttgtactgtatgtgatgaattgcgttggtctctgcatttttctgcagaagaggagtaaccgctccaggtaccttgacctttgtacagcccagaggccaacactgtgggtgtgtgactctttagcaaaaaaaacccatgtggtgatgatgtgtctatatatgtgaggatgtatcgggaagatttctaaataaaagttttacaaaggg

SEQ ID NO: 285860 - DNA, 1000 bp, Homo Sapiens
cgctctgttgcccaggctggagtgcagtggcacgatctcggctcacggcacgctccgcctcccgggttcacgccattctcctgcctcagcttcccgagtagctgggactacaggggcccgccaccacgcccggctaactttttgtgtttttagtagagacggggtttcaccgtgttagccaggatggtctcgatctcctgaccttgtgatctgcccgcctcggcctcccaaagtgctgggattacaggcgtgagccaccgcgcccggcggcgaaacacgatattgtactaacatcttaattttgttataaaatctcacaaaccccctgacatagtctcagagatctgtagggccgaggttacatttggagaacccgtactctagggccaaatccattcttcttgccctggctcacttgtcccccccaccgccccgcgctggagccactgcctagttcttcagccctagatggtgctcgccagacctcctctcaatgctcatcacacacagggctattcctttcctccaatgaaccaaacgcctcccgcccacctccaggtcccagtcctctgttccctttgcctggtccacccttgccctccctgggtcgcagacgaggtcggcctcgtcattccccgcagaccgccgcgcgtccctcttgtgcggttcaccacagttgtatttaagtgatcgtgtgagtcgtcgttaaatgcctgtctccccgcggatcatgggctcctcgaggacagggactggcctgtctgtccactgctgtaaccccgcgccggcatagggacctaaggcccactggagggcgctcatcaagtagctgctggatgttgacgaaggaagcggcggcgcagctcagggatctccgagtcaggacggtcggccagacccacggggtaacgggtctaatcgtgtaggaataaagctgtattccagtgcttccaaaaaaaaaaaaaaaaaaaaaaaaaaaaaaaaaaaaaaaaaaaaaaaa

SEQ ID NO: 285861 - DNA, 1000 bp, Homo Sapiens; identical to SEQ ID NO: 221284

SEQ ID NO: 285862 - DNA, 1000 bp, Homo Sapiens
gcagcaaatcaaaagcggagagccccaaaacacctagcagccccttgacccccacgtttgcctcttccatgtgtctcctggccccctgctatctcacaggggactctgtccgggacaagtgtgtggagatgctgtcagcagccctgaaggcggacgatgattacaaggactatggagtcaactgtgacaagatggcatcagaaatcgaagatcatatctaccaagagctcaagagcacggacatgaagtaccggaaccgcgtgcgcagccgcataagcaacctcaaggaccccaggaaccccggcctgcggcggaacgtgctcagtggggccatctccgcagggcttatagccaagatgacggcagaggaaatggccagtgatgaactgagggagttgaggaatgccatgacccaggaggccatccgtgagcaccagatggccaagactggcggcaccaccactgacctcttccagtgcagcaaatgcaagaagaagaactgcacctataaccaggtgcagacacgcagtgctgatgagcccatgactacctttgtcttatgcaatgaatgtggcaatcgctggaagttctgctgatggaacagccagccatgaacaaggtgaggaagaagaaagaggaagcgctgaattatctgaactggagaagcaataaaaattaaagtgaaggaaaatactgaactctgtctgagtgggatggtatgagttagaggaagaattctcttgcaaattaataatcggtcattagaaacaattggttaatgggggagcctaattggagaatgatgctgagaatttgtattgatgaacctcttttagaaactgcagagggctgggcacggtggtttatggctgtaatctgcaaactctgggaggctgaggtgggagaatcgcttaaccccagaagtttgagtccagcccaggcaacacagcaagaccccatctctataaaaagaaaaaataaagaaactgcagcgccttag

SEQ ID NO: 285863 - DNA, 1000 bp, Homo Sapiens; identical to SEQ ID NO: 115978

SEQ ID NO: 285864 - DNA, 1000 bp, Homo Sapiens; identical to SEQ ID NO: 115979

SEQ ID NO: 285865 - DNA, 1000 bp, Homo Sapiens
gtggtccaagggcaagagtggctggagccgggggactgtgctggtctgagccccacgaaggccttgggctgtggctccgaccctgctgcagaaccagcagggtgtcccctcgggcccatctgtgtcccatgtcccagcacccaggcctctctccaggtctccttttctggtcttttgccatgagggtaaccagctcttcccagctggctgggactgtcttgggtttaaaactgcaagtctcctaccctgggatcccatccagttccacacgaactagggcagtggtcactgtggcacccaggtgtgggcctggctagctgggggccttcatgtgcccttcatgcccctccctgcattgaggccttgtggacccctgggctggctgtgttcatccccgctgcaggtcgggcgtctccccccgtgccactcctgagactccaccgttacccccaggagatcctggactgcctgactcccctccccagactggcttgggagcctgggccccatggtagatgcaagggaaacctcaaggccagctcaatgcctggtatctgcccccagtccaggccaggcggaggggaggggctgtccggctgcctctcccttctcggtggcttcccctgcgccctgggagtttgatctcttaagggaacttgcctctccctcttgttttgctcctgccctgcccctaggtctgggtggcagtggccccatagcctctggaactgtgcgttctgcatagaattcaaacgagattcacccagcgcgaggaggaagaaacagcagttcctgggaaccacaattatggggggtggggggtgtgatctgagtgcctcaagatggttttcaaaaaattttttttaaagaaaataattgtatacgtgtcaacacagctggctggatgattgggactttaaaacgaccctctttcaggtggattcagagacctgtcctgtatataacagcactgtagcaataaacgtgacattttataaag

SEQ ID NO: 285866 - DNA, 1000 bp, Homo Sapiens; identical to SEQ ID NO: 224790

SEQ ID NO: 285867 - DNA, 1000 bp, Homo Sapiens
atgtctgttgcagtgaggacttgtgattcactggtatgaagaattttttgatgtttatattagtaacaaaattatacaaggatagaatctcatctagaaaatgcaaactattgttgaaaagcagttagcatttccacacaaccgctgtccccagagataactgctgttttcattttaatgttatccttttagaccttttctctatttacaaaaatgttacgtgtttctatgtgtacatagttttgggttttttttttttttttacgtaagtggcagacactttattgcacatgaaatttgtaatttttttctatttaagtacacatttggaaattatcctctgacttttggatttttaactaaatatgttggacgtgttcctttatatatttaagttcagcacagaaactttcctacctttttgtggaagataaaatattaaaactgctttcaaaactacaaattgacttaaactgctatagtaattttcaattaaatttcattatacctggagtttgaacgttaaggtttttatcatatactgtaattcaaaaatttacctaaatctcaatgtaaaattcttttttttcttattactatgaaatggatggaataaggagggggaacacaactagcaagaacaaaacattgggttggcaattgatatcacatcttaattctttccctgaatttctttcagctttttgttcacataaagaatgtgaaatttttacagaatcagacagatgactttaaagaaatttttttcatgatggaaaaatcacctcaattgatttttccatttcttaggtccttgaataaatgatacttaggtatacctcagaaatgccatatatgatacaaatcctgcaaaagacatcatgagaaaataccagcagtatctatcatgaatgtagaaataaaagtccttaaaataattagcaaatcaaatccagcaatgtataaaaaagataatagggtttattcctggaaagtaagg

SEQ ID NO: 285868 - DNA, 1000 bp, Homo Sapiens; identical to SEQ ID NO: 115980

SEQ ID NO: 285869 - DNA, 1000 bp, Homo Sapiens
gacataatcactttgaacttccatgaaacctgtcttccaccacaacaaccctgggagagaaaaacatgctaaaggaggtatcttggcttaataattccttatagccaatatcaacagtggcaatcagcacacagaggaaaggacccaaatcactatgtagcttaaagatttctgttaatttgaaagaacaaaaacaagacagaacttctggtactctaatcaggatgattcctaacaagtcagtcatttgtgaacttagtggactttttggttactttaatttgcatatattctccagttacatcggactctatctgtggccttgttcttcatttcagtgttaatcagctaaacagaagttgttgcttatgatgtgtgagtgaacatatgccactgcctggcctttttttcttcagagcttgttgtctttttcgctatattagactttgcagtatgcccagaagctttccttcataaaatagaaagaaaaaaacatttggcttatttttcactgtagctagtcttttatacaataatcttgtaagaaaatttcttgaattctaaatattactctttctagatttttgaaatcaaaaagttttcagtaaaaagtttcttactttattttattatattaggtagtaaaaaatgtagggttatttaccataacctgttcattaatatcagaaatttacaatagcattttaagaccatagtaggattctagcataccgtgtagtacctatggagtattgtaagagctaattgttggagatgaattgcttctcatcttgttctccagtttccattgttggtttattgcagatttgtatcctgtgtcaaattcaaggtattattgataaaccttttcaaccagcagcaagaagttcaaatttttttctgtcactgtaacagaaaacacaatatgtatataacatttatgtagcaataaatgtgccatcttttttttaacacagtaaaaaaaaaaaaaaaaaaaaaa

SEQ ID NO: 285870 - DNA, 1000 bp, Homo Sapiens
gaaagtcagccatatctccattgtgcctaagtccagtgtttctttttttttttttttttgagacggagtctcactctgtcacccaggctggactgcaatgacgcgatcttggttcactgcaacctccgcatccggggttcaagccattctcctgcctaagcctcccaagtaactgggattacaggcatgtgtcaccatgcccagctaatttttttgtattttagtagagatgggggtttcaccatattggccagtctggtctcgaactctgaccttgtgatccatcgatcagcctctcgagtgctgagattacacacgtgagcaactgtgcaaggcctggtgtttcttgatacatgtaattctaccaaggtcttcttaatatgttcttttaaatgattgaattatatgttcagattattggagactaattctaatgtggaccttagaatacagttttgagtagagttgatcaaaatcaattaaaatagtctctttaaaaggaaagaaaacatctttaaggggaggaaccagagtgctgaaggaatggaagtccatctgcgtgtgtgcagggagactgggtaggaaagaggaagcaaatagaagagagaggttgaaaaacaaaatgggttacttgattggtgattaggtggtggtagagaagcaagtaaaaaggctaaatggaagggcaagtttccatcatctatagaaagctatataagacaagaactcccctttttttcccaaaggcattataaaaagaatgaagcctccttagaaaaaaaattatacctcaatgtccccaacaagattgcttaataaattgtgtttcctccaagctattcaattcttttaactgttgtagaagacaaaatgttcacaatatatttagttgtaaaccaagtgatcaaactacatattgtaaagcccatttttaaaatacattgtatatatgtgtatgcacagtaaaaatggaaactatattgacctaaaaaaaaaaaaa

SEQ ID NO: 285871 - DNA, 1000 bp, Homo Sapiens; identical to SEQ ID NO: 221286

SEQ ID NO: 285872 - DNA, 1000 bp, Homo Sapiens; identical to SEQ ID NO: 115981

SEQ ID NO: 285873 - DNA, 1000 bp, Homo Sapiens
agcaaggatagggaaggggaatggttgagcctctggagatcattgtaaccaatcctgccagacctgtttggggcagtggggagcaaacctagataaggacctgtttggggcagcagggagcaaaatctcctttaacaaccaagcagttcctcattcacatcaacagagcgaggctgtgataacttaggaggcagcaatcctaatagtccttcagtgcattttagtctgtctccaactggacaccagtaggtagtgtcaagccagagattcggggcagtagataaatgttcattttactgatgcactttagtttttggtctgttacctgttttccagaaatttgtggccttttaggcgggagttaggcgaccaaaccagtgagagccccaatccctgcagttttgtggcttcaagtgtgggtggacagtcctaatggggatctccagctccttcctgtgggctgccacagacagctacccccagaagggtcaatgttgggagtggttgtggctctgagctgctctacagagcttcagtgtgagaggatcgagccattgaaagctcattaccagtaggacataatttttggctctccctattcacaaccagtgcacagtttgacagtggcctcaggttcacagtgcaccatgtcactgtgctatcctacgaaatcatttgtttctaagttgtgtttattcctggagtgacatgccaccccgaatggctcactttcactgaggatgctgtcctctgatttagctgctgcctccagcctctggcttgagaacttactaaaggcacttccttcctgttaaacccctgttaactctccataaatttggtgattctctgctaggcctaagattttgagttaacatctcttgaagccaaactccaccttctgtgctttttgcttgggataatggagtttttctttagaaacagtgccaagaatgacaagatattaaaaaaaaaaaaaaaaaaaaaaaaaaaaaaaaaa

SEQ ID NO: 285874 - DNA, 1000 bp, Homo Sapiens
ccatccctattaacaaggacaacctcttcggcggcgtggtgaaccccaacgaagtcttctgttcagttccgggtcgcctctcgctcctcagctccacctcgaagtacaaggtcacggtggcggaagtgcagcggcggctctcaccacccgagtgtctcaacgcgtcgctgctgggcggagtgctccggagggcgaagtctaaaaatggaggaagatctttaagagaaaaactggacaaaataggattaaatctgcctgcagggagacgtaaagctgccaacgttaccctgctcacatcactagtagagggagaagctgtccacctagccagggactttgggtacgtgtgcgaaaccgaatttcctgccaaagcagtagctgaatttctcaaccgacaacattccgatcccaatgagcaagtgacaagaaaaaacatgctcctggctacaaaacagatatgcaaagagttcaccgacctgctggctcaggaccgatctcccctggggaactcacggcccaaccccatcctggagcccggcatccagagctgcttgacccacttcaacctcatctcccacggcttcggcagccccgcggtgtgtgccgcggtcacggccctgcagaactatctcaccgaggccctcaaggccatggacaaaatgtacctcagcaacaaccccaacagccacacggacaacaacgccaaaagcagtgacaaagaggagaagcacagaaagtgaggctctcctcccgccccgcccctcccacgcctcaccagccccccgcgcgcccaccctccggcgggtgacagctccgggatcagcaacccttcctgctgctgctactgctgctgctgctgccgccgccgccgccgccgctgcccttgggtccccccgagtctccgggactgccctctcgactgtcagtggggcagcctctccgactctgcacccgcctcgacctccccacccgctcccacacccctgtgcccccggaattc

SEQ ID NO: 285875 - DNA, 1000 bp, Homo Sapiens
gagtatttgaaccggcagcacacagacccgagtgacctgcactcccgaaagaatatgctgttggccaccaagcaactttgtaaagaatttacggatctactggcgcaggaccggacaccgatagggaacagccgacccagccccatcctggagccggggatccagagctgcctcacgcacttcagcctcatcacgcacggcttcggcgccccggccatttgcgccgcgctcacggccctgcagaactatctcaccgaggcgctcaaaggcatggacaagatgttcttgaacaacaccaccactaacaggcacacgtctggggaaggcccaggtagtaaaactggcgacaaggaggagaaacacaggaaatgaaaaatttttaaaaaaagaaggaaaaatgttttaaatacaaaaggaaaaacagacaaaaatttaattttagctttaaaatattggattggctttggaagaattatattaggtagaatacacatacaatcaaaatttaaaaaaaaaaagctaaataacttaaaaaaaaactgaggcgtacaacggagcaacaatatcggttctcagtgtctatttcaagatacatttggagacaaccgtccggattttccacttcggttctttcgagtttagtaatactgataataaaagaaaaccatgatttccccttccctttggaaaataaacataagactaaacatgagaaaaacgctaacttattggaagaaaatcggagaaacgttggtgtcaatgctttgagagctggttgactgagacgcacgaactttttaattttaaatatatttttaggaaactctcgcagtccccgccctccatctcacctcacccgtctcccaaccacccttttccatgttaccctcccttcctcacattgttacgggaatcttctgggatgaaaatgagtgtggttggaaaaaaaaaaaaaaaaaaaaaaaaaaaaaaaaaaaaaaaaaaaaaaaaaaaaaaaaaa

SEQ ID NO: 285876 - DNA, 1000 bp, Homo Sapiens
gtgaagcctgtccgcagctgcccggaggcccccacctctgacaccgcctccgactccgaggcctcagacagtgacgccatggaccagagccgggaggagccgtcgggggacggggagcttccctgactacccccccagccctcctctcccttctgggggctggagggagccggggcagccacagggagagacatgggcgaatgagtgagaaatttttacaaaattacgatgtcatttgggtctcttttatgacctctttttcaatactgtaaatcgacctttgaacgaagccactcaacccgaggtcccggggctggggtgtcgcagagctgtgggagcatcggcaccccagggcggggcctcggccccgggggctggaggaagctgacacggagatgcctggcctctctctgccaaaaagcattttttcctttaaatatgttttttaagaacagggaaaattaaacaaaaccccaggttatttcttccctgcccagagccagcctgggattgtcagccttcaatcccctttccttcctctttttgggttttcttctttctcctttaagcacttacatggttgggggtaagactaggctggggcattctgggggcccggaggtctccgttgcttcttggttggggtttgctgctgctgtgcccccctcccccttccccatctcggcactagaattcgccactctcccaccccccagcccccacctctgcctccaggtctcatcttccaccccaaaaatgtctgtctctctctttttgttttgtttgttgttggttttttatttctttttggtttgctttctgtttttgttttgtttttcttttttttctttcttttttttttttttacaattttgaggtcttcgtgttcaaggagaagctattatattttgttaagaaagtggggagaaaaaaaaccaagaggccaccgtgcctttgtaaagaaacaaaataaagtttgtactttgttttttaaaaaaaa

SEQ ID NO: 285877 - DNA, 1000 bp, Homo Sapiens
cgtggcccaggccgtggcccagctcgcagggcagctcctcatccggctcagccacgatcgcctgctgcccctcgacttcggccgctacggggacgtcgtcctcaggcacatcgggaacctcaacgagttctctggggacctcaaggcccgcgggctgaccctgcagtgggtgtactcggcgcggggggactacatccgggcggcggaaaagctgcggcaggagatctacagctcggaggagagagacgagcgactgacacgcatgtacaacgtgcgcataatgcgggtggagttctacttcctttcccagtacgtgtcgccagccgactccccgttccgccacatcttcatgggccgtggagaccacacgctgggcgccctgctggaccacctgcggctgctgcgctccaacagctccgggacccccggggccacctcctccactggcttccaggagagccgtttccggcgtcagctagccctgctcacctggacgctgcaaggggcagccaatgcgcttagcggggatgtctggaacattgataacaacttctgaggccctggggatcctcacatccccgtcccccagtcaagagctcctctgctcctcgcttgaatgattcagggtcagggaggtggctcagagtccacctctcattgctgatcaatttctcattacccctacacatctctccacggagcccagaccccagcacagatatccacacaccccagccctgcagtgtagctgaccctaatgtgacggtcatactgtcggttaatcagagagtagcatcccttcaatcacagccccttcccctttctggggtcctccatacctagagaccactctgggaggtttgctaggccctgggacctggccagctctgttagtgggagagatcgctggcaccatagccttatggccaacaggtggtctgtggtgaaaggggcgtggagtttcaatatcaataaaccacctgatatcaataagccaaaa

SEQ ID NO: 285878 - DNA, 1000 bp, Homo Sapiens; identical to SEQ ID NO: 115983

SEQ ID NO: 285879 - DNA, 1000 bp, Homo Sapiens; identical to SEQ ID NO: 221287

SEQ ID NO: 285880 - DNA, 1000 bp, Homo Sapiens; identical to SEQ ID NO: 221289

SEQ ID NO: 285881 - DNA, 1000 bp, Homo Sapiens; identical to SEQ ID NO: 115985

SEQ ID NO: 285882 - DNA, 1000 bp, Homo Sapiens; identical to SEQ ID NO: 221291

SEQ ID NO: 285883 - DNA, 1000 bp, Homo Sapiens; identical to SEQ ID NO: 115986

SEQ ID NO: 285884 - DNA, 1000 bp, Homo Sapiens; identical to SEQ ID NO: 221294

SEQ ID NO: 285885 - DNA, 1000 bp, Homo Sapiens; identical to SEQ ID NO: 115987

SEQ ID NO: 285886 - DNA, 1000 bp, Homo Sapiens
cagaggcaaatgccgtgtgtgaaattgtccatgtaaaatccgagtctgaagggaggccggagagggtctttcacttgtgctgcagctccccagagagccgaaaggatttcctaaaggctgtgcattcaatcctgcgtgataagcacagaagacagctcctcaaaaccgagagccttccctcatcccagcaatatgtcccttttggaggcaaaagattgtgtgcactgaagggggccaggccggccatgagcagggcagtgtctgccccaagcaagtctcttgggaggaggaggcggcggctggctcgaaacaggtttaccattgattctgatgccgtctccgcaagcagcccggagaaagagtcccagcagccccccggtggtggggacactgaccgatgggtagaggagcagtttgatcttgctcagtatgaggagcaagatgacatcaaggagacagacatcctcagtgacgatgatgagttctgtgagtccgtgaagggtgcctcagtggacagagacctgcaggagcggcttcaggccacctccatcagtcagcgggaaagaggccggaaaaccctggatagtcacgcgtcccgcatggcacagctcaagaagcaagctgccctgtcggggatcaatggaggcctggagagcgcaagcgaggaagtcatttgggttaggcgtgaagactttgccccctccaggaaactgaacactgagatctgactgcgtcacctgccccgtagagaatgtgtgtagatacttcctgccctaactctgcccaccctcctgtaccgtcgacaagaatgtccccttaggtcgcgctcttgcacacacggttttggcagctgacttggttctgaagccatgtagccacccaactttgtcattttcaacaacatcagaaagaattgatcagaatcccaaataaaacccaaaagtgtctaatgtattcattcattagctaactaaaagcccaaaaaagacaagacacccag

SEQ ID NO: 285887 - DNA, 1000 bp, Homo Sapiens
catgctgtacagtgacctaaagttggtaagatgtcataatggaccagtccatgtgatttcagtatatacaactccaccagacccctccaacccatataacaccccacccctgttcgcttcctgtatggtgatatcatatgtaacatttactcctgtttctgctgattgtttttttaatgttttggtttgtttttgacatcagctgtaatcattcctgtgctgtgttttttattacccttggtaggtattagacttgcacttttttaaaaaaaggtttctgcatcgtggaagcatttgacccagagtggaacgcgtggcctatgcaggtggattccttcaggtctttcctttggttctttgagcatctttgctttcattcgtctcccgtctttggttctccagttcaaattattgcaaagtaaaggatctttgagtaggttcggtctgaaaggtgtggcctttatatttgatccacacacgttggtcttttaaccgtgctgagcagaaaacaaaacaggttaagaagagccgggtggcagctgacagaggaagccgctcaaataccttcacaataaatagtggcaatatatatatagtttaagaaggctctccatttggcatcgtttaatttatatgttatgttctaagcacagctctcttctcctattttcatcctgcaagcaactcaaaatatttaaaataaagtttacattgtagttattttcaaatctttgcttgataagtattaagaaatattggacttgctgccgtaatttaaagctctgttgattttgtttccgtttggatttttgggggaggggagcactgtgtttatgctggaatatgaagtctgagaccttccggtgctgggaacacacaagagttgttgaaagttgacaagcagactgcgcatgtctctgatgctttgtatcattcttgagcaatcgctcggtccgtggacaataaacagtattatcaaagagaaaaaaaaaaaaaaaaa

SEQ ID NO: 285888 - DNA, 1000 bp, Homo Sapiens; identical to SEQ ID NO: 221295

SEQ ID NO: 285889 - DNA, 1000 bp, Homo Sapiens
ctgcactggatgggaccttccagaggaagccatttggggccatcctgaacctggtgccgctggccgagagcgtggtgaagctgacggcggtgtgcatggagtgcttccgggaagccgcctataccaagaggctcggcacagagaaggaggtcgaggtgattgggggagcagacaagtaccactccgtgtgtcggctctgctacttcaagaaggcctcaggccagcctgccgggccggacaacaaagagaactgcccagtgccaggaaagccaggggaagccgtggctgccaggaagctctttgccccacagcagattctgcaatgcagccctgccaactgagggacctgcaagggccgcccgctcccttcctgccactgccgcctactggacgctgccctgcatgctgcccagccactccaggaggaagtcgggaggcgtggagggtgaccacaccttggccttctgggaactctcctttgtgtggctgccccacctgccgcatgctccctcctctcctacccactggtctgcttaaagcttccctctcagctgctgggacgatcgcccaggctggagctggccccgcttggtggcctgggatctggcacactccctctccttggggtgagggacagagccccacgctgttgacatcagcctgcttcttcccctctgcggctttcactgctgagtttctgttctccctgggaagcctgtgccagcacctttgagccttggcccacactgaggcttaggcctctctgcctgggatgggctcccaccctcccctgaggatggcctggattcacgccctcttgtttccttttgggctcaaagcccttcctacctctggtgatggtttccacaggaacaacagcatctttcaccaagatgggtggcaccaaccttgctgggacttggatcccaggggcttatctcttcaagtgtggagagggcagggtccacgcctctgctgtagcttatgaaattaactaatt

SEQ ID NO: 285890 - DNA, 1000 bp, Homo Sapiens; identical to SEQ ID NO: 115988

SEQ ID NO: 285891 - DNA, 1000 bp, Homo Sapiens; identical to SEQ ID NO: 221299

SEQ ID NO: 285892 - DNA, 1000 bp, Homo Sapiens; identical to SEQ ID NO: 221300

SEQ ID NO: 285893 - DNA, 1000 bp, Homo Sapiens
actcataacaagttcatttgtgaatgtgaacttagcacttttatcaattggcttaatcacaccaatgtcactatagctgggcctcctgcagacatatattgtgtgtaccctgactcgttctctggggtttccctcttctctctttccacggaaggttgtgatgaagaggaagtcttaaagtccctaaagttctcccttttcattgtatgcactgtcactctgactctgttcctcatgaccatcctcacagtcacaaagttccggggcttctgttttatctgttataagacagcccagagactggtgttcaaggaccatccccagggcacagaacctgatatgtacaaatatgatgcctatttgtgcttcagcagcaaagacttcacatgggtgcagaatgctttgctcaaacacctggacactcaatacagtgaccaaaacagattcaacctgtgctttgaagaaagagactttgtcccaggagaaaaccgcattgccaatatccaggatgccatctggaacagtagaaagatcgtttgtcttgtgagcagacacttccttagagatggctggtgccttgaagccttcagttatgcccagggcaggtgcttatctgaccttaacagtgctctcatcatggtggtggttgggtccttgtcccagtaccagttgatgaaacatcaatccatcagaggctttgtacagaaacagcagtatttgaggtggcctgaggatctccaggatgttggctggtttcttcataaactctctcaacagatactaaagaaagaaaaagaaaagaagaaagacaataacattccgttgcaaactgtagcaaccatctcctaatcaaaggagcaatttccaacttatctcaagccacaaataactcttcactttgtatttgcaccaagttatcattttggggtcctctctggaggttttttttttctttttgctactatgaaaacaacataaatctctcaattttcgtatcaaa

SEQ ID NO: 285894 - DNA, 1000 bp, Homo Sapiens
tgtttgctatgttctaagtccaccttctatcccattcatgttagatcgttgaaaccctgtatccctctgaaacactggaagagctagtaaattgtaaatgaagtaatactgtgttcctcttgactgttatttttcttagtagggggcctttggaaggcactgtgaatttgctattttgatgtagtgttacaagatggaaaattgattcctctgactttgctattgatgtagtgtgatagaaaattcacccctctgaactggctccttcccagtcaaggttatctggtttgattgtataatttgcaccaagaagttaaaatgttttatgactctctgttctgctgacaggcagagagtcacattgtgtaatttaatttcagtcagtcaatagatggcatccctcatcagggttgccagatggtgataacagtgtaaggccttgggtctaaggcatccacgactggaagggactactgatgttctgtgatacatcaggtttcagcacacaacttacatttctttgcctccaaattgaggcatttattatgatgttcatactttccctcttgtttgaaagtttctaattattaaatggtgtcggaattgttgtattttccttaggaattcagtggaacttatcttcattaaatttagctggtaccaggttgatatgacttgtcaatattatggtcaactttaagtcttagttttcgtttgtgcctttgattaataagtataactcttatacaataaatactgctttcctctaaaaagatcgtgtttaaattaacttgtagaaaatctgctggaatggttgttgttttccactgagaaagctaagccctacatttctattcagagtactgtttttagatgtgaaatataagcctgcggccttaactctgtattaaaaaaaatgtttttgtttaaaaaaaactgttcccataggtgcagcaaaccaccatggcacatgtatacctatgtaacaaacctgcacatt

SEQ ID NO: 285895 - DNA, 1000 bp, Homo Sapiens; identical to SEQ ID NO: 115990

SEQ ID NO: 285896 - DNA, 1000 bp, Homo Sapiens
ccctagactgagtgagaagtcagtggaggaaagggattcaggttcctttgtggcatttcagaacatacctggatccgaactgatgtcttcttttgccaaaactgttgtctctcattcactcactaccttaggtctagaagtggctaagcaatcacagcatgataaaatagatgcctcagaactatcttttcccttccatgaatctattttaaaagtaattgaagaagaatggcagcaagttgacaggcagctgccttcactggcatgcaaatatccagtttcttccagggaggcaacacagatattatcagttccaaaagtagatgatgaaatcctagggtttatttctgaagccactccactaggaggtattcaagcagcctccactgagtcttgcaatcagcagttggacttagcactctgtagagcatatgaagctgcagcatcagcattgcagattgcaactcacactgcctttgtagctaaggctatgcaggcagacattagtcaagctgcacagattcttagctcagatcctagtcgtacccaccaagcgcttgggattctgagcaaaacatatgatgcagcctcatatatttgtgaagctgcatttgatgaagtgaagatggctgcccataccatgggaaatgccactgtaggtcgtcgatacctctggctgaaggattgcaaaattaatttagcttctaagaataagctggcttccactccctttaaaggtggaacattatttggaggagaagtatgcaaagtaattaaaaagcgtggaaataaacactagtaaaattaaggacaaaaagacatctatcttatctttcaggtactttatgccaacattttcttttctgttaaggttgttttagtttccagatagggctaattacaaaatgttaagcttctacccatcaaattacagtataaaagtaattgcctgtgtagaactacttgtcttttctaaagatttgcgtagataggaagcctg

SEQ ID NO: 285897 - DNA, 1000 bp, Homo Sapiens; identical to SEQ ID NO: 221302

SEQ ID NO: 285898 - DNA, 874 bp, Homo Sapiens
gggcgggaagacgtgcagcctgggccgtggctgctcactgcgttcggacccagacccgctgcaggcagcagcagcccccgcccgcgcacgagcatggagctctggggggcctacctcctcctctgcctcttctccctcctgacccaggtcaccaccgagccaccaacccagaagcccaagaagattgtaaatgccaagaaagatgttgtgaacacaaagatgtttgaggagctcaagagccgtctggacaccctggcccaggaggtggccctgctgaaggagcagcaggccctgcagacggtctgcctgaaggggaccaaggtgcacatgaaatgctttctggccttcacccagacgaagaccttccacgaggccagcgaggactgcatctcgcgcgggggcaccctgagcacccctcagactggctcggagaacgacgccctgtatgagtacctgcgccagagcgtgggcaacgaggccgagatctggctgggcctcaacgacatggcggccgagggcacctgggtggacatgaccggcgcccgcatcgcctacaagaactgggagactgagatcaccgcgcaacccgatggcggcaagaccgagaactgcgcggtcctgtcaggcgcggccaacggcaagtggttcgacaagcgctgccgcgatcagctgccctacatctgccagttcgggatcgtgtagccggcggggcgggggccgtggggggcctggaggagggcaggagccgcgggaggccgggaggagggtggggaccttgcagcccccatcctctccgtgcgcttggagcctctttttgcaaataaagttggtgcacgttcgcggagaggaaaaaaaaaaaaaaaaaaaaaaaaaa

SEQ ID NO: 285899 - DNA, 686 bp, Homo Sapiens
cagcaagctgtcctgtgagccgccagcatggatgacatctacaaggctgcggtagagcagctgacagaagagcagaaaaatgagttcaaggcagccttcgacatcttcgtgctgggcgctgaggatggctgcatcagcaccaaggagctgggcaaggtgatgaggatgctgggccagaaccccacccctgaggagctgcaggagatgatcgatgaggtggacgaggacggcagcggcacggtggactttgatgagttcctggtcatgatggttcggtgcatgaaggacgacagcaaagggaaatctgaggaggagctgtctgacctcttccgcatgtttgacaaaaatgctgatggctacatcgacctggatgagctgaagataatgctgcaggctacaggcgagaccatcacggaggacgacatcgaggagctcatgaaggacggagacaagaacaacgacggccgcatcgactatgatgagttcctggagttcatgaagggtgtggagtagatgctgaccttcacccagagctgcctatgcccagcctccaactccagctgagtcctggggttggggagggggtcggggtcccaggacctgagcctggccatgtcctcaaccccaaatcccccgactccctccccagatctgtcctgggggatgcaaataaagcctgctctccc

SEQ ID NO: 285900 - DNA, 1000 bp, Homo Sapiens
gactggctctttgtgacctaaatttcaactgctccaccccacaaggaggaaaccagggccacaaatgtagtgagattttcataaagctaaatgtattcagtggaaacgaccttcctctgatctaaaagcatgcatgcctttgttttattactggagtattaaattagcccttacttatggaataggaggacagtaggtggcaattgttttctaatgctcttacttcacaaaataaaatggtggcagcacaatgtcagtatttatattacacaatattattagtttgtaaaaaccgaaagccagggagcttactgccctggattctttagggcgtgggtcttatcacctcattcatttcttcccttcccctaagagtgccacaagcatggcagttgctcagctgagacacatgaatgggaacagaactgaaatatcaggatgtgacctcgagccagctggttggggctggggatccccctggatctccactctgtcctgtccgagaaaggggaagctgccctatgagtcttttttctgggggattccagaggttgaacgtctgttctgaggctcctcagaacctcgagggaggggacgagagagatgaccccttgcccaaccactggctgaaaaatcttgaaattccctgactttgaccagggaattcccagttgtgctaagccctgcctggtggaatgtccctggaggaagtaaccaggacacgcatacgtttttaatgtacgtataaagaatcgtaaagtgaacacccatctgccaaccactcattttaagaactaggatatggcacatacttttgaagcccttatgcgtccctccccaatcacaaccccttcctctccacaaaggtaaatacaatcctcaattttgtgtttgttattctcttggttctcttcataatgttactacgtatttatgaattcctaatacatcattcagttttggatctttttgtaaaccttaaaaaaaaaaaaaaaaaaaa

SEQ ID NO: 285901 - DNA, 1000 bp, Homo Sapiens; identical to SEQ ID NO: 221303

SEQ ID NO: 285902 - DNA, 1000 bp, Homo Sapiens
tttaaaaatatttcagatatcaaaattctagctgtatgatttgttttgaattttgtttttattttcaagagggcaagtggatgggaatttgtcagcgttctaccaggcaaattcactgtttcactgaaatgtttggattctcttagctactgtatgcaaagtccgattatattggtgcgtttttacagttagggttttgcaataacttctatattttaatagaaataaattcctaaactcccttccctctctcccatttcaggaatttaaaattaagtagaacaaaaaacccagcgcacctgttagagtcgtcactctctattgtcatggggatcaattttcattaaacttgaagcagtcgtggctttggcagtgttttggttcagacacctgttcacagaaaaagcatgatgggaaaatatttcctgacttgagtgttcctttttaaatgtgaatttttatttctttttaattattttaaaatatttaaacctttttcttgatcttaaagatcgtgtagattggggttggggagggatgaagggcgagtgaatctaaggataatgaaataatcagtgactgaaaccattttcccatcatcctttgttctgagcattcgctgtaccctttaagatatccatctttttctttttaaccctaatctttcacttgaaagattttattgtataaaaagtttcacaggtcaataaacttagaggaaaatgagtatttggtccaaaaaaaggaaaaataatcaagattttagggcttttattttttcttttgtaattgtgtaaaaaatggaaaaaaacataaaaagcagaattttaatgtgaagacattttttgctataatcattagttttagaggcattgttagtttagtgtgtgtgcagagtccatttcccacatctttcctcaagtatcttctatttttatcatgaattcccttttaatcaactgtaggttatttaaaataaattcctacaacttaatggaaa

SEQ ID NO: 285903 - DNA, 1000 bp, Homo Sapiens; identical to SEQ ID NO: 115991

SEQ ID NO: 285904 - DNA, 1000 bp, Homo Sapiens
tcccccaagactgaccattcatgccccacctcaggagttgggaccaccagttcagagaattcagatgacccgaaggcagtctgtaggacgtggccttcagttgactccaggaataggtggcatgcaacagcatttttttgatgatgaagacagaacagttccaagtactccaactcttgtggtgccacatcgtactgatggatttgctgaagcaattcattcgccgcaggttgctggtgtccctagattccggtttgggccacctgaagatatgccacaaacaagttctagtcactctgatcttggccagcttgcttctcaaggaggtttaggaatgtatgaaacacccctgttcctagctcatgaagaagagtcaggtggccgaagtgttcccactactccactacaagtagcagccccagtgactgtatttactgagagcaccacctctgatgcttcggaacatgcctctcaatctgttccaatggtgactacatccactggcactttatctacaacaaatgaaacagcaacaggtgatgatggagatgaagtatttgtggaggcagaatctgaaggtattagttcagaagcaggcctagaaattgatagccagcaggaagaagagccggttcaagcatctgatgagtcagatctcccctccaccagccaggatcctccttctagctcatctgtagatactagtagtagtcaaccaaagcctttcagacgagtaagacttcagacaacattgagacaaggtgtccgtggtcgtcagtttaacagacagagaggtgtgagccatgcaatgggagggagaggaggaataaacagaggaaatattaattaaatggtctgtaaacaataacaactgtgaataagattatcaaatctgttttagtgtaatgattgtcaagtttaaaaacatttttatatataaactggtatactcatgtcaatattctttattaataaaatgtttttcagtgtcaaaaaaaaa

SEQ ID NO: 285905 - DNA, 1000 bp, Homo Sapiens
tgagagtccacggcccatactggatgcacttctgcgggggctccctcatccacccccagtgggtgctgaccgcagcgcactgcgtgggaccggacgtcaaggatctggccgccctcagggtgcaactgcgggagcagcacctctactaccaggaccagctgctgccggtcagcaggatcatcgtgcacccacagttctacaccgcccagatcggagcggacatcgccctgctggagctggaggagccggtgaacgtctccagccacgtccacacggtcaccctgccccctgcctcagagaccttccccccggggatgccgtgctgggtcactggctggggcgatgtggacaatgatgagcgcctcccaccgccatttcctctgaagcaggtgaaggtccccataatggaaaaccacatttgtgacgcaaaataccaccttggcgcctacacgggagacgacgtccgcatcgtccgtgacgacatgctgtgtgccgggaacacccggagggactcatgccagggcgactccggagggcccctggtgtgcaaggtgaatggcacctggctgcaggcgggcgtggtcagctggggcgagggctgtgcccagcccaaccggcctggcatctacacccgtgtcacctactacttggactggatccaccactatgtccccaaaaagccgtgagtcaggcctgggttggccacctgggtcactggaggaccaacccctgctgtccaaaacaccactgcttcctacccaggtggcgactgccccccacaccttccctgccccgtcctgagtgccccttcctgtcctaagccccctgctctcttctgagccccttcccctgtcctgaggacccttccctatcctgagcccccttccctgtcctaagcctgacgcctgcaccgggccctccagccctcccctgcccagatagctggtggtgggcgctaatcctcctgagtgctggacctcattaaagtgcatggaaatca

SEQ ID NO: 285906 - DNA, 1000 bp, Homo Sapiens; identical to SEQ ID NO: 115992

SEQ ID NO: 285907 - DNA, 1000 bp, Homo Sapiens; identical to SEQ ID NO: 221306

SEQ ID NO: 285908 - DNA, 1000 bp, Homo Sapiens; identical to SEQ ID NO: 115993

SEQ ID NO: 285909 - DNA, 1000 bp, Homo Sapiens; identical to SEQ ID NO: 221307

SEQ ID NO: 285910 - DNA, 1000 bp, Homo Sapiens
gccttcaggatggaggctgtgcaggagggggcggccggggtggagagtgagcaggcggctttgggggaggaggcggtgctgctgttggatgacataatggcggaggtggaggtggtggcggaggaggagggcctcgtggagcggcgggaggaggcccagccccgacagcaggctgtgcctggccctgggcccatgaccccagagtctgcactggaggagctgctggccgttcaggtggagctggagccggttaatgcccaagccaggaaggccttttctcggcagcgggaaaagatggagcggaggcgcaagccccacctagaccgcagaggcgccgtcatccagagcgtccctggcttctgggccaatgttattgcaaaccacccccagatgtcagccctgatcactgacgaagatgaagacatgctgagctacatggtcagcctggaggtggaagaagagaagcatcctgttcatctctgcaagatcatgttgttctttcggagtaacccctacttccagaataaagtgattaccaaggaatatctggtgaacatcacagaatacagggcttctcattccactccaattgagtggtatccggattatgaagtggaggcctatcgccgcagacaccacaacagcagccttaacttcttcaactggttctctgaccacaacttcgcaggatctaacaagattgctgagatcctatgtaaggacctgtggcgcaatcccctgcaatactacaagaggatgaagccacctgaagagggaacagagacgtcaggggactcccagttgttgagttgaatatgatggagcatcagattttacctaatacagcagaactcctaaaaagttacagccatatgcaggacggcagtactcagcatggtcttatgcacaggaactaaaggaaaaagagatcgagtcacaaaaattcaggaagagggggtaaatgtggattgtatggaatgaaaaataaacattctcaagg

SEQ ID NO: 285911 - DNA, 1000 bp, Homo Sapiens
atagagtgctagagctcttacgcccctccccttcttcccaacttcctacttcctagcccttttatcaactcctagaatagttaaagagagacacatctagatgggatgaaaggtgccctaagcaggagaaactgaacaaaaggctagaggcatgggccaggtaaaaattgggcctagagtgaagactgtgctgtcgttaagagctttcgaggaaggagtacttactccccaatgatgatgaatggaaaaatacttttcagggagaattgaaggggttaaagtgttaaatatgttgcctagacaagggttctttaaagaaagacagcgcaactttgaatgctttcttacttgttttgtgacctaatttatgtggaagattgttatttcattaggatttagtaaaatttttttttctgattctaaacttattgtgaaaattgagctgtacagatattcttttgatttcaattgggaacatttggaagaacaacagtcttacttgcctgtacaatatagagacatatgaatagtcataacagttttcaacttgttcttgtttctgttaaactatattcctagaaacatagtttgaacaacttggtctttgttaggcttgtcaaattgccttcatggaaaaataatctacaaaagtatggtttaattgattgtcttacatgataattttccctggtaacaacttagtaagtgatatatcttttttcctaaattgcttaaatactgtgaaattgctctgacaaattggaagtgtaccattggcatatttgtcttcctttttatgcatgatggtaaaataaaagcatgttgttctgctagatttcttatttttcaccttacccataaatgtaatgcttgaatgaagttgttcatattaattaaaaattatggaatcattaaagtcctttaatccattaaagttcttaatggattaaaatcattaaagttcttaatggattaaaaaaaaaaaaaaaaaaaaaaaaaa

SEQ ID NO: 285912 - DNA, 937 bp, Homo Sapiens
agagccggcgccgtcaccgcccgcattgccgctcccagtcccgcgctcggcacgacatgaaatcccccgacgaggtgctacgcgagggcgagttggagaagcgcagcgacagcctcttccagctatggaagaagaagcgcggggtgctcacctccgaccgcctgagcctgttccccgccagcccccgcgcgcgccccaaggagctgcgcttccactccatcctcaaggtggactgcgtggagcgcacgggcaagtacgtgtacttcaccatcgtcaccaccgaccacaaggagatcgacttccgctgcgcgggcgagagctgctggaacgcggccatcgcgctggcgctcatcgatttccagaaccgccgcgccctgcaggactttcgcagccgccaggaacgcaccgcacccgccgcacccgccgaggacgccgtggctgccgcggccgccgcaccctccgagccctcggagccctccaggccatccccgcagcccaaaccccgcacgccatgagcccgccgcgggccatacgctggacgagtcggaccgaggctaggacgtggccggcgctctccagccctgcagcagaagaacttcccgtgcgcgcggatcctcgctccgttgcacgggcgccttaagttattggactatctaatatctatgtatttatttcgctggttctttgtagtcacatattttatagtcttaatatcttgtttttgcatcactgtgcccattgcaaataaatcacttggccagtttgcttttctaccatccggctgtggctcagtgagactcctgctgggagggtggaggcccaggaatgggcgggcaggacaccctcatccagtcctgcggggctggtgtgaaaggcgctgggaaccggctttgaatgaataaatgaatcgtgtcatctgcaaaaaaaaaaaaaaaaa

SEQ ID NO: 285913 - DNA, 1000 bp, Homo Sapiens; identical to SEQ ID NO: 115995

SEQ ID NO: 285914 - DNA, 1000 bp, Homo Sapiens
aaggaggagggaaatgaacagtttaagaaaggagattatatagaagctgaaagttcttatagtcgagccctcgaaatgtgcccatcctgcttccaaaaggagaggtcgattctattttcaaatagagctgcagcaaggatgaaacaggacaagaaagaaatggccatcaatgactgcagcaaagcaattcaattaaaccccagctatatcagggcaatattgaggagagcagagttgtatgagaagacggacaagctagatgaagccctggaagactataaatctatattagaaaaagatccatcaatacatcaagcaagagaagcttgtatgagattacctaagcaaattgaagaacgtaatgaaagactaaaagaagagatgttaggtaaattaaaagatcttgggaacttggttctccgaccttttgggctctccacggaaaatttccagatcaaacaggattcctctaccggctcgtactccatcaatttcgttcaaaatccaaataataacagataacaaagataacaaaagctttacaagctgacttggaattgtgtgctgcttgctgttagctaggggaaaggccctgccaatgtttaacttttaaaagcatcttatctaaaagaaaggctatccagtagagcccagtgctcccttgtccctcttttatgatcagggtgaaatgtacttcctgatgtaatgaacctaatttgatttccattttaaggtggtgtctgtgcagctggtgtccccgattctggctgtcctatgtccaggaagaagcccatttgttgaggctgaccttcctgatcatacacacacacagcccagcaaaagcctctcctgaaccaaacaaacctgttggttgggagactgcccagacatgattgatgacgggttcccgcctgctgtcccctccctgatcacacagctaacgaggctgcctccagcatttcctgatttcctctgtggtaataaaagctttctgtgctta

SEQ ID NO: 285915 - DNA, 1000 bp, Homo Sapiens
aatccatcaacatggcattgttcacagtgatcttaaaccagctaactttctgatagttgatggaatgctaaagctaattgattttgggattgcaaaccaaatgcaaccagatacaacaagtgttgttaaagattctcaggttggcacagttaattatatgccaccagaagcaatcaaagatatgtcttcctccagagagaatgggaaatctaagtcaaagataagccccaaaagtgatgtttggtccttaggatgtattttgtactatatgacttacgggaaaacaccatttcagcagataattaatcagatttctaaattacatgccataattgatcctaatcatgaaattgaatttcccgatattccagagaaagatcttcaagatgtgttaaagtgttgtttaaaaagggacccaaaacagaggatatccattcctgagctcctggctcatccctatgttcaaattcaaactcatccagttaaccaaatggccaagggaaccactgaagaaatgaaatatgttctgggccaacttgttggtctgaattctcctaactccattttgaaagctgctaaaactttatatgaacactatagtggtggtgaaagtcataattcttcatcctccaagacttttgaaaaaaaaaggggaaaaaaatgatttgcagttattcgtaatgtcaaataccacctataaaatatattggactgttatactcttgaatccctgtggaaatctacatttgaagacaacatcactctgaagtgttatcagcaaaaaaaattcagtagattatctttaaaagaaaactgtaaaaatagcaaccacttatggtactgtatatattgtagacttgttttctctgttttatgctcttgtgtaatctacttgacatcattttactcttggaatagtgggtggatagcaagtatattctaaaaaactttgtaaataaagttttgtggctaaaatgacactaaaaaaaaaaaaaaaaaa

SEQ ID NO: 285916 - DNA, 1000 bp, Homo Sapiens
ctgagatggtggaactggtggaactggagatccgggagctgctcaccgagtttggctataaaggggaggagaccccagtcatcgtaggctctgctctctgtgcccttgagggtcgggaccctgagttaggcctgaagtctgtgcagaagctactggatgctgtggacacttacatcccagtgcccgcccgggacctggagaagcctttcctgctgcctgtggaggcggtgtactccgtccctggccgtggcaccgtggtgacaggtacactagagcgtggcattttaaagaagggagacgagtgtgagctcctaggacatagcaagaacatccgcactgtggtgacaggcattgagatgttccacaagagcctggagagggccgaggccggagataacctcggggccctggtccgaggcttgaagcgggaggacttgcggcggggcctggtcatggtcaagccaggttccatcaagccccaccagaaggtggaggcccaggtttacatcctcagcaaggaggaaggtggccgccacaagccctttgtgtcccacttcatgcctgtcatgttctccctgacttgggacatggcctgtcggattatcctgcccccagagaaggagcttgccatgcccggggaggacctgaagttcaacctaatcttgcggcagccaatgatcttagagaaaggccagcgtttcaccctgcgagatggcaaccggactattggcaccggtctagtcaccaacacgctggccatgactgaggaggagaagaatatcaaatggggttgagtgtgcagatctctgctcagcttcccttgcgtttaaggcctgccctagccagggctccctcctgcttccagtaccctctcatggcataggctgcaacccagcagagggcagctagatggacatttcccctgctcggaagggttggcctgcctggctggggaggtcagtaaactttgaatagtaaaaaaaaaaaaaaaaaaaaaaaa

SEQ ID NO: 285917 - DNA, 1000 bp, Homo Sapiens
cgaggaggggagaatttcatcgggaagctgaggtccaacctcctggggaaccgcttcacggtctttgacaacgggcagaacccacagcgtgggtacagcactaatgtggcaagccttcggcaggagctggcagctgtgatctatgaaaccaacgtgctgggcttccgtggcccccggcgcatgaccgtcatcattcctggcatgagtgcggagaacgagagggtccccatccggccccgaaatgctagtgacggcctgctggtgcgctggcagaacaagacgctggagagcctcatagaactgcacaacaagccacctgtctggaacgatgacagtggctcctacaccctcaacttccaaggccgggtcacccaggcctcagtcaagaacttccagattgtccacgctgatgaccccgactatatcgtgctgcagttcggccgcgtggcggaggacgccttcaccctagactaccggtacccgctgtgcgccctgcaggccttcgccatcgccctctccagtttcgacgggaagctggcttgcgagtgaccccagcagcccctcagcgcccccagagcccgtcagcgtgggggaaaggattcagtggaggctggcagggtccctccagcaaagctcccgcggaaaactgctcctgtgtcggggctgacctctcactgcctctcggtgacctccgtcctctccccagcctggcacaggccgaggcaggaggagcccggacggcgggtaggacggagatgaagaacatctggagttggagccgcacatctggtttcggagttcgcctgcgccgctgtgcccccctcctccccgcgccccagtcaattcctgtccgggagcagtagtcattgttgttttaacctcccctctccccgggaccgcgctagggctccgaggagctggggcgggctaggaggagggggtaggtgatgggggacgagggccaggcacccacatccccaataaagccgcgtccttggca

SEQ ID NO: 285918 - DNA, 1000 bp, Homo Sapiens; identical to SEQ ID NO: 115998

SEQ ID NO: 285919 - DNA, 1000 bp, Homo Sapiens; identical to SEQ ID NO: 221309

SEQ ID NO: 285920 - DNA, 1000 bp, Homo Sapiens
cggggctccactgtgtcggggacacctaccccagcaacgaccggtgctgccacgagtgcaggccaggcaacgggatggtgagccgctgcagccgctcccagaacacggtgtgccgtccgtgcgggccgggcttctacaacgacgtggtcagctccaagccgtgcaagccctgcacgtggtgtaacctcagaagtgggagtgagcggaagcagctgtgcacggccacacaggacacagtctgccgctgccgggcgggcacccagcccctggacagctacaagcctggagttgactgtgccccctgccctccagggcacttctccccaggcgacaaccaggcctgcaagccctggaccaactgcaccttggctgggaagcacaccctgcagccggccagcaatagctcggacgcaatctgtgaggacagggaccccccagccacgcagccccaggagacccagggccccccggccaggcccatcactgtccagcccactgaagcctggcccagaacctcacagggaccctccacccggcccgtggaggtccccgggggccgtgcggttgccgccatcctgggcctgggcctggtgctggggctgctgggccccctggccatcctgctggccctgtacctgctccggagggaccagaggctgccccccgatgcccacaagccccctgggggaggcagtttccggacccccatccaagaggagcaggccgacgcccactccaccctggccaagatctgacctgggcccaccaaggtggacgctgggccccgccaggctggagcccggagggtctgctgggcgagcagggcaggtgcaggccgcctgccccgccacgctcctgggccaactctgcaccgttctaggtgccgatggctgcctccggctctctgcttacgtatgccatgcatacctcctgccccgcgggaccacaataaaaaccttggcagacgggagtctccgaccggcaaaaaaaaaaaaaaaaa

SEQ ID NO: 285921 - DNA, 1000 bp, Homo Sapiens
gtccatatatgaagtcatgtacagctgctggcatgagaaacctgaaggccgccctacatttgcggagctgctgcgggctgtcacagagattgcggaaacctggtgaccggaaacagaatgccaacccaaagagtcatcttgcaaaactgtcatttattgtgaatatcttcaccatatggggtcacttatggtgaatatctttcttcagagttgctgactcttgaaaacagtgcaaagatcacagtttttaaaagttttaaaaatttaagaatattcacacaatcgtttttctatgtgtgagagggatttgcacactcttatttttctgtaaaatatttcacatcccaaatgtgaagaagtgaaaaagacttcgcagcagtcttcattgtggtgctcttcatgatcatagccccaggaacccttgaggttcttcttcacaaggctgagagtgcttccttcttgaagacgagtgtcattcatcacttcagtgatccatgcatagaatatgaaaataaattcttccaactcatgggataaaggggactcccttgaagaatttcatgtttttgggctgtatagctctttacagaaaatgcacctttataaatcacatgaatgttagtattctggaaatgtcttttgttaatataatcttcccatgttatttaacaaattgtttttgcacatatctgattatattgaaagcagtttttttgcattcgagttttaaacactgttataaaatgtagccaaagctcacctttgaacagatcccggtgacattctatttccaggaaaatccggaacctgattttagttctgtgattttacactttttacatgtgagattggacagtttcagaggccttattttgtcatactaagtgtctcctgtaattttcaggaagatgatttgttctttccagaagaggagacaaaagcaagatagccaaatgtgacatcaagctccattgtttcggaaatccaggattttgaattc

SEQ ID NO: 285922 - DNA, 1000 bp, Homo Sapiens; identical to SEQ ID NO: 115999

SEQ ID NO: 285923 - DNA, 583 bp, Homo Sapiens
cgctgcgccacatcccaccggcccttacactgtggtgtccagcagcatccggcttcatggggggacttgaaccctgcagcaggctcctgctcctgcctctcctgctggctgtaagtggtctccgtcctgtccaggcccaggcccagagcgattgcagttgctctacggtgagcccgggcgtgctggcagggatcgtgatgggagacctggtgctgacagtgctcattgccctggccgtgtacttcctgggccggctggtccctcgggggcgaggggctgcggaggcagcgacccggaaacagcgtatcactgagaccgagtcgccttatcaggagctccagggtcagaggtcggatgtctacagcgacctcaacacacagaggccgtattacaaatgagcccgaatcatgacagtcagcaacatgatacctggatccagccattcctgaagcccaccctgcacctcattccaactcctaccgcgatacagacccacagagtgccatccctgagagaccagaccgctccccaatactctcctaaaataaacatgaagcacaaaaacaaaaaaaaaaaaaaaaaa

SEQ ID NO: 285924 - DNA, 1000 bp, Homo Sapiens; identical to SEQ ID NO: 116001

SEQ ID NO: 285925 - DNA, 1000 bp, Homo Sapiens; identical to SEQ ID NO: 221311

SEQ ID NO: 285926 - DNA, 1000 bp, Homo Sapiens
agtctataagataatatatgttgatcccttgctgtagaggagaatttagagtaatttggggtttgtcttggattatatctaaatggattatttgttaaaagtactgaaatgagtataaggcagtatcacccatccaaaagaaaggtctttatagacctgcacagtcactagattaattcattaaaatgcccccaccctgatgtaattgacattacatttcttaacattttaaaatctagaatttctaaaatggaatttaatgccatcacaatttgaaaaactttttttttttttttactatagaagttacaaaggaagttctaaaattatgcctccctctgtttttataagttgccatcgaaaagtgatttaaataagcaggttatctttatagattttaaagaaaactagaaagttttaatgttttaacttggggaaaaatacatctctttaatgtttagcatgcttgtcaaccttgagtgagtgtcatttttaagaacagttgtagcccttctgattattgcagtagctgtagaagtatgtaagaatatgtgatgggtgtagtcattagcaaagcatttaaatcacttgagtattttgtcatggttcattattattaaagcacaaaataacctattgttagaaaatatgtgtttttataaatgaatgtaaaataattaaatgaattgtgaaatggatgtttaagaaaatataggcttaaaaagtaaatctataaaatgatgtcttaaaacagccatatcatgaaaaattctacttagctatattattataagctacatttgccctgaatttgaacactcaacatcactagatttaaatatttagtatattttgatagtaaagggttttgtttcttgaatatcttcactttaaacaaaaaaaaaaaacaactttcatttgtgtggcatttatttttggaagtgtcttcttttttttctttattaaagtttttgaaacttgcaaaaaaaaaaaaaaaaaa

SEQ ID NO: 285927 - DNA, 1000 bp, Homo Sapiens; identical to SEQ ID NO: 116003

SEQ ID NO: 285928 - DNA, 1000 bp, Homo Sapiens; identical to SEQ ID NO: 116005

SEQ ID NO: 285929 - DNA, 1000 bp, Homo Sapiens
aaaatacacattaagtaaaagaattccagctggtaaacatgacctggacatttgtaagaatatatttaatatatgtacacccattatgttttcaggtaacaggaggaaaaatgcagcacaattttttttctcttgaaaggcactgtcatttaaacataaacctggagtactcgaaatagaattcaggtttacaagatgaaagcgtgtggagaagtgtcagatggcagtggaagcatgtgtgtttctaaaaagtaaaaatctcaagaaaacagaaatggcatgctttacccatcttacttagtgaaagagagctgcagttgaaattgtttaaaaagtagcaggtacaatgaatattgtcacagatgtgttaatttttgaagcaatgtgggtgctgactactagtagtatcaaaaatatgttcaggattgttttgatacctgtatttataataaaaaatgttggggggagttgatgaattcctgttaaaagctgttcttgtgtgttacatgtaacagacatggtaaatatttgtttacagtctttgtttaacaaaccatgcatttaagtttaagtgaagtcaacaaaaaggaaataggtgtatggatatgtgattttgagattaaagttagtcttaaaatgtaaataaaatgtgaaacgtgtcctcagagactgtgccatttctattatgttgatgtatatgtacagtaccttgccagggaagcaaaaattggaattattgtagcttttcatgtatacacacttttatttaccctattttgtgtacttcttgtgaattataatttgcagactatttcagaaaagaaattatctagtttaatttcttctttggacaaggagtcctaggtattatattttgagtttgatttcaccagaaataataatattaaaaagatctttgcattctggcagttcttttaggattataggttgcaaattatccaaatatatatcccattttttaaagcataaaaaaaaaaaa

SEQ ID NO: 285930 - DNA, 472 bp, Homo Sapiens
cagagacggaaccagagacaggccagagcatccccctcctccaccatgaaactcgctgtcaccctcaccctggtcacactggctctctgctgcagctccgcttctgcagagatctgcccgagctttcagcgtgtcatcgaaaccctcctcatggacacaccctccagttatgaggctgccatggaacttttcagccctgatcaagacatgagggaggcaggggctcagctgaagaagctggtggacaccctcccccaaaagcccagagaaagcatcattaagctcatggaaaaaatagcccaaagctcactgtgtaattagcatttagaagctgaagatccccaactgctccagcctctgccgctgccatgctttgagtccacgcccaccagccttgctctcttcaataaaccacaagcatctcaaaaaaaaaaaaaaaaaaaaaaaaaaaaaaaaaaaaaaaaaaaaaaaa

SEQ ID NO: 285931 - DNA, 1000 bp, Homo Sapiens; identical to SEQ ID NO: 116007

SEQ ID NO: 285932 - DNA, 1000 bp, Homo Sapiens; identical to SEQ ID NO: 116008

SEQ ID NO: 285933 - DNA, 1000 bp, Homo Sapiens; identical to SEQ ID NO: 119061

SEQ ID NO: 285934 - DNA, 1000 bp, Homo Sapiens
gcccaggctgtggaggggcccagtgagaatgtcaggaagctgtctcgtgcagacttgaccgagtacctcagcacacattacaaggcccctcgaatggtgctggcagcagctggaggagtggagcaccagcaactgttagacctcgcccagaagcacctcggtggcatcccatggacatatgcagaggacgctgtgcccactcttactccatgccgcttcactggcagtgagatccgccaccgtgatgatgctctaccttttgcccacgtggccattgcagtagagggtcctggctgggccagcccggacaatgtggccttgcaagtggccaatgccatcatcggccactatgactgcacttatggtggtggcgtgcacctgtccagcccactggcttcaggtgctgtggccaacaagctatgccagagtttccagaccttcagcatctgctatgcagagacgggcttgctgggtgcacactttgtctgtgaccgaatgaaaatcgatgacatgatgttcgtcctgcaagggcagtggatgcgcctgtgtaccagtgccacggagagtgaggtggcccggggcaaaaacatcctcagaaatgccctggtatctcatctagatggcactactcctgtgtgtgaggacatcggacgcagcctcctgacctatggccgccgcatccccctggctgaatgggaaagccggattgcggaggtggatgccagtgtggtacgtgagatctgctccaagtacatctatgaccagtgcccagcagtggctggatatggccccattgagcagctcccagactacaaccggatccgtagcggcatgttctggctgcgcttctaggcgggaagcctatgtaagcaagagggcagggccggggtttgtggtcccccccccaccacaaacacagcacttcggctcctctaacctgtgccacaggtgaccaccaataaaatcctctgctgagaagtgaaaaaaaaaaaaaaaaaaa

SEQ ID NO: 285935 - DNA, 1000 bp, Homo Sapiens
cagcttaccggaatgccttggctaatcccttgtattgtcctgactataggattggaaaagtgacatcagaggagttacattacttcgttcagaaccatttcacaagtgcaagaatggctttgattggacttggtgtgagtcatcctgttctaaagcaagttgctgaacagtttctcaacatgaggggtgggcttggtttatctggtgcaaaggccaactaccgtggaggtgaaatccgagaacagaatggagacagtcttgtccatgctgcttttgtagcagaaagtgctgtcgcgggaagtgcagaggcaaatgcatttagtgttcttcagcatgtcctcggtgctgggccacatgtcaagaggggcagcaacaccaccagccatctgcaccaggctgttgccaaggcaactcagcagccatttgatgtttctgcatttaatgccagttactcagattctggactctttgggatttatactatctcccaggccacagctgctggagatgttatcaaggctgcctataatcaagtaaaaacaatagctcaaggaaacctttccaacacagatgtccaagctgccaagaacaagctgaaagctggatacctaatgtcagtggagtcttctgagtgtttcctggaagaagtcgggtcccaggctctagttgctggttcttacatgccaccatccacagtccttcagcagattgattcagtggctaatgctgatatcataaatgcggcaaagaagtttgtttctggccagaagtcaatggcagcaagtggaaatttgggacatacaccttttgttgatgagttgtaatactgatgcacacattacaggagagagctgaacgttctctcagcccagagcagcaaacacatgaaagtcagaagtctctaatatatcatttgtcttttttccagtgaggtaaaataaggcataaatgcaggtaattattcccagctgacctaaagtcaataaaacattctgtttaa

SEQ ID NO: 285936 - DNA, 1000 bp, Homo Sapiens
acaaaatttcatacgtagtgcaaagcttaaaggagtatgaggggaagtggttgctttttgatgattctgaagtcaaagttactgaagagaaggactttctgaattctctttccccttctacatctcctacttctactccttacttgctattttataagaaattatagagtgagtgtattttccttgtgtatatattaaacacacccatacaaacattggtaaagttgattacatcaaagaatctttagcttatcttttgaagctactggatattattggtctctctaggtttttatataaatagtgaaatttgaattactgaaaaccatgttaatttttagaactcattttcctcagtagagactagtgatgcattagcttctgggaacaaacttgtatcggttcttaattaaattatccaaaacggaggcatttaaacacttggatttacaccagtcttttgtgtttgctttttaaaataaagtgctcgtatttgtattctccatattttggagtaattatctacatgatgtttatagttcctgtggtttttcacccaagaagcagaatctcattcagtacatttagttttataagagtcatgaagctaaatccttgggctatgtcagaggcacaaagtctagaatgtgtgtattcacaatggtgtatgtacattttgtgccttgattcacttagaagtgtctcagaaaacctggacagttcgcttctacacaagaattttatatgtatttatgaagatgattctgtaccctagtatatctttttgggcatggactaatttgtatctgtttaactcatattctgcacgatctgtatatagtacatcaaacttagaggtgtgaccttaaatttaactttttttaaaaactgggaggtcaataaaatttaaactgcttaactatgtatatgaatatttgaattttttacttgtatatttttataaatacagctgagttttcttaaagcgaaaaaaaaaaaa

SEQ ID NO: 285937 - DNA, 1000 bp, Homo Sapiens
cctctagttgaaagagcttacagctcgagtcaccttttagctatttgtctgctttttatttacccttgtatgttatcctcagagggaagatgataatatataaataatataatgaacacacccttagtttctcataagcatttgccctcaccatggtttataaaactttgggaaaacggaatattcagaaataggtttccgccatgtactgaaaggtctgtggccatctgtgaggtagatgaagaagcagcatagtggtctccttacatctaggcctaactgtccctcttcctgcccccgggtaccacagtccacctttagaccctactgtcgccccatcttctccgtggatgggccatgcgtcctgaaaacaggacatcagattcactggttctgtaacccagtagctgtgacgttccatctcttctaaccagccatggccttcccctcctctgccatacccttaatgcggccctcagattagatgaaaaacttgctcctggtggatcccaagggaccctcaaggacctcgaggttactgcagtcagatgccatctcatcccctgtgggggccaaagtttttatgtgggcagatgctgtggtcaggaactaggcatgctttctggcaatgcactcaccagacaaaaatcccttgatgtaaatcccatgttaatttattaaatttcagtcagaaggtcagcatttacatgacagaatgtatgtagagagttggggtgtctggtaggcaaactgcaaggcagttgagatagttggattaagaggctagacgagacatagaatactattggtatgtgtgcaatttcatgaatattaaattatgtttcgaagtccagttgtcattcccgcattcagatttcatttgctgttgctttatacgttacgtacccaaggacattgcctcagggttgcaaactctttaaaggaaaatttatccatatatccatgtattatatagaagaataaaaattgagtttacttc

SEQ ID NO: 285938 - DNA, 1000 bp, Homo Sapiens; identical to SEQ ID NO: 221314

SEQ ID NO: 285939 - DNA, 1000 bp, Homo Sapiens; identical to SEQ ID NO: 116010

SEQ ID NO: 285940 - DNA, 1000 bp, Homo Sapiens; identical to SEQ ID NO: 116011

SEQ ID NO: 285941 - DNA, 1000 bp, Homo Sapiens
ggaaaatgcctgtaaagtctgagtaagaaacttcatgctggcctgtgtgatacaagagtcagcatcattaaaggaaacgtggcaggacttccatctgtgccatacttgttctgtattcgaaatgagctcaaattgattttttaatttctatgaaggatccatctttgtatatttacatgcttagaggggtgaaaattattttggaaattgagtctgaagcactctcgcacacacagtgattccctcctcccgtcactccacgcagctggcagagagcacagtgatcaccagcgtgagtggtggaggaggacacttggatttttttttttgttttttttttttttgcttaacagttttagaatacattgtacttatacaccttattaatgatcagctatatactatttatatacaagtgataatacagatttgtaacattagttttaaaaagggaaagttttgttctgtatattttgttaccttttacagaataaaagaattacatatgaaaaaccctctaaaccatggcacttgatgtgatgtggcaggagggcagtggtggagctggacctgcctgctgcagtcacgtgtaaacaggattattattagtgttttatgcatgtaatggactatgcacacttttaattttgtcagattcacacatgccactatgagctttcagactccagctgtgaagagactctgtttgcttgtgtttgtttgtttgcagtctctctctgccatggccttggcaggctgctggaaggcagcttgtggaggccgttggttccgcccactcattccttctcgtgcactgctttctccttcacagctaagatgccatgtgcaggtggattccatgccgcagacatgaaataaaagctttgcaaaggcacgaaaaaaaaaaaaaaaaaaaaaaaaaaaaaaaaaaaaaaaaaaaaaaaaaaaaaaaaaaaaaaaaaaaaaaaaaaaaaaaaaaaaaaaaaaaaaaaaaaaaaaa

SEQ ID NO: 285942 - DNA, 1000 bp, Homo Sapiens
atccaggagctgcaggctcagattcaggaacagcatgtccaaatcgatgtggatgtttccaagcctgacctcacggctgccctgcgtgacgtacgtcagcaatatgaaagtgtggctgccaagaacctgcaggaggcagaagaatggtacaaatccaagtttgctgacctctctgaggctgccaaccggaacaatgacgccctgcgccaggcaaagcaggagtccactgagtaccggagacaggtgcagtccctcacctgtgaagtggatgcccttaaaggaaccaatgagtccctggaacgccagatgcgtgaaatggaagagaactttgccgttgaagctgctaactaccaagacactattggccgcctgcaggatgagattcagaatatgaaggaggaaatggctcgtcaccttcgtgaataccaagacctgctcaatgttaagatggcccttgacattgagattgccacctacaggaagctgctggaaggcgaggagagcaggatttctctgcctcttccaaacttttcctccctgaacctgagggaaactaatctggattcactccctctggttgatacccactcaaaaaggacacttctgattaagacggttgaaactagagatggacaggttatcaacgaaacttctcagcatcacgatgaccttgaataaaaattgcacacactcagtgcagcaatatattaccagcaagaataaaaaagaaatccatatcttaaagaaacagctttcaagtgcctttctgcagtttttcaggagcgcaagatagatttggaataggaataagctctagttcttaacaaccgacactcctacaagatttagaaaaaagtttacaacataatctagtttacagaaaaatcttgtgctagaatactttttaaaaggtattttgaataccattaaaactgcttttttttttccagcaagtatccaaccaacttggttctgcttcaataaatctttggaaaaactc

SEQ ID NO: 285943 - DNA, 1000 bp, Homo Sapiens
gctggggcgcgatgtcaaaggtcgggacagctgtgccgggaggcagccacagggaagctcacacatcctgtcagtgtcaccttggtttgcaaaacccatatccccggtaaaatgaggccggacagaggggctgttaggacagcaaagcagcagtgtccagagacccctcaatccccaaaggtccgcaccctgtcctgcacaccctgggccacgccggccacacccctctgctgcaacaagctcatccctggacttctgggagaatgaacccgaggttggtttggggagacaggtgaggcggttggatctacagaacaacccaccatttctgggggccgcagaggatccatcacagacggatactggggagtaaacggcccaggccaggtgcccaggaaaggacggctgagcatgtggagcgagagggaggcaggtggacgctgcagaccccaggttcagtgcggcccctcggctgttcctcccctgtagggtttggacagacccacccccagccttgcccagctttcaaaggacaaaagggagcatcccccacctactctcaggtttttgaggaaacaaagatttgtggtaactgaaggtgttgggtcagtggccaggtgccgacactgagctgtgacccagaggggacgctgaggaagtgggcgtgagtggacatgtcaggtggttaccaggcactggttgttgatggtcggtggttgggtgtgggcagtcatcagtcatcaggtgtgctcaggggacaatctcccctcaaccgcacatgtgccactgttcagcggagctgactggtttctcctggtagagggccggctgtatcctgacagatgcctggtgagcaggggaagcaggacccagtggtcaacaggtgtctttaactgtcattgtgtgtggaatgtcgcagactcctccacgtggcgggaatgagctgtgtaaatacttcaataaagcctgacttcacatctgcaaaaaaaaaaaaaaaaaa

SEQ ID NO: 285944 - DNA, 1000 bp, Homo Sapiens; identical to SEQ ID NO: 116012

SEQ ID NO: 285945 - DNA, 1000 bp, Homo Sapiens
agctattcacacacacacacacacacacacacacacacacacacacacacacaaatattgcttggactacctataaatggacttgcttcttgtgtttgaaacactcgtgtgcatgagaatgtcatttgctaatgaattttaaaagcatatataaaacaaaacaaacaacctgccacaatgtgatatgtgtaatatcatttcataaaaatccctcttcctccaaagcctgggcagaaatgtgctgcaaagagttatatgacttcttgttcatgttttgctaatgctcgtatctccttgattacataatgttagtagcactgagacccccatggtaatgtaacttaattataagctatgtcactaccctcctgtaaaatactattggacagacacagagggacccttggctcctgtgtctggtccacacaccacagaagcttgtattatcagtgaatataaatgtactacatttgcatgccttttgggtttgccttaattcttacctcatttgcatcctatcgatctggaaagagctgttttggatgaatgcagtataaaatgtaaaaaccctgctaaatgacttattgattaagtatatctatctatatatacatatacacaaagatattatttatcgaaagtaaaaaagatggaagtgtattggtttctgtttgaattttcaaaggcttccaatgtggtggcaataaatgtcccaaataaatttataacaattgattttccccctaattcttattttataattttaaaattgcagcagttgctagcaacaacttactaaatctactcttaaatatacaactttggaatttgaagaattaatgacaacaaaagggaaaaaagcaactttccaacttttcatccaggctcccaaaagagggacaacgaacatggcatgtgaaaagtaaaacagatttgttcattccgaaaaaaaaatgttcattctatgacaataaattttatctcagtgtgaaaaaaaaaa

SEQ ID NO: 285946 - DNA, 1000 bp, Homo Sapiens
tttagcagcatcatttatttgggattcttttatctgatttcaacagtgaaaaacatccctatgataaagcctaatgacccatttcacaaaagatggaatttgcccttcctagaaaatatgacggagaaaagtctgactcagagaaagtgagtctgaattttataaggggtagtaagaattggacaattcctttgcatatctgaacttggcaggtaccgttctaaatctgaaacagggtgatagctcaaagttgccattcatccagaatagattgttttagaatgtagtgtttaagtgactgtttcattaatacacctacaccctttctttgaaagtttgcaacctaattgcatctaaaactatgaataagttctgtggtaaaatcttaaactatggaaaattacaaaaatgaatttttcttccctgaaatcagagcttacatgtgtgtttttttataacattttcagataaatgtattcaacatgtaatacagtattttaacattcacctcttattttatattgaaatgtattacagtattaaaactcagtgttcagtatttatttcactatgcattttatttagtaaaagccaggagaaatgtttaatccaatggtgccttactttgtgatttaaaagaaatcaacttttttttatgtctaagtagtagattatttgcatatttgtaaaaactgttaggtctttatattttaaagtgtaataccagttttgttattttagtagcagaaatgggatgattgttaaagttccccaaaaatgttggcatgaaattaatttttccctccttatagtcaaggaccgtagaggaagaaaaacttttttttcataccatgcactatgtaaacagacacattttgctatctgtgtcatcaggatagtgtaagtggtagggtagagactaccctagacatctgcatctttgtaagttagccagacaataaagaaaagcagaatgaaaaaaaaaaaaaaaaaaaaaaaa

SEQ ID NO: 285947 - DNA, 1000 bp, Homo Sapiens
cgttcctacagcctagaggtgcgtatacacacccaagtacacgcagccaggcattcaggggtgtgtttgccacatggagcatcccttcctggtcttgccaggcacctgcacagagcgtctccagccccatctcctaacgggggctgggggtaagagaaatctaactgcgctcccccaacccctcgccctgccatcttcccctcaagcctgctaagttatcccaggcctgtgcgtggtggaaaaagccagccttggccctgcagcctccacctcgccgctgggggaccaacaggttgcttacagctttgcaccccggcatcagcacaggggtccctgccccaccctccggcagctcagggagtgttttcctgtgaggcctcccccatcagtggaccagagggagaagcccgatgccccatcccggctttcccgtaacgcacaggacacgtgtgcaattcataggaacggcccagatcgccctcatgagtgccacctggtacaggtaggtggcgctcacgttcctgcccaaatgcagcccatcggggagtcacagtcagtccccccggcccccctcccagtccctgttggctttcggtagctctcgcatgcagttctattaacagccgtctagaagcgatgctttagtggcctaacccagggtcaaatacagctctttctagcaaaatcaggcagctctgccccatcggtaggggcaccgattagtctactaacagccagaggtccatctaggagggtgccgggaggagctgagcccccggaggtgggctcctggtgacgggtgtccaagaagcggtttccttgggagcttctgcctccgtgggcctctcagcccgccccgtgtggccgcccgggtgtggctcagccatgtcccctccccaggtccttcattcacccctcccctccccacagtggaattgttgaagtgtggcgagtctgtgctcgggacaataaagcttgtgacaggtccaggaaaaaaaaa

SEQ ID NO: 285948 - DNA, 1000 bp, Homo Sapiens
atgaatcgagacccaatcctggtgtcccttaggcctggctctgagctgctgagaccccacccactgcctgcagagagacctatcttcaattccatggccccagcctcaccccggctcttgaatcagacagaaaagctggctgcagaagatggctggaggtcttcctccctgttggaggagaagatgccaaggtgggcagcagaacacaggctggaggagaagaaaacctggctgacaaatggctttgacgttttcgaatgccccccaccaaagacagagaatgagttgctgcagatgttctaccggcaacaggaggagatccgaaggctccgggagctgttgacccagcgagaggtccaggccaaacagttggaactggagatcaaaaacttgcggatgggctcagagcagctctgagcagagacctctgccctcctcaccctcagggacaccactcggctccatggggaggtttagaaccaaaccacaagtcccctcaaggacaaccactatttctatattttttaccagaaaacaaaactctccatcgctgaaagagattccagtgggacatggtgccgtttttctgtttgccttcttgcaacaacagtttctgaattgactttgttttcagatgatgccttctgttgaattctgttattaagggcccatgatgagctgtaacttctcaagaggaaagaacacagtagaaaactagagctggaaggatctaggttgacctgtctgtgattttcaaactgtggtccagagaataggggaagactgggccagacgcagtggctcatgcctgtaatcccagcactctgggaggctgaggtgggcggattgcttgaggtcgggagtttgaaaccagtctcaccaggcgcagtggctcacgcctgtaattccagcatgttgggaggccgaggctggtggatcacgaggtcagcagttcgagaccagcctgaccaacatggtgaaaccccatctctactaaaaa

SEQ ID NO: 285949 - DNA, 1000 bp, Homo Sapiens
tggagcgtattcaagatcttcccaatacaagaaaattaataaaaaatttatatataggcagcagcaaaagagccatgttcaaaatagtcattatgggctcaaatagaaagaagacttttaagttttaatccagtttatctgttgagttctgtgagctactgacctcctgagactggcactgtgtaagttttagttgcctaccctagctcttttctcgtacaattttgccaataccaagtttcaatttgtttttacaaaacattattcaagccactagaattatcaaatatgacgctatagcagagtaaatactctgaataagagaccggtactagctaactccaagagatcgttagcagcatcagtccacaaacacttagtggcccacaatatatagagagatagaaaaggtagttataacttgaagcatgtatttaatgcaaataggcacgaaggcacaggtctaaaatactacattgtcactgtaagctatacttttaaaatatttattttttttaaagtattttctagtcttttctctctctgtggaatggtgaaagagagatgccgtgttttgaaagtaagatgatgaaatgaatttttaattcaagaaacattcagaaacataggaattaaaacttagagaaatgatctaatttccctgttcacacaaactttacactttaatctgatgattggatattttattttagtgaaacatcatcttgttagctaactttaaaaaatggatgtagaatgattaaaggttggtatgatttttttttaatgtatcagtttgaacctagaatattgaattaaaatgctgtctcagtattttaaaagcaaaaaaggaatggaggaaaattgcatcttagaccatttttatatgcagtgtacaatttgctgggctagaaatgagataaagattatttatttttgttcatatcttgtacttttctattaaaatcattttatgaaatccaaaaaaaaaaaaaaaaaa

SEQ ID NO: 285950 - DNA, 1000 bp, Homo Sapiens
cctgacttctgtgagcgagaccccactatgggctccccagggacaaggggccgggcctgcaacaagaccagccgcctgttggatggctgtggcagcctgtgctgtggccgtgggcacaacgtgctccggcagacacgagttgagcgctgccattgccgcttccactggtgctgctatgtgctgtgtgatgagtgcaaggttacagagtgggtgaatgtgtgtaagtgagggtcagccttaccttggggctggggaagaggactgtgtgagaggggcgccttttcagccctttgctctgatttccttccaaggtcactcttggtccctggaagcttaaagtatctacctggaaacagctttaggggtggtgggggtcaggtggactctgggatgtgtagccttctccccaacaattggagggtcttgaggggaagctgccacccctcttctgctccttagacacctgaatggactaagatgaaatgcactgtattgctcctcccacttctcaactccagagcccctttaaccctgattcatactccttttggctggggagtccctatagtttcaccactcctctcccttgagggataaccccaggcactgtttggagccataagatctgtatctagaaagagatcacccactcctatgtactatccccaaactcctttactgcagcctgggctccctcttgtgggataatgggagacagtggtagagaggtttttcttgggaaagagacagagtgctgaggggcactctcccctgaatcctcagagagttgtctgtccaggcccttagggaagttgtctccttccattcagatgttaatggggaccctccaaaggaaggggttttcccatgactcttggagcctctttttccttcttcagcaggaagggtgggaagggataatttatcatactgagacttgttcttggttcctgtttgaaactaaaataaattaagttactggaaaaaaaaaaaaaaaaaa

SEQ ID NO: 285951 - DNA, 1000 bp, Homo Sapiens
ttggaagagagagaaatagccctacggcaggctgatgaagagaaacataaacgtcaaatgtctgtccctggcatctttaatccacatgagattccagaagaaatgtgtgattaaaatccaaattcatgctgttttttttctctgcaactcgttagcagaggaaaacagcatgtgggtatttgtcgaccaaaatgatgccaatttgtaaattaaaatgtcacctagtggccctttttcttatgtgtttttttgtataagaaattttctgtgaaatatccttccattgtttaagcttttgttttggtcatctttatttagtttgcatgaagttgaaaattaaggcatttttaaaaattttacttcatgcccatttttgtggctgggctggggggaggaggcaaattcgatttgaacatatacttgtaattctaatgcaaaattatacaatttttcctgtaaacaataccaatttttaattagggagcattttccttctagtctatttcagcctagaagaaaagataatgagtaaaacaaattgcgttgtttaaaggattatagtgctgcattgtctgaagttagcacctcttggactgaatcgtttgtctagactacatgtattacaaagtctctttggcaagattgcagcaagatcatgtgcatatcatcccattgtaaagcgacttcaaaaatatgggaacacagttagttatttttacacagttctttttgtttttgtgtgtgtgtgctgtcgcttgtcgacaacagctttttgttttcctcaatgaggagtgttgctcatttgtgagccttcattaactcgaagtgaaatggttaaaaatatttatcctgttagaataggctgcatctttttaacaactcattaaaaaacaaaacaactctggcttttgagatgacttatactaatttacattgtttaccaagctgtagtgctttaagaacactacttaaaaagcaaaataaacttggtttacattta

SEQ ID NO: 285952 - DNA, 1000 bp, Homo Sapiens; identical to SEQ ID NO: 116014

SEQ ID NO: 285953 - DNA, 1000 bp, Homo Sapiens
acctgagcaagcctgcctcttagccaaacaagccttcgatgatgccatagctgagctggacacactaaacgaggattcctataaggactccacgctgatcatgcagttgctgcgagacaacctcaccctctggacgagcgaccagcaggatgaagaagcaggagaaggcaactgaagatccttcaggtcccctggcccttccttcacccaccacccccatcatcaccgattcttccttgccacaatcactaaatatctagtgctaaacctatctgtattggcagcacagctactcagatctgcactcctgtctcttgggaagcagtttcagataaatcatgggcattgctggactgatggttgctttgagcccacaggagctccctttttgaattgtgtggagaagtgtgttctgatgaggcattttactatgcctgttgatctatgggaaatctaggcgaaagtaatggggaagattagaaagaattagccaaccaggctacagttgatatttaaaagatccatttaaaacaagctgatagtgtttcgttaagcagtacatcttgtgcatgcaaaaatgaattcacccctcccacctctttcttcaattaatggaaaactgttaagggaagctgatacagagagacaacttgctcctttccatcagctttataataaactgtttaacgtgaggtttcagtagctccttggttttgcctctttaaattatgacgtgcacaaaccttcttttcaatgcaatgcatctgaaagttttgatacttgtaacttttttttttttttggttgcaattgtttaagaatcatggatttattttttgtaactctttggctattgtccttgtgtatcctgacagcgccatgtgtgtcagcccatgtcaatcaagatgggtgattatgaaatgccagacttctaaaataaatgttttggaattcaatgggtaaataaatgctgctttggggatattaaaaaaaaaaaaaaa

SEQ ID NO: 285954 - DNA, 1000 bp, Homo Sapiens
tctgccttctctgctgcccctggcacccccctggctcgaagagaccccaccccagtctgttgcccctcctgccgaagggccactcctatcagcgtctgggggcccttgggtggcctggttcggaccccctctgtacagtccctgggatccgaccctgatgaatatgccagcagcggcagcagcctggggggctctgactctcccgtcttcgaggcgggagtttttgcaccaccccagcccgtggcagccccccggcgactccccatcttcaatcgcatctctgtttctgagtgacaaagtgactgcccggtcagatcagctggatctcagcggggagccacgtctcttgcactgtggtctctgcatggaccccagggctgtggggacttgggggacagtaatcaagtaatccccttttccagaatgcattaacccactcccctgacctcacgctggggcaggtccccaagtgtgcaagctcagtattcatgatggtgggggatggagtgtcttccgaggttcttgggggaaaaaaaattgtagcatatttaagggaggcaatgaaccctctcccccacctcttccctgcccaaatctgtctcctagaatcttatgtgctgtgaataataggccttcactgcccctccagtttttatagacctgaggttccagtgtctcctggtaactggaacctctcctgagggggaatcctggtgctcaaattaccctccaaaagcaagtagccaaagccgttgccaaaccccacccataaatcaatgggccctttatttatgacgactttatttattctaatatgattttatagtatttatatatattgggtcgtctgcttcccttgtatttttcttcctttttttgtaatattgaaaacgacgatataattattataagtagactataatatatttagtaatatatattattaccttaaaagtctatttttgtgttttgggcatttttaaataaacaatctgagtgt

SEQ ID NO: 285955 - DNA, 1000 bp, Homo Sapiens
taacgaatgtgaaaaagcctttaatgcaaaatcacagcttgttatacatcagcgatcccacactggagaaaaaccctatgaatgtaatgaatgtgggaaaactttcaaacaaaatgcatccctaaccaaacatgtgaaaactcattcagaagataaatctcatgagtgaagttaatgtgggaaatttgttaactaaatttaaggttttgttgaaccttggaaatatgctgattttaaagagtgttagaaagcctttagcaagatgtcacaccttgttgtacatgagaaactttgaaaatggatcttcatatagaatcagtggatggaaacaagggtttaaacttgatacaaaaccttttataaaaaatattgttttaactactcaattattataaatgatctacatgttcagattgaaattgaaagctttaaaaattgtgaattatttgaatattcaaagcaatggagaaacaagttatatatgctgacagttcctgtgtttcttcttgttttgtacttaagcaccatatattagagttgaatttgcatatctgtttattgccttatgtaaatgagtgtggccatctgtataagcctctttgacattttcacccagctctttcttaatgtctgtgttggcttctgcatcagcagaaatctttttaaaagggttgttatatatgtaaaaaatgttaacaggaaaatgagagaaaataaagcagctgaggatacaaatgtgctggtagggagcgatattcaagatatattgtgaagtgtgaaaaagtaggttgctgaaccatgtatatagtatgttcccctttgtgtacaaaagggtatgtttgtttaacctctgtctcttatctctgtatgtgtatgtatctttgtatgcatatatacatgtatctgtatgtgaatagactttgaaaaaatacagaataaacttcatggtggttgccattgggcagaggagtataggactggggtctaggataggagcaag

SEQ ID NO: 285956 - DNA, 1000 bp, Homo Sapiens; identical to SEQ ID NO: 221316

SEQ ID NO: 285957 - DNA, 1000 bp, Homo Sapiens
tggtgtttggcaaacctctgaagtgctagactgatttagtctagttttaaaccaagtgctttaggcaggtgtgaactccagcccaaatgccagtcaaagtcaaggcatgggttttcctagcctatcttataggaaattcctgtaccttcttggcccccataatgtgttttttttttttttttttttttaaactaacttacaattttgtgatccgtgattcattgccctgcgattcttgaaagctctgtctgtttttttgtgagaacctttaaaatctcccttaatttttattttcccagaaataatgtaaaaacacttaaatgaaagtggaaatgtattaattttaaatcctataaaattaatacagaaaatataaatgattgggtcatttaactatatttttttaaataaactgaaagataaagaacacaacacttcacacattttatatttctcttacatactccggaatcatacacagttctttttaaagcacaacattaaaacctttaaaaggtatttaagggtttggtcaagtgaatatgataaaacatacttgtctgtataaagagaaaatgaaattgtagtcactgttatgtactgacattagttacaacctagttttaattcttaaaacaattttgattagcaaagctaaaaaaaaatggatgtttcagttaaatgttttaaagaggtacagatttttacaaggacataatataagttattgttctgtagaaatatcctattaaatattgtatgtccctccctctgtacactttgtaaagaaagtaaaatacataaaaagaaaatcatatagggatgtgtgacattattgtaattgtgtacttgagaataacgtgcaaaaataaaaatcagaatattttcctgttattgaatgtttagtctatttgataccagtactaagttaatgctttttctcaaggaaaaaaaatgtacagtttttgtaaacctaataaacatcaaaagcagtggatta

SEQ ID NO: 285958 - DNA, 1000 bp, Homo Sapiens
ttatgatgaaaatttacaataacctgaaagatccagagatgtatgagagcattttgtaacttgttattcagttactaaatttgaggtgaataattaaaaagaaaaggacattaggagagtgaaaatcttctcttcaaataatctttgatagataaaaatggaaggtaagatgtttctagatagaatgttttcatacaatttcagcttcatatcataaatttttctggaaagctatttcagacatagatttcatagtatttttctgagaatcctgtgaaggaacgctgtctctttgcaaagtaaggaggactaagggaaaatgatggtaccatgtaacagaatgagagctaattccaaattagcaacttcatcctgctttctattttacattgagtaaagttttaaaaagacaacagtcaagttgattttgattagaagataaaagtacataatgaaaatccatggccttatttggaatatatatcactttccaaattttattatttatttgagagttaataagttaatgttattaagcagttaataatttatatgtatggatataatataaaatgaattcatataattaaaaagaatttggttaataagaatttggagaatggaaaatacatttttaggttccttaatttggctgttggtacctgtgtatttggaatattttaggggattcgaattttttttaacccacattacagctaccttctagctttagtatggtagtgcttcattcaacttttgctgtcaggtttttattttcacctttttctgtgccaccaattcaaaagttataggattaggaaatataaatttatatttggtgattggcagcctctgaaatgttagattaatttgatctagttctaaagtgctttagtcatatatgaatttaaacctagtaccatccaaaaccatgtaatggattttaagaatctgttaggccttcttagcctttatacatgtccctacctgatttttactg

SEQ ID NO: 285959 - DNA, 1000 bp, Homo Sapiens
cccacaaagtataacaaccccttaagatacatctattttaaagtgaaattaatttttcagtttataccattggccaattacaagataaaaatgttcaatttctttaagaatcctttgttgacttgtcttttcatctcttgctatttatatttgtcactgtttcaacaaagtcttatttgctgaggaaggactttgctgcacttactgtaccacatcaaacactggggagggtggtgtttaactttttaaaaaatgttattctgattataacaataatattggcttttttcatgaaaagagcgccaccttgcaaggtttagtgagatttatggaagttgaatacctaagcaggaattgctgctagctccaaaaatttgcgaagcaaaagctagccccaattggtttggaagtttgaaactgattaacagatttgcatttgaagtgactccagacattaggtccagacattagttaaaaatagaaagaggaataaagacatctcttctctctagaaaagataacaccacaattaataatccttcccactttcattgagatcagcttgtctgataacctgatatgagtgtgataatgataaacatgataatagtggtacttttgtaattttgctggtgcatttaagaagatagtaaatgatgagttcatcttttcttcgaacattcctattcctagatgtagtttacctcaaattgggaattataactgtctaatttttgttgtgtacctgatgccccttttgctttaataccacagtgtaacaattaaatatcacactatgacatatgatttaagtaggatattttaaagataaattttaggggtaaatgtttacttcaaaatgactccatatttcaaatatctgtttagactgtgaaggccaaataatttttaagaaaacatttgaagagtagtgtgtttgcatttgtgaataatcttactcacagcaagtaaacgtaataaaagccaacatttaagccaa

SEQ ID NO: 285960 - DNA, 1000 bp, Homo Sapiens; identical to SEQ ID NO: 221317

SEQ ID NO: 285961 - DNA, 1000 bp, Homo Sapiens; identical to SEQ ID NO: 221318

SEQ ID NO: 285962 - DNA, 1000 bp, Homo Sapiens
agccagagctccaccctagcccagcatcaaaggatgcatactggggagaaagctcaaattctaaaagcctcagacagtccaagccttgttgcacatcagagaattcacgctgtagagaaaccatttaagtgtgatgagtgtgggaaagcttttaggtggatctctcgcctgagtcagcatcagctgattcacactggagagaagccttataaatgcaacaagtgtacaaaagcctttggttgtagttcacggcttattcgccatcagagaactcacactggagaaaaaccatttaaatgtgatgagtgtggcaaaggctttgttcagggctcacaccttattcagcatcagcgaatccacactggagagaaaccctatgtgtgtaatgactgtggaaaagccttcagtcagagttccagccttatttaccatcagagaatccataaaggagagaagccctacgaatgcctccaatgcggaaaagccttcagtatgagcacacagcttacaatacatcaaagggttcacactggagagaggccctataaatgtaatgaatgtgggaaagccttcagtcaaaactcaacccttttccaacaccagataattcatgcaggggtgaagccctatgagtgcagtgagtgtggaaaagccttcagccggagctcatatcttattgaacaccagagaatacacactagggcccagtggttttacgaatatgggaatgccctggaagggtccacctttgtgagccgtaaaaaggttaatactataaagaaactgcatcagtgtgaagactgtgagaagatatttaggtggcgttcacacctaattatacaccagagaattcacaccggggagaagccttataaatgcaatgactgtggcaaagcttttaatcgtagctcaaggcttacccagcatcaaaaaattcacatgggatagaccacttacatataaatgtgtatatatgtgaataaacctatagccttaactt

SEQ ID NO: 285963 - DNA, 1000 bp, Homo Sapiens; identical to SEQ ID NO: 221319

SEQ ID NO: 285964 - DNA, 1000 bp, Homo Sapiens; identical to SEQ ID NO: 221320

SEQ ID NO: 285965 - DNA, 1000 bp, Homo Sapiens
cgagcctcaccgtgcaccagagaacccacactggggagaagccctatgaatgtgagaagtgtggtgcagctttcatttccaactcacacctcatgcgacaccatagaacccatcttgttgaataacaagtaaggaagaggaagacctccagcattggtcataaccttctgcctccctaatgagacacctctttgctgttttcttcctcctctataaaagtgagggctgtgtccttaaaagttatagttttcaggaatgcagcagaagacacaagaaaagcatttcagaggctaatttaaaacaaaaagtaagcacctaaaggcaaggactttgttttaactgtaccttaagcggtcatgttctctgaagtggaatgtggctttcctaggaatgggtcgtacaaagctaagtggtaatgatgctatttggggaaaggtcttttttgcttaattttgttttttaaaactctgatgattgcttgagcaacaggcaggttatctgcctggttgaattctggttgaaccgtgtattctaatatttctggttaagtggtgactgggtaaggaaaccacttggggtagcagttcaacaattcacttacgaatgtttataagctttccatttcctaggtaattttttaaaagccagtcaaaacaaaaactttactgaaaatggacagaaataggaaatggactttttccttactgtctatacctcctgaaccttggtattgtaaagatctggggacctctgggtctgttctgaccattccctagtctccatggccaagcactcaaggattgatggacaccacacaccagctatattcatttgccaagatcaacagctccttctccaaacaactcaagcccccaattcccatcgcattccatttgggtgagatgcaactaacagccccttcctggatgaaggagtcaaagaataaagcttgcctagaggcaaaaaaaaaaaaaaaaaaaaaaaaaaaaaaaaaaaaaaa

SEQ ID NO: 285966 - DNA, 1000 bp, Homo Sapiens; identical to SEQ ID NO: 221321

SEQ ID NO: 285967 - DNA, 1000 bp, Homo Sapiens
cactccggggagaagtcgtttaagtgtgagaaatgtggggagatgttcaactggagctcgcacctcactgagcaccagaggctgcacagcgaggggaagcccttggccatccagttcaacaaacacctgctcagcacatactacgtgcctggcagcctgctgggtgcaggggatgctggactgagggacgtggatcccatcgacgcgctggatgtggcaaagctcttgtgcgtggttccccccagagctggcaggaatttctccctggggagcaaacctcgaaactaacatgatgtgctttggtgtcagtagctgctttctgagctactcaacaaggaaagcaccctggtcctccctggctcctagatccagaccaccttcctccaggtgtgggagccttgccttatcaccccaatcaggtctgcatgccagggtgcctcctctagttaaagtcagtcacctccccagaagggccacactccaggaggagtgttgagagtcatttgaggtagtcttgccacctgttttccttgatgggcctggaagttgttgacaaggggaaagatctttcttgccaataaaaagaagggatatcgttgggtgccatggctcacacctgtaatcttaacactgtgggaggccaaggcaaggggatcacttgagcccaggagtctaggaccagcctggacaacatggtgagacctcgtctctacaaaaaatgcaaaaattagccagatgtggcggcatgtccctgtggtcccagctactcaggaggctgaggtgggaggatcatttgagcctaggaggtcaaggctgcagtgagccatgattcacagcactgcactgcagcctgggtgacaaagcaagaccctgtgtgaaattaaaaggaggtatatcaactgttgtatcctcggacgggctcctgacatggctttaatcaggagtttcctccataaactattattttcagaataataataaaacaagaattatgactagc

SEQ ID NO: 285968 - DNA, 1000 bp, Homo Sapiens
ggcaaagcatttagccagccttcacaccttactacacataagaggatgcacactggagagaaaccctacaaatgtgaagaatgtggcaaagcttttagccaatcctcaacccttactacacataagataattcatactggagagaaaccctacaaatgtgaagaatgtggcaaagcttttaggaaatcttcaactcttactgaacataagataattcatactggagagaaaccctacaaatgtgaagaatgtggcaaagcatttagccaatcctcaaccctaactagacatacgaggatgcacactggagagaaaccatacaaatgtgaagaatgtgggaaagcttttaatcgatcctcaaagcttactacacataagataattcatactggagagaaaccttacaagtgtgaagaatgtggcaaagcatttatatcatcctcaaccctaaatggacataagagaattcatactagagagaaaccctacaaatgtgaagaatgtggcaaagcatttagccaatcttcaaccctaactagacataagaggttgcacaccggagagaaaccctacaaatgtggagaatgtggcaaagcctttaaagagtcctcagctcttactaaacataagataattcacactggagagaaaccctacaaatgtgaaaaatgttgcaaagcctttaaccagtcttcaatccttactaaccataagaaaattcatactatcacacctgtaatcccactactttgggaggccgaggcgggcggatcacgaggtcaggagatggagaccatcctggctaacacagtgaaaccccttctctactaaaaaatacaaaaaactagccgggcgtggtggcgggcgcctgtagtcccagctatgcgagaggctgaggcaggagaatggcgtgaacccgggaggcggagcttgcagtgagccgagatcacgccactgcactcaagcctgggcgacagagcgagactccgtctcaaaaaaa

SEQ ID NO: 285969 - DNA, 1000 bp, Homo Sapiens; identical to SEQ ID NO: 221322

SEQ ID NO: 285970 - DNA, 1000 bp, Homo Sapiens
ggcgatgcttcaggcagaggaccacccttgtcaaccaccagaggacacactcaaaggagaagccctatgtgtgcggggtgtgtgggcacagcttcagccagaattcaaccctcatctctcacaggcggacacacactggggagaagccgtatgtttgtggggtgtgtgggcgaggctttagtctcaagtcacacctcaacagacaccagaacatacactcaggagagaagcccattgtgtgcaaggactgtggccggggcttcagccagcaatccaacctcatcagacaccagaggacgcactcaggcgagaagcccatggtgtgtggggagtgcgggcgaggcttcagccagaagtcaaaccttgttgcacaccagaggacgcactcaggggagaggccgtatgtgtgccgagagtgcgggcgaggctttagccaccaggccggtctcatcaggcacaagcggaagcactcgagggagaagccctacatgtgcaggcagtgtggactgggctttggcaataagtcagctctaattacacacaagcgggctcactcggaagagaagccttgtgtgtgcagagagtgtggccaaggctttctccaaaagtcacacctcaccttacatcaaatgacacatacgggggagaagccatatgtgtgcaagacgtgtgggcggggcttcagcctcaagtctcacctcagcagacacaggaagaccacgtctgtccaccacagactgccagtgcagcccgaccctgagccgtgtgcagggcaaccttcggattccttatactctctctgaaggcaaagatggggacaaggactaagagtcagaatgttgacactttgatgaaatggagtagagaaatgcattctgtaagtggtcaaaggacatttgactgtttactttctccacactaagtcttctccatgttttgtggccttcggttgtaataaacttggcttctttatacatctgtaaaaaaaaaaaaaaaaaaa

SEQ ID NO: 285971 - DNA, 1000 bp, Homo Sapiens
ctcctcccttaccaagcaccagagaactcacactggataaacccactccacatgtgctggggacataggaagaccttaagccatagctcatccctttctagatttgacccaatcatacacatgagaaacgtacgttcatacacaagccttttcacacagcactcccctcagacaccctcagagagttcacactgatgggaaatgaccatgggaccaccaagctctaggtcatccatctctgcatccaaatagtagggaaacgtggagataatcaacactcaggaccttcagccttgaacgcccattagtgctatgttatagaacctacaaaaaagaaatggaacaaatgtagtggatccagggaacgcttttgtccaaggattcaccgtattccaaaccagagatgttcaaattggtgagaaacccaacaaatgcctttcatatatacgagaaccaaatgaagtcagaatttgccattattgcacattacatttttgggggggaaagtgcttatgaatggtgcaggttgactctgatattcattcccaaatgacagtatggcagagtgttccagaaatgagagtggcatctttatggaatcactatggatactgactgtctcagtaaacagctgtcttgtctgtgtgtatattgtttgatcagggtacatggcagccagtcacagattggaattacatatgacaaagtatcagtgtactataaacaggtttttagttatccctgcattatttttgcaattaatctttatatgcaatgagattgaaaagctttgtatgggaagactcaaaatgtaaagctgcttccgtagagtctcactgattctgagatggcttttgctgctctgttctccctctacatttctctgcagaactcgcgttagaaacacagatatttgttttacaaaaagggagatttttcctttgttaaaccatcgtcttataagcaatagcaaattcatgttagaaaaaaaaaaaaaaaa

SEQ ID NO: 285972 - DNA, 1000 bp, Homo Sapiens
cggctaactttgttttttttttttagaaattaaaccttttttcagcttaatgacccaggggtgtatttttgaaggacttgggagctctctttgaaaggcaaacaacaagggaaacagtacctttatctcagtaggaaattaaataattcaaacatcaaataacttcaatttaaggctatggactttgagataattctgagccttgagaggaatgtggtcaggcaacctgagtccagtggaatgcaggtgcaacttctaagagttttcctgtaagtaattaagaagactaagtagccccagagataagacctcctcggatcattgtcccttcttatgtagtgataaagtaaccttccttgaagtgtatctatccgtaatcaatcaagttgctgcagcctatgcactggcccagaataaaaaacgtggtgattctgctaaagcttctctgtctttccctgtgtgtgaaatcttaacgtctctacttgggaacgctgatcccattcatttagagttgatgtttccacgtggctatttccaagctttgccttcaaataaattctgtacttaatcatatattctaaattttattatttactgctgacatcagtttctgtcggattgtaggagcctcaccagagagggcccctgtcgccatgttgtaaaactcacacttgccaaaagttgtgggttagggtttctccccctccctcaggatgacgctagttagctgacacagatggtcacctccattaccaagtagagtcaggatgaactatgtgtgactgttcaactatgtgtcctcttccctgaggactgattagtgtttatcttgaaaacatgtccttaatgggttgtatagaacactgaagcatctgatttcaaactcttagctcttttcctctatttcccatcacattctggtctaaggcttatttattaataaaatgatttttatttctttaaacaaaaaaaactttagagcacactggggtaccggatc

SEQ ID NO: 285973 - DNA, 1000 bp, Homo Sapiens; identical to SEQ ID NO: 221324

SEQ ID NO: 285974 - DNA, 1000 bp, Homo Sapiens; identical to SEQ ID NO: 116018

SEQ ID NO: 285975 - DNA, 1000 bp, Homo Sapiens
tgtcaacatatctcaagctgacatgcaggccattggcaacaccatcacaatggtaacgcaggatggcacgcccatcacagtccccgcccatgatgcagtcatctcctcagcaggaacgcactctgttgctatggttactgctgagggtacagaagggcaacaggttgcaattgtagctcaagacttggcagcattccatactgcctcatcagaaatggggcaccagcagcatagccatcacttagtaaccacagaaaccagacctctgaccttagtagcaacatccaatggcacccagattgcagttcagcttggagaacagccatctctggaagaagccatcagaatagcgtctagaatccaacaaggagaaacgccagggttggatgattaatcctcagaacaatggagcaataaagcagaaggagtctttcatcttctggcagcagaaatccatgaagcccgggcccaggaaaattagaagttttccattcctgatacactgtacacatttttatgcgagagtggagaacattttattcttgacacttttgtgtatataacccttggaatagattctcagagtgattcattgtgtacaaggaagtatgaaattagggcaatacagtaaattttcatgttactcttttatcagatcacaaactcctagagtctacatgcaagactagtaaagtcttatggagtcttatgatggatttttaacttcccgtggaaaaaaaaataaaggctgtatctaaaatatcaaaggttctatatgtcacacaatcgtaattccaaaagccattatggataataaagggtgtaaagccttcagatatttccccaaaaaaaaaaaaaaaaaaaaaaaaaaaaaaaaaaaaaaaaaaaaaaaaaaaaaaaaaaaaaaaaaaaaaaaaaaaaaaaaaaaaaaaaaaaaaaaaaaaaaaaaaaaaaaaaaaaaaaaaaaaagaaaaaaaaaaaaaaaaaaaaaaaaaaaaaa

SEQ ID NO: 285976 - DNA, 1000 bp, Homo Sapiens; identical to SEQ ID NO: 116019

SEQ ID NO: 285977 - DNA, 1000 bp, Homo Sapiens
tgttagcaccctggagaaagtccttgagtacacagtgaatgtcagaaagcttcagctgaaggccatatctcattgagtgccacacagttcacaagggaaagacacttttgatatgtagggatgtccagttgatataacagctctgaaggagatcccttatgagggtggcatcagcctgaattgaacatcctatatctgaacatctgcataaattccaggtatgtgtgaactgcattgcaccttttgccctgcccagggcccatgtcagatttatgtctctgctgatactatagtgtaagccattttacctctactgcctggcaggtgaccaccagtgtgcaccactcacccatcccagtgtattcaggccatggacctgacccagtttggcccagaggactctgctggtgacctgaaaagagggactacatatttcaggatattgttggtctcacatgactcttgatagagtttgccagccttcaaatcaccaactgtgggaaccaactgcctcttattgccttgctgtgttcaattacaaaaaaagatggaaaagactgttatgaagccagatgaacctttctccagtcttccttcactatttttttttccttcaccatttatcatttcatagtcatttatgtttcatcggtcctcatgtgtactagtgcgttattttacttatactcccggatatcatattatttaatgcatagcctcttcagaatgcaattttaaaatgtaaaggctcttttataaccccccaaaaaatcacacaaatatattttaaaatgtaaatattttatcgcttctgttttctcagttgtctaaaacaatgtgtttcttaaggaagatcatttttattcaggatccaaatgtatatttaatagctttcagtagttgtatctcataagtctgtaacctacaggttccatttacctttgttttcttatttcttgaagttgctgagtcattttttaattagaatttgctgtattct

SEQ ID NO: 285978 - DNA, 1000 bp, Homo Sapiens
gaaagaggcttgtacacaggacataccgtaaagaccagccgagagactatagtggggaaaacccatccaaatgtgaggattgtgggagacgctacaagaggcgcttgaatctggatatacttttatcattatttctaaatgacacataattgttcatatttatggggtacaacgtgctattttaatgtgtgcatacaatttatagtgatccaatcagtgtaattggtgtatctgttacctcaaacatttaccatttctttgtgttggaaaattcaaaatccatttgagaggagttggtagacagcaagggaagggtccctggagacccccagccaaacgggtcagtgtctcatccccacataacacaaaaagcagcctggggaagacaatcaagctacaggcactgataagggaactagcacaggggattgtgcctggagacatgcccatggctgcacagatagaagaacctccagcccattcaggtaaaaactcgcacaaacctccggctcactcagttaagggaacaagaccagacacagaaatgcctttgtcctttgtataatcagcaggctccgaggaaaaagtttcttcttttgtgggcatgaacacagtgggcttcagtaggttcaggttggcactttcttttgtggaaaaggaaaagcccagcctctgtaaatcatcacttcagctcctgattggtcccaggccaagctgaatagcccttaggaataatcacttcaactcctgattggtcccgggccaagctgaatagcccttatgaatcatcacttcggttcctgattggtcccgggccaaggtcccagaccaagctgaatcacgctttctccaagacagcccgcaggctaagtgcattccttccccttcccagtccataaaaaccccggaccccagcctcatactgggcaacttatttggatccccatctccactgtggagagcttttttctttcacttattaaacttttactccaatttc

SEQ ID NO: 285979 - DNA, 1000 bp, Homo Sapiens
aaaaacttccgtgcaaagaaatccctaaatcagcatcaaagaattcacacaggtgagaaaccctatgagtgtggtgaatgtgggaaattcttccgaatgaagatgactctcaataatcatcaaagaactcacacaggtgaaaagccctatcagtgtaatgaatgtgggaaatctttcagggtgcactcatctcttgggatccatcagagaattcacacaggagagaaaccttacgaatgtaatgagtgtggtaatgctttctatgtgaaagcacgcctaattgaacatcagaggatgcattcaggagagaaaccctacgaatgtagtgaatgtgggaaaatcttcagtatgaagaaatccctttgtcaacaccggagaactcacacaggagagaaaccttatgaatgtagtgaatgtggaaatgccttctatgtgaaagtacgcctcattgaacatcagcgaattcacacaggagagagaccctttgagtgtcaagaatgtgggaaagctttctgccggaaagcacacctcacagaacatcagagaactcacataggctggtcctggcgttgtacaatgaagaaagcctctcactgaagacttccctcaccattggatcaagctccttgggggcatatgatcaccagggcacacagtgtgcctgtgaaaatttggcacctacatttgtatcaaagtatgtcctgatccccttaggggatagctcattgtttttattcagatttccctaattagtggtgtgtgaacatcttatctgttgattggctatttgggttttttcttctgtgcattgactgttcatgtcctctgctcattgttttcaaatgggctgttcatctcttgctttttggtttaaatgttgttttttaacatatgagaatatataaaaatcctttttttttcagtcatatgtgttgcaaatatcttctcccagactgtcgttggttttttaaattttgccatctgttttcttctgctgaag

SEQ ID NO: 285980 - DNA, 1000 bp, Homo Sapiens; identical to SEQ ID NO: 221327

SEQ ID NO: 285981 - DNA, 1000 bp, Homo Sapiens; identical to SEQ ID NO: 116020

SEQ ID NO: 285982 - DNA, 1000 bp, Homo Sapiens; identical to SEQ ID NO: 221328

SEQ ID NO: 285983 - DNA, 1000 bp, Homo Sapiens
ctgtgggaaagccttcatttttcagtcttcccttaagaaacacatgagatctcatactggagagaagccttatgagtgtgatcactgtggaaaatcctttagccagagctctcatctgaatgtgcacaaaagaactcacactggagagaaaccctatgactgtaaggaatgtgggaaggctttcactgttccttcatcccttcagaaacatgtgagaacccacactggagagaaaccctatgaatgcagtgactgtggaaaagccttcattgatcagtcatcccttaagaaacacacacgctctcacactggagagaagccttatgagtgtaaccagtgtggaaagtccttcagcacaggctcttaccttattgtgcacaagagaactcacactggtgagaaaacctatgagtgtaaagaatgtgggaaggcctttaggaattcctcttgcctgagggtacacgtgagaactcacactggagagaagccttataaatgttttcagtgtgaaaaagcctttagcacaagcactaaccttataatgcacaagcgaatccacaatggccagaaactccatgaatgaaatgactcagggaagtgtttgttgcccctcatgcctcctttctcactttagaacatatattggagagaagccctgttatggtcacctggaaacagccttctggcccaactctggatgcctgttatactgggacaaaccttataaatgttatagctatgattgtttttatcagtgagtatttcattcttatatgtgtcacaactgtagatcctatgaatattttagttatcttttcagtttaattgcattgtgaacagaacacatggtcttcaatatgtagattctgtgtgacatagatttgaacataattgctggacactgactgatgtactgtggcagacagaactagttgctgtctcaatatccattcctcccttctttcttaaagtaataaaatttaccatttagttcaaaaaa

SEQ ID NO: 285984 - DNA, 1000 bp, Homo Sapiens; identical to SEQ ID NO: 116021

SEQ ID NO: 285985 - DNA, 1000 bp, Homo Sapiens; identical to SEQ ID NO: 221331

SEQ ID NO: 285986 - DNA, 1000 bp, Homo Sapiens
cagttgtgactctggggacaatgcagccagaagctgagggaccagcacttggtgccttggaaagtagagagcaacagacacatctccaaatgggcaaggagtctctagcatgcagcccaggccttctccatacccctctccccagcatcatgagcaagggcattgcctcctctctctgctcacttcagggcccagtgcactcacttcacagtgacagccctcccctacaatccttgggcagagcatgtggtctgagggcccacagtgaaagaacagcagtggtggcaactatgccttgccttctggagcctgtagggagttttccaggcaggtcctttgccaggacagcatggtcctgccctgttgtcccgtctgctctcctcttacccacccccatgctgtaaatacttgtcatcatggactccaacagggttagagggacaggcctaatcaactgaaactcctcggagatgccatctctgtctccctgggtgccagcagccctgctgccatgttcactggggtggcactggagagccatggcagtcgtgagatattgtatgtgtatgcacatgatcatgtgtgtatgtgcgtgcgtgcgtgtgtgtgtgtgtgtgtgtgtttctgcctcattcagtttctggggtcaaatcagctccttctctccaagtgcactaccctggagagtggtggccactcaataccttttcctctagctttcatgtcttgtttttgctttccccttcctcctccctctctccctttctttccttctctcctcctttatttgaggggggaagagtgctgtacaaagtcaaacaaacaagtttacagttgtaagtgcaatgacccgagtcctccacatgaccttgtgattgtgtgctgtccttctgtgctctgtgagaactcgtggtacttcagtgtccctccccctgtattgtgacaaggtaattctgtggtatcagaataaaaggacttgatataaacaaaaaaaaaaaaa

SEQ ID NO: 285987 - DNA, 1000 bp, Homo Sapiens
aaaatttggttacttgggtttggatacccttagtgggatgatgtaaatagaggctagctacctaggcttgtctatagcaaccataatgttgatgtaagtaatgcggttactgaatcataagaaaatgccatctctttttagttgaaggaaaactctggaagtaggtgccattggtcattctgcagtgcactgcaaccattgtttcccctagtgccctcttttccctagggcattgctctcctattcccacgccttaacacagctctatacctagaagcagccagcccaggcatgcagtcacatttaatcacatcccccttctagagtgcttcaaaatgatgtagtccctcaacttggctaaagaatctcaatctcttgaaatttatttttttaatgtcatattcatctggtaaatatctactgtttgccaggcatttaagaatatggcaaagaacataaaagatggtgtcaccagattttggtcaccaatgagtacccgacccgttgccatgattaagagagaatgctttctattggagtttcaggaaatataatttgagaatactttaaagggaagtggaagtataagtgaatgatatttttcttttacatgtaaacaatgaagttatttcaaagttaagttttaaacaaaatacatgaagtagtgtctgccatacatgttaatattctacattcttgcttccttaaattaatatgtttgtgtgtatatatgtgcctcacacctgaattgaaaattaaagactggtttaaaagtggtttaaaagtgacatttaatgtttctccattacgtttggggtaaccagcctaagtggaatcttggaaggaaagtaagggaaaaacttgtatttgccttcaatgaattaaaccagtgatatgtgttaacgtatgaatgaaaggattgatggtgattttataattatatatattgccgcagtaaccagttaataaattgatagctaccaaaaaaaaaaaaaaaaaa

SEQ ID NO: 285988 - DNA, 1000 bp, Homo Sapiens; identical to SEQ ID NO: 221333

SEQ ID NO: 285989 - DNA, 1000 bp, Homo Sapiens; identical to SEQ ID NO: 116022

SEQ ID NO: 285990 - DNA, 1000 bp, Homo Sapiens; identical to SEQ ID NO: 116023

SEQ ID NO: 285991 - DNA, 1000 bp, Homo Sapiens; identical to SEQ ID NO: 221334

SEQ ID NO: 285992 - DNA, 1000 bp, Homo Sapiens
ggaggttccgacctgtgctgaagctcactgaggatgaagagggaaatgccaaactgcagcagcgccagctcataacagtcacaatgtcaagtgacagtcgagtggttgatgacgaactggcaaccaggtttcttaaaagttttaaagcaaacctagagaatcctatccgacttgcctagtcctcaaagataagaagttggtgttcagcttagttgattcagtagttgttaccaagaaacatatgttataggaaaacaacttggtatttaagtatgaagtggatgaaatgtttatttatttaaggtgaaagcatttgacccagggtgtcttcatcttcaatttgggtttaatgttatagaaataaatgatgataaactctaactaataaaggaaagagaatatttggttactcagatccatttttaacctctggtgctgtataaagggaatattaaactagatgtaaatcaaagtatatgtttggctcatttgagcattttggaatatttgagaatgtatgatacatgtaaaattaaaaaaactattagaactgtaccataattatgttgaaggtagaagtgatcttcaaagagatggccattaacttagcagtgggacctcacttttacaagcactgctctagatatacttgaagaatttaataggtacagaagtttattctggataataaataaataaggatcacactgtattaggggttatggcaacattattgaattttttatgtacataaagccatatgtttagggtggtttctatctgtcttgtttttcacttatataacactgtgaacttctaaagcaagaggataaaagaagcatgaatgaaaagaatgacatttcaaaaaaatggttcaatgaaaaactatagctaaaatatgtaaacctttctaggtaaaccgcttgccttcatcttgagtcggaatatatttaaataaattgtgttatctcttgccaaaaaaaaaaaaaaaaaaaaaaaa

SEQ ID NO: 285993 - DNA, 1000 bp, Homo Sapiens; identical to SEQ ID NO: 221336

SEQ ID NO: 285994 - DNA, 1000 bp, Homo Sapiens
tcaggctgcatggacaaagcaggtagaggggcaccatcaggggctcttgcactattttcacctctaaatattacgtactcagtagtgccctgcttctagggctctgaatacgggcttaaagtcatcttgtcctgctggaatttgctgtgcagagccataagcctcccattttgttagcgtcagctaggccaataggaacagaccgggaccttgtctcacactgatgatacctcacatgttgaccggctatgtgaactgcctatttcctatgctggagttttgatttttaactaaacgcaaatctgtagattctctcctctcccatcccagaaaacaaaacaaaataatgcttttcgaaattgtttctaggactttaaaacataatggtatatccaaaattctttatttcagaatgcaacaatagattccattaatatagactcaagatcaaaacagcatacctgctaagctaagatagatggtgttgattccactgggttttgatcaatacaataacaaacctttttcctttgacatactctgaattttgttgtttggggggagggggtgtgtgtgtgtgtgtgtgtgtgtgtgtgtattgtgtgtgtgtgtgtgtgcacgcgcagtgtccatcagtatcagtgcctgcctgagttaggaaaattacattcctggttctgtattgaggagaaggatgtataaagcaacatgaaacattagccctccttttattttaaagactaatgttaattgttcttaaaactggattttttttccttaaagcaatttttttcttttcgatttaatgaagtattgctagctgaagccagtttgacatagagagatgtcagattgatttgaaaggtgtgcagcctgatttaaaaccaaaccctgaacccttttaaagaacaataaaacatattttacacgctcaaaaaaaaaaaaaaaaaaaaaaaaaaaaaaaaaaaaaaaaaaaaaaaaaaaaaaaaaaaaaaaaaaa

SEQ ID NO: 285995 - DNA, 1000 bp, Homo Sapiens; identical to SEQ ID NO: 116024

SEQ ID NO: 285996 - DNA, 1000 bp, Homo Sapiens
ctagtgggccgggctccacaagcgcagcagccgacccccctcctgaggactgtgtgaccaccattgtctccatgggcttctcccgggaccaggccttgaaagcgctgcgggccacgaacaatagtttagaacgggctgtggactggatcttcagtcacattgacgacctggatgctgaagctgccatggacatctcagagggccgctcagctgccgactccatctctgagtctgtgccagtgggacctaaagtccgggatggtcctggaaagtatcagctctttgccttcattagtcacatgggcacctctaccatgtgtggtcactacgtctgccacatcaagaaagaaggcagatgggtgatctacaatgaccagaaagtgtgtgcctccgagaagccgcccaaggacctgggctacatctacttctaccagagagtggccagctaagagcctgcctcaccccttaccaatgagggcaggggaagaccacctggcatgagggagaggggctgagggatggacttcagcccctctgctctgtaccctttttccttttgtccccggcagcagggaagaagctggaggccgtgggagaatggctgggcagagcagaggggcagcgatagactctggggatggagcaggacggggacgggaggggccggccacctgtctgtaaggagactttgttgcttcccctccccccggaatccacagtgctctgcttctctgtgtcgccccgcccagccccctggtgtggagggaggggtctcgtttgtgcgcgtgggtgtagctttgtgcatcctctcccagtggagcgatcacctgtgcctcccctccccctttgtttgcccctgtgtggttggtcaaggagggatgtgagggaaatagggaccccccgacttgccctcctgcctcagtctttcccccaccctgtctcttccttgtccttctctggaaatgccaaaatacacgatgtgaataaaagtacaacggct

SEQ ID NO: 285997 - DNA, 1000 bp, Homo Sapiens
ctatcccgtgggctacgaggccacgcgcatctattggagcctccgcaccaacaatcgtcgctgctgctatcgctgttctattggtgagaacaacgggcggccggagtttgtaatcaaagtcatcgagcagggcctggaggacctggtcttcactgacgcctctccccaggccgtgtggaatcgcatcattgagcctgtggctgccatgagaaaagaggctgacatgctgcgactcttccctgagtatctgaagggcgaggagctctttgggctgacggtgcatgccgtgcttcgcatagctgaatcactgcccggggtggagagctgtcaaaactatttattccgctatgggcgccacccccttatggagctgccactcatgatcaaccccactggctgtgcccgatcagagcctaaaatcctcacacactacaaacggccccataccctgaacagcaccagcatgtctaaggcatatcagagcaccttcacaggcgagaccaacaccccctacagcaagcagtttgtgcactccaagtcatctcagtaccggcggctgcgcaccgaatggaagaacaacgtgtacctggctcgctcccgtatccagggcctggggctctatgcagccaaggacctagaaaagcacacaatggttatcgagtacattggcaccatcattcggaacgaggtggccaaccggcgggagaaaatctacgaagagcagaatcgaggcatctacatgttccgaataaacaatgaacatgtgattgatgctacgttgaccggcggccctgccaggtacattaaccattcctgtgcccctaactgtgtggccgaagtcgtgacatttgacaaagaggacaaaatcatcatcatctccagccggcgaatccccaaaggagaggagctaacctatgactatcagtttgattttgaggacgatcagcacgagatcccctgccactgtggagcctggaattgtcggaaatggatgaactaa

SEQ ID NO: 285998 - DNA, 1000 bp, Homo Sapiens; identical to SEQ ID NO: 221337

SEQ ID NO: 285999 - DNA, 1000 bp, Homo Sapiens
cggccccgggtccaggagaagtgctccctggaggcacgcaccactgcttcccactggggccggcggggcccacgcacgacgtcagcctcttaccttcccgcctcggctaggggtcctcgggatgccgttctgttccaacctcctgctctgggacgtggacatgcctcaaggatacagggagccggcggcctctcgacggcacgcacttgcctgttggctgctgcggctgtgggcgagcatgggggctgccagcgtctgttgtggaaagtagctgctagtgaaatggctggggccgctggggtccgtcttcacactgcgcaggtctcttctgggcgtctgagctggggtgggagctcctccgcagaaggttggtggggggtccagtctgtgatccttggtgctgtgtgccccactccagcctggggaccccacttcagaaggtaggggccgtgtcccgcggtgctgactgaggcctgcttccccctccccctcctgctgtgctggaattccacagggaccagggccaccgcaggggactgtctcagaagacttgatttttccgtccctttttctccacactccactgacaaacgtccccagcggtttccacttgtgggcttcaggtgttttcaagcacaacccaccacaacaagcaagtgcattttcagtcgttgtgcttttttgttttgtgctaacgtcttactaatttaaagatgctgtcggcaccatgtttatttatttccagtggtcatgctcagccttgctgctctgcgtggcgcaggtgccatgcctgctccctgtctgtgtcccagccacgcagggccatccactgtgacgtcggccgaccaggctggacaccctctgccgagtaatgacgtgtgtggctgggaccttctttattctgtgttaatggctaacctgttacactgggctgggttgggtagggtgttctggcttttttgtggggtttttatttttaaagaaacactcaatcatccta

SEQ ID NO: 286000 - DNA, 1000 bp, Homo Sapiens; identical to SEQ ID NO: 116025

SEQ ID NO: 286001 - DNA, 1000 bp, Homo Sapiens
atgcatatgtagatacaaggatgcacatatacacattttcaaggactattttagatatctagacaatttcttctaataaagtcatttgtgaaagggtactacagcttattgacatcagtaaggtagcattcattacctgtttattctctgctgcatcttacagaagagtaaactggtgagagtatatattttatatatatatatatatatatatatataatatgtatatatatatatattgacttgttacatgaagatgttaaaatcggtttttaaaggtgatgtaaatagtgatttccttaatgaaaaatacatattttgtattgttctaatgcaacagaaaagccttttaatctctttggttcctgtatattccatgtataagtgtaaatataatcagacaggtttaaaagttgtgcatgtatgtatacagttgcaagtctggacaaatgtatagaataaaccttttatttaagttgtgattacctgctgcatgaaaagtgcatgggggaccctgtgcatctgtgcatttggcaaaatgtcttaacaaatcagatcagatgttcatcctaacatgacagtattccatttctggacatgacgtctgtggtttaagctttgtgaaagaatgtgctttgattcgaagggtcttaaagaatttttttaatcgtcaaccacttttaaacataaagaattcacacaactactttcatgaattttttaatcccattgcaaacattattccaagagtatcccagtattagcaatactggaatataggcacattaccattcatagtaagaattctggtgtttacacaaccaaatttgatgcgatctgctcagtaatataatttgccatttttattagaaatttaatttcttcatgtgatgtcatgaaactgtacatactgcagtgtgaatttttttgttttgttttttaatcttttagtgtttacttcctgcagtgaatttgaataaatgagaaaaaatgcattgtc

SEQ ID NO: 286002 - DNA, 1000 bp, Homo Sapiens
tttgaagaacacaagcaaaagacagacgtgcattatcgttccctgggaggtgaaggcaacttcaactggaggttcattttccccttcgactacctgccagctgagcaagtctgtaccattgccaagaaggatgccttctggaggctggacaagactgagagcaaaatcccagcacgagtggtgttccagatctgggacaatgacaagttctcctttgatgattttctgggctccctgcagctcgatctcaaccgcatgcccaagccagccaagacagccaagaagtgctccttggaccagctggatgatgctttccacccagaatggtttgtgtccctttttgagcagaaaacagtgaagggctggtggccctgtgtagcagaagagggtgagaagaaaatactggcgggcaagctggaaatgaccttggagattgtagcagagagtgagcatgaggagcggcctgctggccagggccgggatgagcccaacatgaaccctaagcttgaggacccaaggcgccccgacacctccttcctgtggtttacctccccatacaagaccatgaagttcatcctgtggcggcgtttccggtgggccatcatcctcttcatcatcctcttcatcctgctgctgttcctggccatcttcatctacgccttcccgaactatgctgccatgaagctggtgaagcccttcagctgaggactctcctgccctgtagaaggggccgtggggtcccctccagcatgggactggcctgcctcctccgcccagctcggcgagctcctccagacctcctaggcctgattgtcctgccagggtgggcagacagacagatggaccggcccacactcccagagttgctaacatggagctctgagatcaccccacttccatcatttccttctcccccaacccaacgcttttttggatcagctcagacatatttcagtataaaacagttggaaccacaaaaaaaaaaaaaaaaaaaaaaaaa

SEQ ID NO: 286003 - DNA, 370 bp, Homo Sapiens
atgtcaggacgcggcaaaggaggtaagggcctggggaaagggggtgccaagcgccaccgcaaggtgctgcgcgacaacatccagggtatcaccaagccagccattcggcgccttgctcgccgcggcggcgtgaagcgcatttctggcctcatctatgaggagacccgcggagtgttgaaggtgttcctggagaacgtgatccgggacgccgtgacctacacggagcacgccaagcgcaagacggtcaccgccatggacgtggtctacgcgctcaagcgccagggccgcaccctctatggcttcggcggctaaatggcattttgaagcccagtcattctctaaaaaggccctttttagggcccctaagctt

SEQ ID NO: 286004 - DNA, 1000 bp, Homo Sapiens; identical to SEQ ID NO: 116026

SEQ ID NO: 286005 - DNA, 1000 bp, Homo Sapiens
ggccatgatgtcagaattctgcacccagggagctgagatgtgccgcagggcctgtggcggacatggctactcaaagctgagtggcctgccatcactggtcaccaaattgtcggcctcctgtacctacgagggtgagaacacagtgctctacctgcaggtggccaggttcctggtgaagagctacctgcagactcagatgtcccctggctccacgccacagagatctctctctccatctgtcgcatatctcaccgcacctgacctggccaggtgtccagcccagagggcagccgacttcctctgcccggagctctacaccacggcctgggcacatgtggcagtaaggctcataaaggactcagtgcagcatttacagaccctgacgcaatccggagctgaccagcacgaggcttggaaccagaccactgtcatacacctccaggctgctaaggtgcactgctactatgtcactgtgaagggttttacagaagctctggagaaactagaaaatgaaccagcgattcagcaggtgctcaagcgcctctgtgacctccatgccatacatggaatcttgactaactcgggtgactttctccatgacgccttcctgtctggtgcccaagtggacatggcaagaacagcctacctggacctgctccgcctgatccggaaggatgccatcctgttaactgatgcttttgacttcaccgatcagtgtttaaattcagcacttggctgttatgatggaaacgtctacgaacgcctgttccagtgggctcagaagtcaccaaccaatactcaggagaaccctgcctatgaggaatatataagaccacttttacaaagttggagatccaagctatgaaataaccaacagtattcaagaagcaaccagcaccatcatgtgataatggtactatggcatatatgcaacattaaaattttaaattagaaaaaaaaaaaaaaaaaaaaaaaaaaaaaaaaaaaaaaaaaaaaaaaa

SEQ ID NO: 286006 - DNA, 1000 bp, Homo Sapiens
catacgaaggtgacaacaacatcctgctgcagcagacaagcaactatttgctgggtctcctggcacaccaggtccacgatggagcttgcttccgcagtccgctgaagtcagtggactttctggacgcctatcccggcatccttgaccagaagtttgaggtctccagtgttgccgactgcttggactctgcagtcgccctggcagcatacaagtggctggtttgctacctgctccgagagacttatcaaaaattaaaccaagagaaaagatcaggaagcagtgactttgaagcaaggaacaaatgccaggtgtcccacggccgtccgttggcgctggccttcgtggagctcacggtggtccagaggttccacgagcacgtgcaccagccttccgtgccgccctcgctgcgggccgtgctggggcggctcagtgctctgtacgccctgtggtccctgaagcgccacgcggccctgctctaccgaggaggatacttctccggtgagcaggcgggagaagtgttggagagcgccgtcctggctttgtgttcccagctgaaagacgatgcagttgccctggtagacgtgatcgctcctcctgactttgttctggactcaccgattggcagagccgacggcgagctctacaaaaacctctggggcgctgtcctgcaggaaagcaaggtgttggagcgggcatcctggtggccagagttttctgtgaacaaacctgtcataggaagtctgaaatcgaagctctagtgggactggcacattcagccaagtctaatgaaacgaagggaactaatcagacgtggacctcaacttctgattccagaacacgccggagattgctgctgctttctgagcccgcacctgtgcgcctaaactgctgattggcctcaacttgcccaggcggacgggagggaggcacccggccggctggacctaatctgggatcgcggtgatttgcaccgtggaaaagaaattgcagattgatcatg

SEQ ID NO: 286007 - DNA, 1000 bp, Homo Sapiens
acagatgtgatgaggattaaatgaatcaaaagacttaatttgtagattcttttagagttatgagctaggtatagtttggggaaactcaacctggtgctggtgctcttaacaattttgtaaataaagaagataatttccttttctagaggtacatattaggccttttatgaacactaaaacaatgaggaaatgttggtcatggggcaaagtatcacttaaaattgaattcatccatttttaaaaaacacttcatgaaagcattctggtgtgaattgccatttttttcttactggcttctcaattttcttccttctctgcccctacctaaaacattctcctcggaaattacatggtgctgaccacaaagtttctggatgttttattaaatattgtacgtgtttacagttgggaatttaaaataatacatacactggttgataaagggaagctgcaggaccaaggtgaagattgatagtccaaatgcttttcttttttgagttgtatattttttcacaccatcttagatataattaggtagctgctgaaaggaaaagtgaatacagaattgacggtattattggagatttttcctctgcgtagagccatccagatctctgtatcctgttttgactaagtcttaggtgggttgggaagacagataatgaagtaggcaaagagaaaaggacccaagatagaggtttatattcagaaatggtatatatcaatgacagcatatcaaacttcctatgggaaaaagtctggtgggtggtcagctgacagatttcccatttagtagtcatagaatacagaaatagtttagggacatgtattcattttgttattttgagcattgataggtcagtatatctacctaatctgtttggtaagtataggatatataaaccattaccattgatctgtcttatgccataatcttaaaaaaaaattgaatgctcttgaatttgtatattcaataaagttatccttttataaaaaaaaa

SEQ ID NO: 286008 - DNA, 1000 bp, Homo Sapiens
acagcctgtgcaacaccagctataccgcagccaggttcaagctgtggtctgtgcatggacagaagcggctccaggagttccttgcagacatgggtcttcccctgaagcaggtgaagcagaagttccaggccatggacatctccttgaaggagaatttgcgggaaatgattgaagagtctgcaaataaatttgggatgaaggacatgcgcgtgcagactttcagcattcattttgggttcaagcacaagtttctggccagcgacgtggtctttgccaccatgtctttgatggagagccccgagaaggatggctcagggacagatcacttcatccaggctctggacagcctctccaggagtaacctggacaagctgtaccatggcctggaactcgccaagaagcagctgcgagccacccagcagaccattgccagctgcctttgcaccaacctcgtcatctcccaggggcctttcctgtactgctctctcatggagggcactccagatgtcatgctgttctctaggccggcatccctaagcctgctcagcaaacacctgctcaagtcctttgtgtgttcgacaaagaaccggcgctgcaaactgctgcccctggtgatggctgcccccctgagcatggagcatggcacagtgaccgtggtgggcatccccccagagaccgacagctcggacaggaagaacttttttgggagggcgtttgagaaggcagcggaaagcaccagctcccggatgctgcacaaccattttgacctctcagtaattgagctgaaagctgaggatcggagcaagtttctggacgcacttatttccctcctgtcctaggaatttgattcttccagaatgaccttcttatttatgtaactggctttcatttagattgtaagttatggacatgatttgagatgtagaagccattttttattaaataaaatgcttattttaggctccgtccccaaaaaaaaaaaaaaaaaaaaaaaaaaaaa

SEQ ID NO: 286009 - DNA, 1000 bp, Homo Sapiens
atcttatccttgtatctttttatacatatttgaaaataagcttatatgtatttgaacttttttgaaatcctattcaagtatttttatcatgctattgtgatattttagcactttggtagcttttacactgaatttctaagaaaattgtaaaatagtcttcttttatactgtaaaaaaagatataccaaaaagtcttataataggaatttaactttaaaaacccacttattgataccttaccatctaaaatgtgtgatttttatagtctcgttttaggaatttcacagatctaaattatgtaactgaaataaggtgcttactcaaagagtgtccactattgattgtattatgctgctcactgatccttctgcatatttaaaataaaatgtcctaaagggttagtagacaaaatgttagtcttttgtatattaggccaagtgcaattgacttcccttttttaatgtttcatgaccacccattgattgtattataaccacttacagttgcttatattttttgttttaacttttgttttttaacatttagaatattacattttgtattatacagtacctttctcagacattttgtagaattcatttcggcagctcactaggattttgctgaacattaaaaagtgtgatagcgatattagtgccaatcaaatggaaaaaaggtagtcttaataaacaagacacaacgtttttatacaacatactttaaaatattaaggagttttcttaattttgtttcctattaagtattattctttgggcaagattttctgatgcttttgattttctctcaatttagcatttgcttttggtttttttctctatttagcattctgttaaggcacaaaaactatgtactgtatgggaaatgttgtaaatattaccttttccacattttaaacagacaactttgaatacaaaaactttgttttgtgtgatcttttcattaataaaattatctttgtataagaaaaaaaaaaaaaaaa

SEQ ID NO: 286010 - DNA, 438 bp, Homo Sapiens; identical to SEQ ID NO: 116028

SEQ ID NO: 286011 - DNA, 374 bp, Homo Sapiens
atgtctggccgtggtaaaggtggaaaaggtttgggtaagggaggagctaagcgtcatcgcaaggttttgcgcgataacatccagggcatcactaagccagctatccggcgccttgctcgtcgcggcggtgtcaagcgaatttctggccttatctatgaggagactcgtggtgttctgaaggtgttcctggagaacgtgattcgtgacgctgtcacttacacagagcacgccaaacgcaagaccgtgacagcaatggatgtggtctacgcgctgaagcgacagggacgcactctttacggcttcggtggctaaggctcctgcttgctgcactcttattttcattttcaaccaaaggcccttttcagggccgccca

SEQ ID NO: 286012 - DNA, 1000 bp, Homo Sapiens
acccttgcccgcaacactcaactgcattggctctgggccgcctccagtgccctcttccccagcatctacctcccacccaggctgccacctgcccaccaccaggcctttgtccgacatcgcctggaggaggccttccgtgtggcccttgttgggcaccgacatcccctgcctgtcctggcctatgtccgcctcacacaccggagatctgggaggttcctgtcccaggatgaccttgtgcagtccattggtgtgagtgcagcactaggggcagccggcgtggtgctctggggggacctgagcctctccagctctgaggaggagtgctggcatctccatgactacctggtggacaccttgggcccctatgtgatcaatgtgaccagggcagcgatggcctgcagtcaccagcggtgccatggccacgggcgctgtgcccggcgagatccaggacagatggaagcctttctacacctgtggccagacggcagccttggagattggaagtccttcagctgccactgttactggggctgggctggccccacctgccaggagcccaggcctgggcctaaagaagcagtataaagccagggcccctgccactgcctcttcttttccctgctgccacttttccagtcctggaactactctgtcccactcttgctctattcagtttacagtcaaccctcccaagcacacaccccgcttcccttggaatccctgaggggtagaaggggccagaaaaaacgcttataaaaccagaggccctctgagatcatgtgagtcctccatggcaaggaagcagttccagggagagtcaggttccagctagttagggctgccagcctagggctttgtgcctacacctcactaagcccatggagaggtcacagatgggccgtgcacgggcagatgggccccaaaaaatcttggcgaaggtcggtaaagtgctaagctgttgtctgcactctttcatcataaagtcacttttttccactgc

SEQ ID NO: 286013 - DNA, 1000 bp, Homo Sapiens
aacttttatgtggaaaagtatggaaaaatgtttttccccaacttaacagcttacatgagttctggaccacttgtcgccatgatattagctagacataaagccatctcttattggttagaacttttgggaccaaataatagcttagtagcgaaggagacacatccagacagtctgagggcaatttatggcacagatgacctaaggaatgcacttcatgggagtaatgactttgctgctgcggaaagagaaatacgttttatgtttcctgaagtgattgttgagcccattccaattggacaagctgctaaggactatttaaatttacatataatgccaactctgcttgaaggactcacagagctttgtaagcaaaaaccagcagatcctttgatttggctagctgattggctgctgaaaaataatcctaacaaacccaaactttgtcaccatccaattgtagaagaaccttattaaaaaaaaaatcctcgaaagaacaaatcatgaactatcttattataaaaggctgtacttctactgtttgaaaaaattatttctagggtttaagtaactacaagtaaaataaatttatttcttaaaaataagtgttaaaggaataactattctatgaagcagataacattaaggtaaaatataggcttagagtatgattttaacaatgatgtaacactaggtaatggaaaactcatgtaagatgttgctagatgtttttgtttttcttaagtttgagaagtaagacataaagtttagttatacattttcccaagcacatatcctatatctaaatacataattaatgcacagttgagacagtctagtttaaaaggcttaggtccttttgtagtccataagcatggtgatttggtttcatgctcatgtgtcagatatgcttccctcaaaccttgttacagcatcatcacattacctgtttgatgtaaaaaataaaaaatagaaaggtgtaagtaaaaaaaaaaaaaaaaaa

SEQ ID NO: 286014 - DNA, 1000 bp, Homo Sapiens
gtagtgattgctctgccagaagcagctcctctttaaactcctcctctcttgatgaatttcttaaggctgaaggaatgaagagagtgggacatggggtaatctttatcccttttgttaaaacaggaggcagccatgggctgggagatcatagcccttcctaggcagaatcctgttcactgccaggctatagtaattattactattttgcaatttgaaatatattctggttgtttttctaaatgtgaagacttaccaaatgaattttagatcattctccagaggagattttttttgctcttctcatcttttccaacagtgttctcctgtttgtggagctaaggtaaagaggggacacttctgtctgtttaacagacagtccatatctgtgaggccagcaaatattttcttaaactcatggggagacagcagattcttgccttggtgaggtcattgctgtgccatatgtcctacccccctgtcttcatgcagggaagttggaaatgggggctacatatgccctctcctccccgtctacaagagttgtggttttccatctgatccttccactcttgtcaggggaagaagggggcctggtatctcaggcagattgttgaattcctgttctatcccttctctatcccaccctgccttgataatatgttagcccataccccaaataactgtctatattagacacccccagccagtttctggctgcctgtctttgctgccatgttttttacaagaaggaaagaattcttgctatttttttttcataatttactatttatgatgtatttaagtgttttattaaggacagagttctgttaggggtgggagggaatatttgagggagggctgggtcttagggaaaggaatggggaagcaacatttttattaagtgttactatttgcctctactttgtattgttcagaaatggcaaatacaatataaaagtgatatatggttttaatgtaataaactttaatgagttattta

SEQ ID NO: 286015 - DNA, 1000 bp, Homo Sapiens
ttacaggcgtgagtcaccgcgcccggccaaataaaataaaatgttaaagcaaattcaggactacccctcctccaagtcttctgttccctttgggcgcccaggtgagcgggggaggggctgggggagtaataacatcaaaagagcgccttttcctcccttattccgaggagacttccctgggcctgactcccggtcctgtccccagcgccccgcggcctctggagccccttcagtgaccaagatacagagatcaggacgcctttgcgccgccccaggtgcccgcccctagctggctctgcttgggccgcgagggaaggtgaggtcgggggcggagccggggcgtgacagccggggtgtgtgtccgccgggcttggtgcctccggtggccctgcagcaccgtcccacctctgccaccctccgatggggccgctacctgtgtgcctgccaatcatgctgctcctgctactgccgtcgctgctgctgctgctgcttctacctggccccgggtccggcgaggcctccaggatattacgtgtgcaccggcgtgggatcctggaactggcaggaactgtgggttgtgttggtccccgaacccccatcgcctatatgaaatatggttgcttttgtggcttgggaggccatggccagccccgcgatgccattgactggtgctgccatggccacgactgttgttacactcgagctgaggaggccggctgcagccccaagacagagcgctactcctggcagtgcgtcaatcagagcgtcctgtgcggaccggcagagaacaaatgccaagaactgttgtgcaagtgtgaccaggagattgctaactgcttagcccaaactgagtacaacttaaagtacctcttctacccccagttcctatgtgagccggactcgcccaagtgtgactgactaccttgacttgaaatgctcttttgcacaaggaaataaagcgtcctctcagtaatgaaaaaaaaaaaaaaaaaaaaaaaaa

SEQ ID NO: 286016 - DNA, 1000 bp, Homo Sapiens; identical to SEQ ID NO: 116031

SEQ ID NO: 286017 - DNA, 1000 bp, Homo Sapiens; identical to SEQ ID NO: 116032

SEQ ID NO: 286018 - DNA, 1000 bp, Homo Sapiens; identical to SEQ ID NO: 221341

SEQ ID NO: 286019 - DNA, 1000 bp, Homo Sapiens
tcagctctcatgaaagccctggaaatgccacagatcacaaggttagaaaagacgtggactgctctgcggcaccagtacacccaaactgccattctctatgagaaacagctgaagcccttcagcaaactcctgcatgaaggcagagagtccacatgtgttcccccaaacaatgtatcagtcccactgctgatgccgcttgtgacgttaatggagcgccaggctgtgacttttgaaggaaccgacatgtgggaaaaaaacgaccagagctgtgaaatcatgctgaaccatttggcaacagcgcgattcatggccgaggctgcagacagctaccggatgaatgctgagaggatcctggcaggttttcaaccagatgaagaaatgaatgaaatctgcaagactgaatttcaaatgcgattgctatggggcagcaaaggtgcacaagtcaatcagacagagagatatgagaaattcaaccagattttaactgccctctcgcgtaaattggaacctcctcctgtaaagcaggcagagctttgataactctccagagaacctttagaatatcttttcaagtttccccagcttcatctttgggaaagcttactgtttttgataaagtaataatgtgcaaatctgacaatatacaagcttttagtatccacaggatattaaacgtgtaaattgcacagagcacacttatttatgaattgtctaaagttactactgattttaaaatgaataatttattattaaggtaactactgctaatgttgatcagcaaatttaagagaagacctagctatgttggctggttgctttctattatcatggtatttgaccattttagttttaattccatgtcagataagtgtaaatagaagagtttaaaagcatgaaacatttcagaaggtatcagttatatgatattctttaaacaaatatgaaaaatgtaaatactcatgaatgaaaatacatctttttgtgaaaaaaaaaaaaaaaa

SEQ ID NO: 286020 - DNA, 1000 bp, Homo Sapiens; identical to SEQ ID NO: 221342

SEQ ID NO: 286021 - DNA, 1000 bp, Homo Sapiens; identical to SEQ ID NO: 116034

SEQ ID NO: 286022 - DNA, 1000 bp, Homo Sapiens; identical to SEQ ID NO: 221343

SEQ ID NO: 286023 - DNA, 1000 bp, Homo Sapiens; identical to SEQ ID NO: 116036

SEQ ID NO: 286024 - DNA, 1000 bp, Homo Sapiens
acaggactggctacctcatttgcagatatttgattgatgtagaaggcgtgaggccagatgatgcaattgaattattcaataggtgccggggacattgcttagaaagacaaaactacattgaagaccttcagaatggtcctatcagaaagaattggaattccagtgtacccaggtcaagtgattttgaagactcagcacatctcatgcaaccagtccacaataagcctgttaaacaaggacctaggtataatctacatcagatccagggtcactcagctcctcgacatttccacacccagacccaaagtttgcaacaatcagtcagaaaattttcagagaatccacatgtttaccagagacaccatctccctcctcctggtccccctggagaggactattcacacaggaggtattcttggaatgtgaagcccaatgccagtcgggcagcccaggatagaagaaggtggtatccttataattactccagactctcctatccagcctgttgggaatggacccagtgatacaaacctgtcctggaattctacctggagaccagagctggcctgaaaattactggtgtgacttttaattagttcaggtctaatcaggtttctttattgttcccttatgtattcaagcttaaggaaaaattgcattgctgtttacctctttgctgataaatttgcagtaattacagcattgcaggaaaaacaatctgttattccagtcttaaatttttctaaaagaagacaatattttagaactgaagcattgagaacttcccttgcaaattatttttaaaattctatcttgtttttctatgtatttctttctgactagacttgtgatatgcgtgtgtttatgtacagaaatttttagtgtttttgttatgttctgttattgacccaaaggccatctttattttctataactgttcaaaatttatattaaaatctacttaggagataatttctttagaaaaaaaaaaaaaaaaaaa

SEQ ID NO: 286025 - DNA, 1000 bp, Homo Sapiens
ctggccgccatggacgccaacggctactcggacccctacgtgaaaacatacctgaggccagatgtggacaagaaatccaaacataagacagcggtgaagaaaaaaaccctgaacccggagtttaatgaggagttctgttacgagatcaagcatggggacctggccaagaagtccctggaggtcaccgtttgggattacgacattggaaaatccaacgatttcattggtggtgtggttctgggcatccacgccaagggggagcgcctgaagcactggtttgactgcctgaagaacaaggacaagcgcatcgagcgctggcacacgctcaccagcgagctcccaggggctgtgctcagcgactgacgcccacccgccactgctacccctgccgccacctgcgcccagcacggccggccccgggcttccccagcagccaccaaggcctgtggcccccacactgggggagatccagaacccctgcttggacacagagccactgcagtccccgctcggaggatgtggagggctcagccactctgggacggggagggcaaggagctggggtggggggctctcagctctctggggcccaagaggccggtggtggaaagagacctcagcacctgcccaggggaaggggacacgcccatctgggagcaaagacccttctagagggccagccccggctgagaggacaggagtgtgggggcgccttggcggacagtgggaacagaggagggaggtggtgagcagacagacaggtggaggatgggaccttgaagactggctgctccagcccaagaaagcctaactgcatccctcatctccttcgctgctggacagatggaagaagcgggcctgccggccgaaagtctgccagagttcccggaggctcctgatgatgggtaaattggcacatgcttcactcaatgattccacaagccctgggggtgaatgagacacagggcctgccctcagggagttcccatctagtcagccg

SEQ ID NO: 286026 - DNA, 1000 bp, Homo Sapiens
aaaaatcaatgctgtccaaacttaaacatgaatgcggagctgctttcaccagcaaacttgaaggaatgtttaaagacatggaactttctaaagacatcatgattcagttcaaacagtatatgcagaatcagaatgttccgggaaatattgagttaactgtgaatatcctgacaatgggctattggccgacatatgtgcctatggaagttcatttaccaccagagatggtaaaacttcaggagattttcaagacattttacctaggcaaacatagtggcaggaaacttcagtggcagtcaaccataggacactgtgtgttaaaagcagaatttaaagagggtaaaaaggaactccaggtctctctttttcaaacactggtgctgctaatgtttaatgagggagaggagttcagtttagaagagatcaagcaggcaactggaatagaggatggagagttaaggagaacactgcagtcattagcctgtggcaaagctagagttctggcgaaaaatccaaagggcaaagacattgaagatggtgacaagttcatttgtaatgatgatttcaaacataaacttttcaggataaagatcaatcaaatccagatgaaagaaacggttgaagaacaagcaagcactacagaaagagtatttcaagacagacagtatcaaattgatgctgcaattgttcgaattatgaagatgagaaagacacttagccacaatctccttgtttcagaagtgtacaaccagttgaaatttccagtaaagcctgctgatcttaagaagagaatagaatctttaattgaccgggactacatggaaagagataaagaaaatccaaaccagtacaactatattgcatagaatgttggccttgcagcatttggtgtcatatgcagtagccagtggataaactaacctgttgattcaatattatttgactccttttttactaccgatgaccaaatgaagcagtgtaattaaaaaaaaaaaaaaaa

SEQ ID NO: 286027 - DNA, 1000 bp, Homo Sapiens; identical to SEQ ID NO: 221348

SEQ ID NO: 286028 - DNA, 1000 bp, Homo Sapiens
ccgacagcactcaaattaaaatggacattttggcgcaagttttacagattttattaaagtcgaagctattggtcttggaagatgaaaatgcaaatgttgatgaggtggaattgaagccagataccttaataaaattatatcttggttataaaaataagaaattaagggttaacatcaatgtgccaatgaaaaccgaacagaagcaggaacaagaaaccacacacaaaaacatcgaggaagaccgcaaactactgattcaggcggccatcgtgagaatcatgaagatgaggaaggttctgaaacaccagcagttacttggcgaggtcctcactcagctgtcctccaggttcaaacctcgagtccctgtgatcaagaaatgcattgacattctaattgagaaagaatatttggagcgagtggatggtgaaaaggacacctacagttacttggcttaacccttctggaagggtctgactgtgtgacccgcagcaaatagttcatgttggaaagaatgaaaacaactcaagttcatagcagccagcctgccgccattggacctcccttttaaaaactgagaccaagactcccatcagctggtctcggatttacatcggaactgctcaggattgatacatttcaagtctgtaaatacggacaccaacgccatttaccctaatttaagaacagcggggactgaccctccgtgccgagggctgcatgctaccgcactaagtcaatacatgggctccccgattcgcagctgtcgtcttggcagcacttgtcacgttggcagcactttgagagcaagtctgagtggacccacatgtaacctgctatgaaaaccatttgtatagtgtgtttcattttttaatgtgtgaaaataaagaaaattaaaggatttctgtacaagtcgcattgggttttgttttaagttttactaatttctatatgtaaataaaagatataatgattgtgcaaatttaaaaaaaaaaaaaaaaaa

SEQ ID NO: 286029 - DNA, 1000 bp, Homo Sapiens; identical to SEQ ID NO: 221349

SEQ ID NO: 286030 - DNA, 1000 bp, Homo Sapiens; identical to SEQ ID NO: 284357

SEQ ID NO: 286031 - DNA, 1000 bp, Homo Sapiens
tggttcactatgaacaacttgtcttacatcctgaacggtggatgagaacactcttaaagttcctccagattccatggaaccactcagtattgcaccatgaagagatgattgggaaagctgggggagtgtctctgtcaaaagtggagagatctacagaccaagtaatcaagccagtcaatgtaggagctctatcaaaatgggttgggaagataccgccagatgttttacaagacatggcagtgattgctcctatgcttgccaagcttggatatgacccatatgccaacccacctaactacggaaaacctgatcccaaaattattgaaaacactcgaagggtctataagggagaattccaactacctgactttcttaaagaaaaaccacagactgagcaagtggagtagcagaaccaggagcctcttccatacatgaggaaagattgctgccttttcagcagaagggaaattcctaggattggctgtcccctgccaagcttggtggagcgtctgcaccttggctgcgccgcctgtgcatttgccagtttcctcccactgagaggatggaggtgtccgcacagctttgggcctcgtgagggatctgcctcctgagcaaagagctcttgatcccgatttcatgcacagccctgcagtaaggagcccagaaggaacatgtgtttcctgttaaaactcctcttgttctcttttcttacattatgacgtttgttttcaaggagagggtttaaaaatgggatcctgtaagcagacttgggcagtctccttttgaaataggttgtctgtacatgttctaatgttttgtagaacacgtgtgcctgtttaagtgtattgatgtgaataatattaaatatcctaattatttaattcattgtattgtttctgagaagttgggaaattaccattatacatttacaacctaatgacttttgtattttatttttcaaaataaaagctttcaatgtgaagcaaaaaaaaaaaaaaaa

SEQ ID NO: 286032 - DNA, 1000 bp, Homo Sapiens
catacagaatgttgcactaatttggtagcctgggaattttttttattgtgcagtatgtatttaaattttgtctatgttaattaccagcatttacctttatttaaatgatggtaaggtggaatattgaataaaattaggttttgtgttttgttctttgtagtctgataaaatctccacctggtcattcattgtgtgtgacttgatacctgttaacttgccccttagtatcagctgttacttgacacaaatgtgtgtgttattcagaggttttcagtctggacactccataggtgagtgtcgtgtcttcgtgagacagcacagttgtctcatgttgtgcatagttcatgtttcctcaccacccagtcctttctcctgctcatcaaaatcagcatacacatttttgactgtacacactataaatggcatcaaatttggatatttttcttaattatgacatgcaaagtaatgtgagtcctgccagtattctggtggataaggtcttttgagtatttggttgcttgtcacaacattctccaagcagtgatatttctaaagaggagatacatgttgaaaacggttttaatttacacttccatttcctgattacatttggaaatactttgtgtaaaccatcccccttccacctccatttgtctgttgaaagattttaagttggaaacagttcctgtctgaaaactcttctgagaaccacaaaccttgtgtatggattcggcatggagccctcagctggcggctctgggtgctgacggccgctggagaggtgggctcccctcgtgcactttattgcctgggcagttttgcttgatcttttgtgactttgagccttttaagtagtttgaatgataagacttaaaatgtttcataattatgttttatgtaacagactttgacattatttaaacgagcatgtgtaatgtaacttttctctttgaatcatataaaacttgattttacattgaaaaaaaaaaaaaaaaaaaaa

SEQ ID NO: 286033 - DNA, 1000 bp, Homo Sapiens; identical to SEQ ID NO: 221350

SEQ ID NO: 286034 - DNA, 1000 bp, Homo Sapiens; identical to SEQ ID NO: 116041

SEQ ID NO: 286035 - DNA, 1000 bp, Homo Sapiens; identical to SEQ ID NO: 221351

SEQ ID NO: 286036 - DNA, 1000 bp, Homo Sapiens; identical to SEQ ID NO: 116043

SEQ ID NO: 286037 - DNA, 1000 bp, Homo Sapiens; identical to SEQ ID NO: 222313

SEQ ID NO: 286038 - DNA, 1000 bp, Homo Sapiens
gcagccagcagtggggatgacagtgggagagatagagaacccccagtgcagaggaagagtgaggacaggacccagcttaagggtgggaagaggttgagtggaagcagcgaggacgaggaagacagtgggaagggggaacccacagctaaaggctctagaaagatggccagactgggcagcaccagtggtgaggaaagtgacttggagagggaggtaagtgacagcgaggcagggggaggcccccagggggagaggaagaaccgctcttccaagaagagctccaggaaaggcaggacacgaagctcctcttcctcctcagatggaagtccagaggccaaaggagggaaggctggctcaggtcgccgtggagaggaccacccggctgtgatgaggctgaagcgctacattcgggcctgtggtgcccatcgaaactacaagaagctgttgggctcctgttgctcacacaaggagcgcctgagtatcctccgggcagaactggaagcgctaggcatgaagggtaccccttccctagggaagtgtcgggccctgaaggagcagagggaggaggcagctgaggtggcctccttggatgttgcgaacatcatcagtggctcgggccggccacgcagacgtacagcctggaaccctttaggagaagcagcacccccaggggagctgtaccgacggaccctggactcagatgaagagcggccccgtcccgcacccccagactggtcacatatgcgtggcatcatcagcagtgatggcgagagtaactgagctctgccacccccaggagggacccttgatacatgtacaaagcatacatagcaccccttgccctgtgtctgtggaacagaagcagcttccttcagagaagactgcagctcccaaggacacaagctgttgggatgctacttctcagcttcacgctgtccctttaaggtgtttattttttaagactcaataaaggagtgtttttaatcacctcaaaaaaaaa

SEQ ID NO: 286039 - DNA, 1000 bp, Homo Sapiens; identical to SEQ ID NO: 116044

SEQ ID NO: 286040 - DNA, 1000 bp, Homo Sapiens; identical to SEQ ID NO: 116045

SEQ ID NO: 286041 - DNA, 1000 bp, Homo Sapiens
gccccactgcagaaggtttccctggccccaaactctcgctactacctgagctgccccatggaatcccgccacgccacctactcatggcgccacaaggagaacgtggagcagagctgcgaacctggtcaccagagccccaactgcatcctgttcatcgagaacctcacggcgcagcagtacggccactacttctgcgaggcccaggagggctcctacttccgcgaggctcagcactggcagctgctgcccgaggacggcatcatggccgagcacctgctgggtcatgcctgtgccctggccgcctccctctggctgggggtgctgcccacactcactcttggcttgctggtccactagggcctcccgaggctgggcatgcctcaggcttctgcagcccagggcactagaacgtctcacactcagagccggctggcccgggagctccttgcctgccacttcttccaggggacagaataacccagtggaggatgccaggcctggagacgtccagccgcaggcggctgctgggccccaggtgcgcacggatggtgaggggctgagaatgagggcaccgactgtgaagctggggcatcgatgacccaagactttatcttctggaaaatatttttcagactccctcaaacttgactaaatgcagcgatgctcccagcccaagagcccatgggtcggggagtgggtttggataggagagctgggactccatctcgaccctggggctgaggcctgagtccttctggactcttggtacccacattgcctccttcccctccctctctcatggctgggtggctggtgttcctgaagacccagggctaccctctgtccagccctgtcctctgcagctccctctctggtcctgggtcccacaggacagccgccttgcatgtttattgaaggatgtttgctttccggacggaaggacggaaaaagctctatttttatgttaggcttatttcatgtatagctacttccgactgcc

SEQ ID NO: 286042 - DNA, 1000 bp, Homo Sapiens; identical to SEQ ID NO: 221353

SEQ ID NO: 286043 - DNA, 1000 bp, Homo Sapiens
ttcaaaattctgttgaaagaaaaatgctttctgaaactgaggtataacaccagagcttgctgtttaaaggattatatgatgtacatcagttctataaatgtgctcagcagtttaacatgtgaatcctgttttaaagtgctcagatttcaactgtgtaagccattgatataacgctgtaattaaaaatgtttatatgaaataacttaatgttttaaatttatttatgtagatcacatcatttttatcagtatgcagtgcaaatatgtgaaatgtcttttggtttattccaacaattatttattttagaaagtaagtttaaagactttaaggacattcaaagtttaaaatagtgttcaaattgcaaaatttggcaatcttcatataaattggtttcttttctaacttttcaaaaactaacattaaatgtcaattataggaaaacatagttggaaatgtaatcatcccaaagatcatttttaaaatgaaatttaattagcacatattgaacatttgacttaattgttaaaccccagttttgttttgtttttttaatcagatttttgcacactgattagtttttgtgttgtggcttttgttgctttattattcaaggtttttttttttctttccccatgggggagattgtcttccaatgtttaactacgtttaaataaataaaaattgaattttattgttcatttatataaaatctgataccttgatgtaatttcacaatacagttccaatttttatggcttttataattacaatgatattttcttctataataaaatccaaagtaaacatttaaattgtagaactgatatttttcatttatatgaagtataagcctctactgggtctatattgtgaatcatcctgcctttcaaatttgtttcataattgttagatgaaaactatttttttggagatgttactgaagttgattgagcaataaaagtctacttaattaaaaaaaaaaaaaaaaaaaaaaaaaaaa

SEQ ID NO: 286044 - DNA, 1000 bp, Homo Sapiens; identical to SEQ ID NO: 116046

SEQ ID NO: 286045 - DNA, 1000 bp, Homo Sapiens
ggttaatattttaagaattctttagtatattcttgggtgtggctatattacaaaatgggatgctggcaatgaaacaatacatttaacactattgtatttttattatatgtaatttagtaatatgaatataaatcttgtaacttttaaaattgtaatggaggctgtaatcattttataatctttttaattttaatgcaagtacactggtgtttatatttgcacaaagtattgatatgtgatgtattaagtcacaaaagtaagctgtgacattgtctataagcatttggctccacaaatgtatttggattgttttctatgtgaagcaaaccaattataattaaccacatgttgtagtaactggtctttttatatttaagcagaatcctgtaagattgcttgtctttgcttaaaaacaatacctttgaacatttttgaatcacagaatagcggtaccatgatagaatactgcaattgtggtcagaattacagtatgcacaaagaattaattagcattattaaagagtcctcactaaacatttcatatgatcacactgaagaactgtaacattccatagagtgaagtggttcaaatttctcttggaatttttacttttgttggccttattttatgatccttttcatatttcttttgacttagagtattaatacatggccaaaataatttagttactacctcatacaaacaatataatggttactacacatcacaggaacttagttttggtttaagtcatttttgattgcttttttccaatggaatatgtatataccaggttttagcaaaatgcacacttttggctctttttggtatatgttctttatattttaatgtgagtatatacactaagaacaaactaaattgtgatttatgatcttcatttattttaatgataatggttttaaaatatgttcctgattgtacatattgtaaaataaacatgttttttaacaaaaaaaaaaaaaaaaaaaaaaaaaaaaa

SEQ ID NO: 286046 - DNA, 1000 bp, Homo Sapiens
ggatggggtgacacaggacgagcctattcaagaacactacaacaagcagccattcccttacttcctaaaaggttttgtgaagaacgttataagggtcggtttacagggagaatgctttgtgctggaaacctccatgaacacaaacgcgtggacagctgccagggagacagcggaggaccactcatgtgtgaacggcccggagagagctgggtggtgtatggggtgacctcctgggggtatggctgtggagtcaaggattctcctggtgtttataccaaagtctcagcctttgtaccttggataaaaagtgtcaccaaactgtaattcttcatggaaacttcaaagcagcatttaaacaaatggaaaactttgaacccccactattagcactcagcagagatgacaacaaatggcaagatctgtttttgctttgtgttgtggtaaaaaattgtgtaccccctgctgcttttgagaaatttgtgaacattttcagaggcctcagtgtagtggaagtgataatccttaaatgaacattttctaccctaatttcactggagtgacttattctaagcctcatctatcccctacctatttctcaaaatcattctatgctgattttacaaaagatcatttttacatttgaactgagaaccccttttaattgaatcagtggtgtctgaaatcatattaaatacccacatttgacataaatgcggtaccctttactacactcatgagtggcatatttatgcttaggtcttttcaaaagacttgacaagaaatcttcatattctctgtagcctttgtcaagtgaggaaatcagtggttaaagaattccactataaacttttaggcctgaataggagtagtaaagcctcaaggacatctgcctgtcacaatatattctcaaagtgatctgatatttggaaacaagtatccttgttgagtaccaagtgctacagaaaccataagataaaaatactttctacctacagcgtgc

SEQ ID NO: 286047 - DNA, 1000 bp, Homo Sapiens; identical to SEQ ID NO: 221354

SEQ ID NO: 286048 - DNA, 1000 bp, Homo Sapiens
acgatctgtggacctggcagagtatgcacccaatcttcgagggagtggagtccatggaggcctcattatcctggagccacgcttcactggggacaccctggctatgcttctcaacatccccccacaaaagacgctcctcaggcgccacctgaccaccaagttcaatgccttgattggtccggaggctgaacaggaaaagcgagagaaaatggcctcaccagcttacacaccactgaccaccacagccaaagtccggccaaggaaactaggattttcacacttcggaaacataagaaaaaagaagttcgatgaatcgacggactacatttgcccaatggagcccagtgacggtgtcagtgatagtcacagggtctacagtggctaccggggcctcagcccccttgatgcccctgaactggatgggctggaccaggtgggacagattagctgatgcccttgtcacctgccctctgtgcaccctgagagctcacagtaacactgtgtgtgtcaccatataactgcacctcacccccgcacgtgtgcatgactcgcagagaatattccagcaattgtgtacccctgggccagtctctttgaaccctgagggtggccaggatctggagctgcatctctaaggggccaggctttggggaccattgccaaaggtggactcaggaggaaagacacttaaagacacttttacatgtctagtaattcttgatgttcatcttcagcaccagtggaaacacatgaacttcgatgcaggtccagagaccatggacactcccacgaggctcagctctcaggcaccccctacacttcagttgagggaaaagctcaagtgccttaggcccgtggaccacagtcttggctgagatcaaagggatgagcaacagggacttctgccacagtgacaatggaattgtgttgtgccttacttcagaggtggtctcttctttcttgtaataaaagcaatatttatgcaaaaaaaaaaaaaaaa

SEQ ID NO: 286049 - DNA, 1000 bp, Homo Sapiens; identical to SEQ ID NO: 116047

SEQ ID NO: 286050 - DNA, 1000 bp, Homo Sapiens; identical to SEQ ID NO: 116048

SEQ ID NO: 286051 - DNA, 1000 bp, Homo Sapiens; identical to SEQ ID NO: 221355

SEQ ID NO: 286052 - DNA, 1000 bp, Homo Sapiens; identical to SEQ ID NO: 284240

SEQ ID NO: 286053 - DNA, 1000 bp, Homo Sapiens; identical to SEQ ID NO: 116049

SEQ ID NO: 286054 - DNA, 1000 bp, Homo Sapiens
agttaatataaatgtgtacataatccacatttgtagtcaaggacgcaatctcttccacacatgtgcagttgtcagttggtacatctaaactccctccatcctgactcacgtggacttagatatgttttgtttctattttcttctatttcagtttttcattctttgatgtttatttcttttgtccatcagatctcttgtgaaatcccatggaaggttgtgctcagcctgtcgggtctctttcttcctgcccatatattataccagttgcttctgcagcccgcagatgccagcgatgccaggaaacaagttgaaatccaggaatctctttaactgattttgctaaaaatctccctgtgagccttccactcaactcttaatatgcttgcattgtttaagtttttaaattctgaaaattaataattagggtttttttcatatgtgttgcataatgcaaacctcctaggttaaaatagtttctttatttaagatagaataatttccagaaattgtacttttgaggtatcatttttatctgtaatggtttgtctgtcttttttcctctgatcagtatttttttataccagttttggagactggctgagatgaaaggaaatgtggaataaaaggaggttttcctgatgtggtgtaaagaaaacagattcaagagaattgaagattttttttgtttcttggtacttttttctttttaaattaggactaatgtttcttttgtggtgcttgaggcatattcatataaccaaagtttgagaactgggaacttcatgctgatttgtacatattgaagtttctctggtattcaaaggttatatagtgaatgaattttcattaataaatcactttgtcagaaactcccatatcatctatattttatatatgtatatataaacgtatgctctttaagtgtgtctatatgtgagcacataaaatctaaataaaattggactggtgggaaacaaaaaaaaaaaaaaaaaaaaaaaaa

SEQ ID NO: 286055 - DNA, 1000 bp, Homo Sapiens
agccccaactccagccccagcccctggcccccgggatcagaacctaccccagatcctggaggagtccaggtctgaatgagtcagaagggcttctgggaccaattccagctcctgacattcccccagtcctgcctctcccccatcctatcagggacatttggctcctcttagctggctctgctcatccagaggatattcccccatcccccccccatcaagtttggtgggcagagctacagatgggacccaagggagtggccgagcctcactgcctaaaccaatgcccttctcatccctgtttccccaggctcctggctgtttatctgccccaaaggagaagcctcatggggttgacataggtcctttctgccatctctgttccagctgctgtcagggattaacaacagagtgtaggggagattaactgcctcccttccaatagacactatcagcagggacagatgtgtgggagtgcagggctgcagagggtatggggggaggaggctgctaaaccctatcccccagcctcccccctgccctgaagatcttccatttgcttccactcagctggaggctcaagagggcttgatggctgtcccctgcccccctccttttgttttgtacacagagaccaagaggcctcagtttagcaccttagtacctccgctgcttcacttgctttagccaaagccataaaaaacctgcaacgtagagaaaataatgcagataccctgactagccagccctctactcctccaaccttttccaagatatgcaatggcctttgtgcctgcccaaaggcttcgcccctccagtgcatgaggaaccctctttcctccgctcagagatgctgcttcatttacccaggaggtcatattctttatatatattttttgttgcaaagtgtctctctagagaaactctatatattattcgaatttttaaattatttgtttatatataaaagaaaagctcaattggcaaaaaaaaaaaaaaaaaa

SEQ ID NO: 286056 - DNA, 1000 bp, Homo Sapiens; identical to SEQ ID NO: 116050

SEQ ID NO: 286057 - DNA, 1000 bp, Homo Sapiens; identical to SEQ ID NO: 116051

SEQ ID NO: 286058 - DNA, 1000 bp, Homo Sapiens
ccgagcagcacaagattgtgatggagaccgttccggtgctgaaggcccaggcggatatctacaaggcggacttccaggctgagaggcaggcccgggagaagctggccgagaagaaggagctcctgcaggagcagctggagcagctgcagagggagtacagcaaactgaaggccagctgtcaggagtcggccaggatcgaggacatgaggaagcggcatgtcgaggtctcccaggcccccttgccccccgcccctgcctacctctcctctcccctggccctgcccagccagaggaggagcccccccgaggagccacctgacttctgctgtcccaagtgccagtatcaggcccctgatatggacaccctgcagatacatgtcatggagtgcattgagtagggccggccagtgcaaggccactgcctgccgaggacgtgcccgggaccgtgcagtctgcgctttcctctcccgcctgcctagcccaggatgaagggctgggtggccacaactgggatgccacctggagccccacccaggagctggccgcggcaccttacgcttcagctgttgatccgctggtcccctcttttggggtagatgcggccccgatcaggcctgactcgctgctctttttgttcccttctgtctgctcgaaccacttgcctcgggctaatccctccctcttcctccacccggcactggggaagtcaagaatggggcctggggctctcagggagaactgcttcccctggcagagctgggtggcagctcttcctcccaccggacaccgacccgcccgctgctgtgccctgggagtgctgccctcttaccatgcacacgggtgctctccttttgggctgcatgctattccattttgcagccagaccgatgtgtatttaaccagtcactattgatggacatttgggttgtttcccatctttttgttaccataaataatggcatagtaaaaatccttgtgcattaaaaaaaaaaaaaaaaaa

SEQ ID NO: 286059 - DNA, 1000 bp, Homo Sapiens; identical to SEQ ID NO: 221359

SEQ ID NO: 286060 - DNA, 1000 bp, Homo Sapiens
tctgcctcccgggtttgagtgattctcctgcgtcagcctcccgagtagctgggattacaggcacctgccactgcgcctggctaatttttctatttttagtagagacagggttttgccatgttggtcaggctgctctcaaactcctgatctcaagtgatctgcccacctcaccatcccaaagtgctgggattacaggcgtgagccattgtgcccggctgacaaggcttttttcttcacatgagtaatttttttggcttcttctcctccactctagtatttccaccctcagtaaggaatggaaacctgtcccgtctggggtgtgaagtgccctctgctttttcccccacattgtttggggttcccagcacctcagccacattgcatgctgggttttcattgtcattgttgcaaatgaaatggagtagacatgtgaaatgctaacctatctaggacctgatctatgccttcttgggaactgagaatgaagaaacagaaatagatggtggaagaactgcctaaggtgtgaaaagctgaagattctaccactgaagtactgaatatgttgtctagttgtgagactagtgtgtaaaatatatgttttctagatgatttctgagacttgtgatgacaaggaacctgacctaaccccatttttcataaagacaaagaacagcaatgttaaattgccatatgaagagaaacactagtgatgtgcgtggtctccttgcctcttgtttccttccctcttcctcactgacttccccttgcacaggggcttctgttttatcccatttattatttgtggcacctatatcaatgtggggtttgtaataggtgagaaatatttgcttggagaagctcttgtgcaattagcctggcaatgattggccggccatgtttgaatgccagtttctcttctttgctgaagtactttatgataaaagtaagcctagacataaaatctggagagaaccatgcaataaacaagtatttttgaaat

SEQ ID NO: 286061 - DNA, 1000 bp, Homo Sapiens; identical to SEQ ID NO: 116052

SEQ ID NO: 286062 - DNA, 1000 bp, Homo Sapiens; identical to SEQ ID NO: 221361

SEQ ID NO: 286063 - DNA, 1000 bp, Homo Sapiens
cgagatggcagtgggctgacatatatttatcctggtacatcccatgtaaccctaggtggaactaggcaaaaaggggactggaatctgtccccggatgcagaaaatagcagagagattctttcccgatgctgtgctctggagccctccctccacggagcctgcaacatcagggagaaggtgggcttgaggccctacaggccaggcgtgcgactgcagacagagctccttgcgcgagatggacagaggctgcctgtagtccaccactatggccatgggagtgggggcatctcagtgcactggggcactgctctggaggccgccaggctggtgagcgagtgtgtccatgccctcaggacccccattcccaagtcaaacctgtagatgacataaaatgacagcaaagagactgagagactgttgatcaaagcacagaacaggttcaaataacttttccactgcatgaaagtttaattagacatttctttgttttcaacattagaagtggtgtaacatgtaagctgagcacggtggcatgcctatagtcccagctacttgagaggctgaggcaggaggattgttgagcccaggagtttgagtgcaatctgggtaacattttttagaggtgccagttcccacctctaaaaaaaacaccaacaacaaaagaaatgatgcaacatgtaggcttacttaggaagtccagcattaatggcatagggcataaagctctattttttgttaaaaatacttcttatagagtaaaatttatttagaactgatgtccaaggacctatgcagatttatatgaatgttggaagctatagagattttgatatcatttggcttataaatccacaggaggagataatgtatggaaaacatttaaatcactgtcaattgcagagctgcctgtgatcttcttaggttatagccaagtcagcaacataattcctctaaataaaattacattgtgctcacaaaaaaaaaaaaaaaaaaaaaaaaa

SEQ ID NO: 286064 - DNA, 1000 bp, Homo Sapiens; identical to SEQ ID NO: 221362

SEQ ID NO: 286065 - DNA, 1000 bp, Homo Sapiens; identical to SEQ ID NO: 116053

SEQ ID NO: 286066 - DNA, 1000 bp, Homo Sapiens
cggcgtcggcggcggtggcggtggcggcggcagcggcacccaccacgacggcggagaagcctccagccgaggcccaggacgaacctgcagagtcgctgagcgagttcaagcccttctttgggaatataattatcaccgacgtcaccgcgaactgcctcaccgttactttcaaggagtacgtgacggtgtagccggagggcgtcggaaggggaagcgccattcccgcgggggggcggggagctgagcacctggggcctcggggcgggctcccctctcgccaacccgccaaccgcgagagacccaggctggcccccagggtgaggacgcccggagcggaggtaaccatgttccccctgcggcggctgtcagacctgggcggaggccccttccacgcggtgccggcggggctcgccctctcctgcccttccccgctggagatggacccccggaacggacagggcagctctgcgcccggcctcagagttctagtattatattttaaccgtgctaacttgtcaagtgctgactctactcccgtttgtacgtggtgttattattgaaatgtattgtttgagctcaaaaggcccgaccaccccccttcgggctgctatatatatatttatttgtaggtatttatatattgaaatataaaaacctagatttatggagtttcctctagatcatgttatattctatatcagacaaactattttcttttgacctttcttcccctccatccagtatttcggttgatttcattttctcccctctcttccccttccacgaactgcaataccagtaaccttggtatatattttttgatactgtacacatggatgtcttgtttctatgtgcaaaaaaaaaaaaaaaaaaaagtttgttaaaaggctacacgagctctctagaaactgctgctactagaaatgtctaaactataagcttccaactattacctgcttgaatgtaaatattaaatggagatgttgaaggtgcaaaaaaa

SEQ ID NO: 286067 - DNA, 1000 bp, Homo Sapiens
ggaaaaaggcttctacacggagcgggacgccagccgcctcatcttccaggtgctggatgctgtgaaatacctgcatgacctgggcattgtacaccgggatctcaagccagagaatctgctgtactacagcctggatgaagactccaaaatcatgatctccgactttggcctctccaagatggaggacccgggcagtgtgctctccaccgcctgtggaactccgggatacgtggcccctgaagtcctggcccagaagccctacagcaaggctgtggattgctggtccataggtgtcatcgcctacatcttgctctgcggttaccctcccttctatgacgagaatgatgccaaactctttgaacagattttgaaggccgagtacgagtttgactctccttactgggacgacatctctgactctgccaaagatttcatccggcacttgatggagaaggacccagagaaaagattcacctgtgagcaggccttgcagcacccatggattgcaggagatacagctctagataagaatatccaccagtcggtgagtgagcagatcaagaagaactttgccaagagcaagtggaagcaagccttcaatgccacggctgtggtgcggcacatgaggaaactgcagctgggcaccagccaggaggggcaggggcagacggcgagccatggggagctgctgacaccagtggctggggggccggcagctggctgttgctgtcgagactgctgcgtggagccgggcacagaactgtcccccacactgccccaccagctctagggccctggacctcgggtcatgatcctctgcgtgggagggcttgggggcagcctgctccccttccctccctgaaccgggagtttctctgccctgtcccctcctcacctgcttccctaccactcctcactgcattttccatacaaatgtttctattttattgttccttcttgtaataaagggaagataaaaccaaaaaaaaaaaaaaaaaaa

SEQ ID NO: 286068 - DNA, 1000 bp, Homo Sapiens
tggatgctcaagtgcaaacagacccagtatccatcggaccagttggcaaacccaagtaaacaaatcagcacggttcccaccaggttctcctgccaccaagatgtgttctccttactccatctcctccccaaacacgctccatgtatatattcttctgatggccagcaaatgaaattctgcctagaaattaagcccgagctgttgtatattgaggtgtattatttacgtctctggtccagtcttttctggcaaataacagtaaagatggtttagcaggtcacctagttgggtcagaagagtcgatgatcaccaagcaggaaagggagggaatagaggaatgtgttcgggttaagtgatgaaaatggcagtggtggccgggcgtggtggctctcgcctgtaatctcagcactttgggaggccgaggcaggtggatcacctgaggtcaggagttcaagactagcctggccaacatcatgaaaccccgtctctactaaaaatacaaaaattagccaggcatggtggcacacacctgtagtcccagctactcgggagcccaacgcacgagaaccgcttgtacccaggaggtggaggttgcagtgagccgaagttgcaccattgcactccaccctgggcgacagagcaagattctatcaaaaaaaaaaggcagtggcaagtaagttatagaagagaaatgctgctagaaggaattaagcgttgtagtaaacgcgtgctcatcctctaagcttgaagaagggagacgaaaatccatttgtttaaattcacatctcaaggagggagaacccgggctgtgttgggtggttgccaatttcctagaacggaatgtgtggggtatagaaaaaggaatgaataagcgttgtttttcaaatagggtccttgtaagttattgatgagagggaaaagattgactggggagggcttaaaatgatttgggaaaacaattgcttttgaggctcagtgacaacggcaaagattacaactt

SEQ ID NO: 286069 - DNA, 1000 bp, Homo Sapiens
ccgggagaaggacctccgaggcgtaactcccgactcagctgagatgttgccccccaactttcgttcggctgcagcgggagccctgggctctccggggctccctctccgcaagctgcagccagaaggccagacttctgggagttcccgggcagacggcgtttcggtccggacctattcctgctagtgcaggcctccaggtgacctcactcggacggaagaatcttcccgaggctgggctgttccctctcctgcccggactgtggcctcgccggggagagcgggcgggggagctcgcgccgaggactggaccatctgtacagaccagcgggagtgcgcgcgcccgcctcgcacagggccggggcctggaccaaaccacatgaactggactgagagggggaagaagcggggaggaagaaatcccgccccaaacgtccgctttccttttctctactttgtaatttattgatcagtttctgttgggagacgggtgtcctttacccgcgggaagggggcggggcttccctcccgggccgcatgcggggagaggctgctccctcccctttttcctgcccagtcgcggggcccaagtcttccttcttcgtccgaaaggaggggaggggggactcgctgctacaagcctcgccccctgtgccactcagctccgccccgccgcgtccggtcgccggtcccccgggtcatctgcgggcgggttcccctctccctcccccgtgtctcgtgtccccggggcctcaccgccccccgtgctgtggccgtgtccgtgccccgggggtagggggcgcagaatggcgcttccccttctcctctggctccggggtttgcatgggagaatcctctttccacgatgccgctgggcgacgtggcgtgggggcagggggacggtgggggagccctcgcccccgactctcggtcggcctccccgccccaggcgtcactcagtgatcacgggtaaagagaactgtttcaaaaaaaaaaaaaaaaa

SEQ ID NO: 286070 - DNA, 1000 bp, Homo Sapiens; identical to SEQ ID NO: 116055

SEQ ID NO: 286071 - DNA, 1000 bp, Homo Sapiens; identical to SEQ ID NO: 221364

SEQ ID NO: 286072 - DNA, 1000 bp, Homo Sapiens; identical to SEQ ID NO: 221365

SEQ ID NO: 286073 - DNA, 946 bp, Homo Sapiens
gattcttggagggagaggggaacggacagcaaacaatagacacaatacgatcgtgaggtatatagttaatgttggtgatgagtgctcctcaaaggaaacaactaaaaccagacaagggaagtcggggtgtcagggagaatggtttgtagtattgatgacaatggttaaggaaggcctgagtttgcaaagacctcaaggatatgagggactagagtgccttctgctgtggaagagcctgcgcaaagatcctgaggtgggaggggtcagggagccaactcattttacggtaagtggaggtgggatccaggggaggattctgagcagaggagggacgtggcccaatttgggctttgaaaggatcctgcttgtctgtgtgccagcatcctggtggtggttgggggagtctgcatcaatcctgggtgctgttacctgaaaaaatagcaggtgttagacgaaagaacagatgtctggcccattgtttccagtctgttcctgtccacagcttccctttatgctgagcccctgccacatgcatcatcatcctggccatgtggcattgtcacagaccgtctctcctgctagcctcctaactcagggcctgggtcttccccagcattaagtaaatcagtctcaggcagacagccctttataggtgtttgggccaggtgcggtggctcacgcctgtaatcccagctctttgtggggccgaggtctttgagctcaggagttcaagaccagcctgggcagcatgacaaaaccctgtctctaccaaaaatacaaaaattagccacgcatggtggcacacacctgtggtcccagctactcgggaggctgaggtgggaggatcgctggagcctgggaagttgaggctgcagtgagccgtgatcatgccactgcattccagcctgtgtgatggagagagaccctgtctcaaaaaaaaaaaaaa

SEQ ID NO: 286074 - DNA, 1000 bp, Homo Sapiens; identical to SEQ ID NO: 116057

SEQ ID NO: 286075 - DNA, 1000 bp, Homo Sapiens; identical to SEQ ID NO: 221366

SEQ ID NO: 286076 - DNA, 963 bp, Homo Sapiens
aatgaggagtgatcatggctacctcagagctgagctgcgaggtgtcggaggagaactgtgagcgccgggaggccttctgggcagaatggaaggatctgacactgtccacacggcccgaggagggctgctccctgcatgaggaggacacccagagacatgagacctaccaccagcaggggcagtgccaggtgctggtgcagcgctcgccctggctgatgatgcggatgggcatcctcggccgtgggctgcaggagtaccagctgccctaccagcgggtactgccgctgcccatcttcacccctgccaagatgggcgccaccaaggaggagcgtgaggacacccccatccagcttcaggagctgctggcgctggagacagccctgggtggccagtgtgtggaccgccaggaggtggctgagatcacaaagcagctgccccctgtggtgcctgtcagcaagcccggtgcccttcgtcgctccctgtcccgctccatgtcccaggaagcacagagaggctgagagggactgtgacttgggctccgctgtgcccgccctgggctgggcccttcctggctaggactgtggaggggagctgctggccatggctgctttgtagtttgcccagagttgggggctaggggaggggggagccagaggccaggatgcctgagccccctgagttcccaaagggagggtggcagagacagtgggcactaagggtggagagttgggggccagcacagctgaggaccctcagccccaggagaagggacaaaaggtactggtgagggcaagaggtgcctgggaggagtggccctgatccaggaaaatgtgaggggaatctggaacgctctaggcagaagaagctgggagggagggggaggtgaaaagggcagaggcaaggatggtggggcccccagcaccctctgttagtgccgcaataaatgctcaatcatgtgccaga

SEQ ID NO: 286077 - DNA, 1000 bp, Homo Sapiens; identical to SEQ ID NO: 116058

SEQ ID NO: 286078 - DNA, 1000 bp, Homo Sapiens; identical to SEQ ID NO: 221367

SEQ ID NO: 286079 - DNA, 1000 bp, Homo Sapiens; identical to SEQ ID NO: 116059

SEQ ID NO: 286080 - DNA, 1000 bp, Homo Sapiens
ctctggcacctcagcagtcggaggcacagaagctgcaaaagggatcttcgaaactgggcagagaaaaaataaagtggaatattaagtaaaagttgggcactaatctggattaacattcgaggaaatcagttgagctgatttaagttgttttttgtttgttagcaggtgtggatgtggggttatgtggtcatgctcagatctacctaaatcaccccagagctttatgtcttttattcattctaaatcttattaaccggaatatgtaggaccatttcaataccttgtaatcctccaagcttcaatctgcacacactttctatgagggcaggtacaactattaagagattttgaacattaagttagtccacaaatattcagtgggcatctactaggtgacagccactgtgctataattagagactttttactataagcatcaaaaacagataaggctcttcctggcagagtttacagcctggtgtacttgctaatgtctctttaattaggtgaagaattttttttttctatcgaaattactaatcagttggggaaaaaaatactatagcagacagcactaatgtcatcaacaaacattgttcttctccgtgtcctgggtacaacatcgaataatatttcttggcctcctttccgcttctcctctctgctgttcctctctacaagaacctgggaggccaacgcctaaagatcataatatcacaatggaaggaacctagattcctaaatgactgcataggacagatcccatctcctccacccaatacattattagactgaactgtgacctgaaatgagcaataaactctgtattaattcactgaaatgttggggttgcttgttatagtagtcggtccatcatgaccagtaaaacataaatcaaaagttaatgtaattgttatcccattatttagagcgaaataaatgttgaatatatggactttctcagattaggaaataccaattaaaaatataataaatagct

SEQ ID NO: 286081 - DNA, 1000 bp, Homo Sapiens; identical to SEQ ID NO: 116060

SEQ ID NO: 286082 - DNA, 1000 bp, Homo Sapiens; identical to SEQ ID NO: 116061

SEQ ID NO: 286083 - DNA, 1000 bp, Homo Sapiens
gaggaaaaagctttttccaaaggggttgtctttgaaaaggaaagcaatcacttctcactttgcataattgcctgcagcaggaacatctcttcactgggctccacctgctcacccgcctgcagatctgggatccagcctgctctcaccgctgtagctgtggcggctggggctgcagcctgcagggagaagcaagaagcatcagttgacagaggctgccgacacgtgcctcttccctctcttctctgtcaccctcctctggcggtccttccaccttcctctgtcctccggatgtcctctttgcccgtcttctcccttggctgagcaaagccatcccctcaattcagggaagggcaaggagccttcctcattcaggaaatcaaatcagtcttccggtctgcagcacggaaaagcacataatctttctttgctgtgactgaaatgtatccctcgtttatcatcccctttgtttgtgattgctgctaaagtcagtagtatcgtttttttaaaaaaaaagtttggtgtttttaaccatgctgttccagcaaagatgataccttaaactcccactgcaagcccatgaacttcccagagagtggaacggcttgctcttctttctagaatgtccatgcacttgggttttaatcagcagttccctattattctgattttaagctgttcctgtgatgaacttagagacagcatcggtgtctgctgctgtgtccccaggtcttgtgtgggtggcacagatctgggcagttagatagtgctctgtgcctaaggtgaagccacactagggtgaagcctcacttccctgtttgagcaatgcagtgcctgctgcccgtgtgcatgaaggtacagccattcagataagtggaactattgagttacataaagaaaatagatttgcatttgtcaggcagacgtttatacaacaccacggtgcttttatacattgtgcttattttaataaaactgaaattctaaaaaaaaaaaaaaaaaa

SEQ ID NO: 286084 - DNA, 1000 bp, Homo Sapiens; identical to SEQ ID NO: 221369

SEQ ID NO: 286085 - DNA, 1000 bp, Homo Sapiens
cttggtttggcaagaaaaagaagcagtacaaagataaatatttggcaaagcacaatgcagatcttgtcacatatgaagaagtagtaaaactgccagcattcaagaggaaaacactagtcttattaggcgcacatggtgttgggagaagacacataaaaaacactctcatcacaaagcacccagaccggtttgcgtaccctattccacatacaaccagacctccaaagagagacgaagaaaatggaaagaattattactttgtatctcatgaccaaatgatgcaagacatctctaataacgagtacttggagtacggcagccacgaggatgcgatgtatgggacaaaactggagaccatccggaagatccacgagcaggggctgattgcaatactggacgtggagcctcaggcactgaaggtcctgagaactgcagagtttgctccttttgttgttttcattgctgcaccaactattactccaggtttaaatgaggatgaatctcttcagcgtctgcagaaggagtctgacatcttacagagaacatatgcacactacttcgatctcacaattatcaacaatgaaattgatgagacaatcagacatctggaggaagctgttgagctcgtgtgcacagccccacagtgggtccctgtctcctgggtctattaggcctctccccagatatctgagcataactgggagcacctcatttgtggaaaagcctctttgttatcggccttgtgtcagcaggtcatggtccctagagactacctagttgtagtgtgacctacatttataattattgtcatgtccgaatagataggaggagaaaaacaattacacactaatttaaagagacagtatcttttttaatcagttctcctaaactttaataaaatgtatctttaaatgtatgtattattcaatcctttggaatgttatatttttggaaatcatagctttttatttccaaggcccctaaaactgcacaaaataga

SEQ ID NO: 286086 - DNA, 1000 bp, Homo Sapiens
tccggtcccagctggagacgtcattgaagaggctgcagtgtccccaagtggacctcttctacctacacgcacctgaccacggcaccccggtggaagagacgctgcatgcctgccagcggctgcaccaggagggcaagttcgtggagcttggcctctccaactatgctagctgggaagtggccgagatctgtaccctctgcaagagcaatggctggatcctgcccactgtgtaccagggcatgtacaacgccaccacccggcaggtggaaacggagctcttcccctgcctcaggcactttggactgaggttctatgcctacaaccctctggctgggggcctgctgactggcaagtacaagtatgaggacaaggacgggaaacagcctgtgggccgcttctttgggaatagctgggctgagacctacaggaatcgcttctggaaggagcaccacttcgaggccattgcgttggtggagaaggccctgcaggccgcatatggcgccagcgcccccagtgtgacctcggctgccctccggtggatgtaccaccactcacagctgcagggtgcccacggggacgcggtcatcctgggcatgtccagcctggagcagctggagcagaacttggcagcaacagaggaagggcccctggagccggctgtcgtggatgcctttaatcaagcctggcatttggttgctcacgaatgtcccaactacttccgctaggcccatcatggctcaggctgcccaaggcttttctgtcacctcttttgttctctcacactgaccagtcttggccttaagctgacttagaagggtttttctgaattgtctagatccatgcattatttttctagcttcctgccttgctccctattcactttacactgtgaaaggtggggggtgagtcccacttgagcgcttcctgttgaataaagcaggcacttgacctggctgtagcctaggtcttgagtgaaccccaaaaaaaaaaaaaaaaaaaa

SEQ ID NO: 286087 - DNA, 1000 bp, Homo Sapiens
gctgcttagtgaaattgccaaggaacaaggttttaatataacatatttggatatagatgaactgagcgccaatggacaatatcaatgtcttgctgaactgtccaccagccccatcacagtctgtcatggctccggtatctcctgtggcaatgcacaaagtgatgcagctcacaatgctttgcagtatttaaagataatagcagaaagaaagtaaatctggagcaacttaaaaaatctttcagtagcacataaaaagttcccctctggccccttcccaagtaaaacttttaccgtagtgtttatgtcttgtttctaaatctcttcatagattccatcaacactccagatttaattatctcctcatagttgttattaagctctttttaatggcttcaactttgtatcagtatactgtatttataaactttgtaccacaagagagagtgtagcacccattttacagtgccatgcacatcagagaaagaaactgcatgtttgttgttgatgatgaaataaaaatgctagcgacagtctttcttactggtgcttaagctcttctttgcacaaagctttataaagggaattcaaaggaagccctttagaattagagtcttgagggacagcactaacaggcctttattaagtatgattgattgttaaatttcagggaacatgattggtctgctgtgtatttgaattcatgtaacaaagaactgttacgatgggattctgctcattttattaaaaagctactgacttgactgtcatcctgttcttgttagccattgtgaataagattttaatgttgataattctgttatttacatatctctaatttactttgaaattcaaaggtgaaaataaaaaatgatggcctaagtaaaatttaaaaaaaaaaaaaaaaaaaaaaaaaaaaaaaaaaaaaaaaaaaaaaaaaaaaaaaaaaaaaaaaaaaaaaaaaaaaaaaaaaaaaaaaaaaaaaaaaaaaaaaaaaaaaaaa

SEQ ID NO: 286088 - DNA, 1000 bp, Homo Sapiens
tgtctttttttaaagaatggaaatatttatttcagaggccttatttttggacatttttagtgtagtactgttggctcgtatttagaatattcagctacgacagttttggactgtttagtagtctttgttttatgtttttaaatacagaaattgctttcacaaatttgtaccacatggtaattctaagacttgttctttacccatggaatgtaatatttttgcaaagatggactacttcacaaatggttataaagtcatatccacttcttccacaatgaccacagcaaatgaccaagcatgaactaaaggtaaagatgtttacagattacttttcttacaaaaaaatctagaagacactgtgtttaaatagatatttaaatgtttttgagatttagtaactgattttttagacactgcctatcgcatgaactgtaaagctgtgtgtattaggtgtaaaatatttataagatatatggactggggaatttgattattcctccctttgaaaaaatagtcctaataatttgaacaaatatgttagtaatgatggaacagatcaatgaaaagtagatatagatattgtgaaaataggctgtttaacaaacagattggaataaagcctattctaccagttaaactactttaatacacattcatttttaaagaaaatgtttgttttaacataaataaacaaatcgtatcagtgtttgtgaataaaatacaaaaatgattgttaatgattggtgctcttaaagtgagcttaaaatttatccaagacgtatatccaaatttgtcctgtagtaatagattaatattcatagattgttggtgtttaaagatctgaagtgtgagtagaatgtattcagctgtttaacatgtagtttagatattcaaaagtatgcatgtagaatttaaagaatatgttaaaaattattaatcttaatattttgtttggaaaagcatgttataatataatgttttcacaaaaaaaaaaaaaaaa

SEQ ID NO: 286089 - DNA, 1000 bp, Homo Sapiens
tttttctagctaatatgtcctttctggagatctggtatgtcactgtcactattcccaagatgcttgctggctttgttggatccaaacaggatcatggacagctaatctcctttgagggatgcatgacacagctctactttttccttggcttgggctgcactgagtgtgtccttctcgctgttatggcctatgatcgctatatggccatctgctatcctctccactacccagtcattgtcagtggccggctgtgtgtgcagatggctgctggctcttgggctggaggttttggcatctccatggtcaaagtttttcttatttctggcctctcttactgtggccccaacatcatcaaccactttttctgtgatgtctctccattgctcaacctctcatgcactgatatgtccacagcagagcttacagatttcatcctggccatttttattcttctagggccactctctgtcactggggcctcctatgtggccattactggtgctgtgatgcacattccttcggctgctggacgctataaggccttttccacctgtgcctctcatctcactgttgtgataatcttctatgcagccagtatcttcatctatgctcggccaaaggcactctcagcttttgacaccaacaagttggtctctgtactgtatgctgtcattgtaccattgctcaatcccatcatttactgcctgcgcaatcaagaggtcaagagagccctatgctgtactctgcacctgtaccagcaccaggatcctgaccccaagaaagctagcagaaatgtatagaagggatgtgtgaaatctgataaaatgctattaaacttgggatcaatgtgttctatgaagtccagtggagttcttagggcctaaattgggggccagagtttcaaaggcatcactatggaactaggaatactttctttaactagtccaagaggagagagaggaataggttgcaagctagaaaatggatttctgcaggacag

SEQ ID NO: 286090 - DNA, 1000 bp, Homo Sapiens
cacgactcagtatccatgctcttgaccttgtagagaacacgcgtatttacagccagtgggagatgttagactcatggtgtgttacacaatggtttttaaattttgtaatgaattcctagaattaaaccagattggagcaattacgggttgaccttatgagaaactgcatgtgggctatgggaggggttggtccctggtcatgtgccccttcgcagctgaagtggagagggtgtcatctagcgcaattgaaggatcatctgaaggggcaaattcttttgaattgttacatcatgctggaacctgcaaaaaatactttttctaatgaggagagaaaatatatgtatttttatataatatctaaagttatatttcagatgtaatgttttctttgcaaagtattgtaaattatatttgtgctatagtatttgattcaaaatatttaaaaatgtcttgctgttgacatatttaatgttttaaatgtacagacatatttaactggtgcactttgtaaattccctggggaaaacttgcagctaaggaggggaaaaaaatgttgtttcctaatatcaaatgcagtatatttcttcgttctttttaagttaatagattttttcagacttgtcaagcctgtgcaaaaaaattaaaatggatgccttgaataataagcaggatgttggccaccaggtgcctttcaaatttagaaactaattgactttagaaagctgacattgccaaaaaggatacataatgggccactgaaatctgtcaagagtagttatataattgttgaacaggtgtttttccacaagtgccgcaaattgtacctttttttttttttcaaaatagaaaagttattagtggtttatcagcaaaaaagtccaattttaatttagtaaatgttatcttatactgtacaataaaaacattgcctttgaatgttaattttttggtacaaaaataaatttatatgaaaacctgaaaaaaaaaacaaaaaaaaaaa

SEQ ID NO: 286091 - DNA, 1000 bp, Homo Sapiens
gagccatcccaacacatattcgatgatgctcaacttcagatttacaccctgatgcacagagactcatatcctcgattcatgaactctgctgtctataaggacttgcttcagtccttatcggagaaatctattgaagcataggatttttcaaatatatttattattaataaaataataaaagaattcatgggctacaactagcacagggaatttagaggttgtagcatcttctgctggagtaatactcaggctattctaataacagatgattccttcaacagactgctatatattcaccatgtaaactgcagccacctttagtgatacttttaaaaaaaaaaataaagggatatggctgttgtagaaagatagcgtatttgcatttacaataacagtagcatgttgtcagtggccaaggctacacagaaggctccctgctgcccggagcaggtacatccacagagcaaagggaaccacttttattttgcatgagtttggtaactgattactctcccctcaaagaaaagacattcaggtgtttctcaacgacatcttctgtccagcaagctcggtttgaatacgtcacttaccagtgccattgcaggacccaaattcacagttcataaaagatgtgaccactacatgtaaaaatagcattctacttgatcttacagtatgtatgtatgtatgtatggagacatatgtgtgcgtgtggatgtctacatggttaatggaaagcactgtgctctgaagtggatcagtctcaagtgtctggtaacagcagcaatgcttagaaaattcttttgttgaaaagagttactgttattatcagaatttgccaacctaaagaatgaatttttaaattcataacttggtcatgttcacaacaaaactgtcaaataagcatatttccatttttattactgaaagaaatatgggcattttcattctttaaagaaataaagcacaagaattttatctcaaaaaaaaaaaaaaaaaa

SEQ ID NO: 286092 - DNA, 1000 bp, Homo Sapiens; identical to SEQ ID NO: 116064

SEQ ID NO: 286093 - DNA, 1000 bp, Homo Sapiens
atttggcctttatctcccgaaatttaagtctcctagtgttgctgtggttcagccaaaggcagcagtggcagccactcagtgatgagacaactgttgagtgtggcaaaatggcgccttgaagaaagaggcctaggagagcagccctgtaatgtatccagtcagctgcatggtactgactgagctgaggagtcaaactcttctttctgtatgacatatacatatacttgtttataaaataatcatttgcccagggaaaaaaccacaacgctgtttcaagctttagtcttatgtgttgaaatgtttttgtaagccttggcatgaattagtgttctagactctgctttgcacagcttgcacttacagtgattgtacatattgtacatctttgtacagagacatcttggcacctcatcccaacaaatcacatttgtagaaatgtaatgcggttctgagtggcttgaaatgtacagaatgttttgaaagtgttttattaagaatcacacaaaaataaatgtattaaaattaaattcattctcttattggtgacttatggaaataaagcatcaatattggatgtatttaattcctagtttgttttccattctggaataaaaaggtatttgctgataaaaggcataacgagacatagtgctgctaccactgaataagtgatactttggaaagatgcatgccagtggatgccagaggaccaggctaatgacttgtgtgtgctgatgtgtttccatttgtatttaatgtgtgtagaccctcctctgttcatcaatcaaaaagcatttcctaggcagctcctcgcctgtcagtgtgcatatggaaacagggacatctccatcattactggcttagttttgctttcctttgacacagtaaggcaaaggccaagctttcaaaagagtaaaggatactttcacaatttcccttcatatggatatgattccagtcaaaaataaaatgcacaccaaaatgtaaaaaaaaaaaaaaa

SEQ ID NO: 286094 - DNA, 1000 bp, Homo Sapiens; identical to SEQ ID NO: 221371

SEQ ID NO: 286095 - DNA, 1000 bp, Homo Sapiens
agggaactctcctactttggggtgaaggtggctatgattgaacctggctatttcaagactgctgtgaccagtaaggagagattcttaaagagcttcctggagatttgggaccggtccagtccagaggtcaaggaggcctatggcgagaagtttgttgcagactataagaaatcagctgaacaaatggagcagaagtgcacacaggatctgtcgttggtgaccaactgcatggagcatgcgctgattgcctgccacccccgtactcgctactcagctggctgggatgccaagcttctctacctccccatgagctacatgcccaccttcctggtggatgccattatgtactgggtctctccaagcccggccaaggctctatgaagctaaggttggatgcatggttgcatggatttggggtgtgctatgagggtggtgttatccttgggaaaatataaagtggaaggaaggaccgtccggtcagtaggcaccaatcccactccttcattactcctggccatgaatctcctgggaataattctgctctctggagatgttggtaggaaagtttcaagttacgcagctgaaaaacagggaccaaatagtgctcctgggtgcattgtcaccgtgggtggccactcaagggtccaagcctctagggccatccttgggctaacaactggggtgggtgtgagcaggtggaaggagcctcagcccatgccattacctcctgcttccttatcaggctgtgtgttaattctgggccagtctacaccctcccacggggtggaaatggcctggaggatgtgagggcacccctcctctgaagatccctgtacacgtggtgttgggactggaaccattatgcggccccataggcctcaggagtcatcccagaagcagtggctgggaggtggtgtcctaagtaaggatctgtgcagaggacaaataaatcagtttttgatttgtcttaaaaaaaaaaaaaaaaaaaaaaaaaaaaaaa

SEQ ID NO: 286096 - DNA, 1000 bp, Homo Sapiens; identical to SEQ ID NO: 221373

SEQ ID NO: 286097 - DNA, 1000 bp, Homo Sapiens
ggttactgccttctcccttgaaatccttgctgcgtgcccaccaggatttcctgtgagggcccaggaatgagcaaggcatggtctgccaccagctgacggaaagcagccttctgtacaacagatgggagggtgaagggggcagaatgaaaatcgaaccaaccttttagctgttgcaaatcagaaggagccagagaagcaggcagtctcatgcatgagaggttacccttcaggatgacagagctgagggtctttgtaggagttgctcttgctgtgtaaagcactattgtcttggggttgagccctagggcagttcttggtaggttctgctgggcagaacatatgggttaaatctcggtagagagtttccctcatcctctatccgtaagtgtccttccatgcaaggtcccactctaggtgatagacagggaccccttctactgaacctttgaggaaaggaggaaggaagaaatgcgtttagatcttggatgcagacctttcaaagggttaaatgtaaccatatggatcaaccacatgcacatccttactacagaatccgtcctttcatttcaacttatagcaagctatgatttttatatataaatattatataaataatgtataaaacattaaaagttaactatgtaagatattatttctgaaacaatttagctatatccactatgattataaactgtgtctcgacctgtgttatttacattagctgcttaaaaaagcattgagttaatttttttaaatatcaactaaaatatcatagttctgtggtagacattgttttataatgaaataactgcaactagagaaaactgtataaaaacattaaattgtcagtatttttgtaaggttccattttgtaaagagaataatattcaaagacttttgtagcatacaaagtgaaaacttgtatctgcgaaactatacttgtattaaatgtgctttttaaataaaagctcgtaacacaactaaaaaaaaaaaaaaaaaa

SEQ ID NO: 286098 - DNA, 1000 bp, Homo Sapiens
cacgttgactgttttactgacatcactcaaaagctaaagcaataacattctcctgcgttgctgagtcagctgttcatttgtccgccagctcctggactggatgtgtgaaaggcatcacatttccattttcctccgtgtaaatgttttatgtgttcgcctactgatcccattcgttgcttctattgtaaatatttgtcatttgtatttattatctctgtgttttccccctaaggcataaaatggtttactgtgttcatttgaacccatttactgatctctgttgtatatttttcatgccactgctttgttttctcctcagaagtcgggtagatagcatttctatcccatccctcacgttattggaagcatgcaacagtatttattgctcagggtcttctgcttaaaactgaggaaggtccacattcctgcaagcattgattgagacatttgcacaatctaaaatgtaagcaaagtagtcattaaaaatacaccctctacttgggctttatactgcatacaaatttactcatgagccttcctttgaggaaggatgtggatctccaaataaagatttagtgtttattttgagctctgcatcttaacaagatgatctgaacacctctcctttgtatcaataaatagccctgttattctgaagtgagaggaccaagtatagtaaaatgctgacatctaaaactaaataaatagaaaacaccaggccagaactatagtcatactcacacaaagggagaaatttaaactcgaaccaagcaaaaggcttcacggaaatagcatggaaaaacaatgcttccagtggccacttcctaaggaggaacaaccccgtctgatctcagaattggcaccacgtgagcttgctaagtgataatatctgtttctactacggatttaggcaacaggacctgtacattgtcacattgcattatttttcttcaagcgttaataaaagttttaaataaatggcaaaaaaaaaaaaaaaaaa

SEQ ID NO: 286099 - DNA, 1000 bp, Homo Sapiens
gaagaggatgaacttgaatctggagaccaagaggatgaggatgatgaaagtgaagatcctggcaaggatctagatcatatctagttttcaaatctctaggaacaatagagattatatcataactctgaagatggactctaaactttggtttacctccatggaaaataaagatttagaaaccaggtggaaaacattcactattaagactattgatatatttttgtaatgttgccacccatgttgaaaaccttaaaactgaatttatgtagaacacacatcttttatttaaatccatctgaactgtcccaaaatgtaatttgcaaagagcttcaaacaccaaaaatataccattttaaggcatgtggtgacaatgctatttgccttagttcattcgttgtttactttgcaaaatttgtgacttttaagtactaacacatttgattgaatgtgtattgaattggaattattatttctaaattcagcatttgagtccttagttgatgattttcttttaaagaaattagtttatttaaaagcaagatagcctgggttgggagttagtgcatatcatcagccctccatctaatgtgattgctaagatgtgcaggataggacagcttagaatgagtgccttgacacctacatatggctgcattccatacctcagtgaagaagccgaaggatgctgacacacagtgatgtggagggcattccggagaaacttttgcaacagtgtattaatgtgattggttttctttttgttttaagctaaacatctaaaacaaatttcaagttaacagttcatacaactcagatttagtattattgtttatcataaaacatattatgttcctagttttaaaaagacccaaagtatgattaatataatttattggcatttttgctgaataggtttaagtcagataatagattttaaaaaagcaaatgaggcaatgtgtccaaatttaatgtttcataataaaaatagatacgttgactt

SEQ ID NO: 286100 - DNA, 1000 bp, Homo Sapiens
ggaattttctgtcaactaccatgcccatgagatgtttatcaatacaactgccattttagctatgtggtaccaagattagcaaatgaccttcatatccactgatttcctgatgtccatgtctatatgtttacaagcaatatggagcaccattctttaaatactgttcatggagaatacatagtctaaccactaggcgtgtccctgttatcagcaaagatcaatgatgcttcattcatgtactatgtatgcattggtggtaaatggatgtgagggcaagtacatcaagtacattcactctgtttcacgtatgtggatgccagttaattaaatgagtacgtaaataaattaattaaaacacatagatctgctttgtgtttttatttttattttttgaaaaacaaaaggcaagtctccaacaattaacttttgatgctttctgttcccctaaaaccaaaaaatgaaccccttgtgtcgttgttaacccatcctttcatttactcatataattagccaaaaaaaaaaggatggctacataccaatggattgattctcttaattgccacggcaagggggcgatcctatcatgacttaacatcaagcgcgcagttcaaaactactgtcttctgtcaaagttttctcctcttaaatgttattttgcttttacgtctcaactgtgtatgtaaaaaaaacgaatatttaaattacaaccctagactaaaaatgtgtttataataagatgtggatatttccttcagtagattgtaaccataatttaaattattttgttccacactgttttttatatctgtcatgtacattgcattttgatctgtaactgcacaaccctggggtttgctgcagagctatttctttccatgtaaagtagtggatccatcttgcttttgccttatataaagcctacagttatggaagtgtggaaaactgtggcttctcaataaatattcagatgtcctaagaatataaaaaaaaaaaaaaaaaa

SEQ ID NO: 286101 - DNA, 1000 bp, Homo Sapiens; identical to SEQ ID NO: 221374

SEQ ID NO: 286102 - DNA, 1000 bp, Homo Sapiens
tgcccagaatttcatacttatggcctttacatgaatacgtcttgatcagacattcagagattagtcttaggtttgcacgtaagtcactgaaaacagtaaaacaggctgcttagatttctagcagtatgtgtgctcttatccccagctgttagcacgttagtaatacttttggggaggagttgtctgtcctggtcagttttcacagaggcggttgtaagaggatgtggttattttctccatgtctgtagttgctttgcggcatctccatttcacgggcaacactcactgcctgcagctgagattccagaacgccctgtgtccacagtgattagcctcgtctttcagcgagcataaaataggtgcattgtccttttcttttcttgaggcagggtctcactctgttgaccaggctggagtgaagtggtgtgatcccagctcactgcagcctcgacctccctggcttgagtgatcctcccgccccagcctcctgagtagctgggactagaggcacgcaccaccgcgcctttttattttttttgtagagacagggtctcactgtgttgcccaggctggtcttgaactcttggcctcaagcgatcctccttcctcatccttctaaagtgctgggattacaggtgtgagccacagcactcggcctaaataggtttttcttgctatgttattttcagtgctttgcccttgaattcttttcctctcttaaattcatatcatttggccgagtcagcacgtagtttgcattccagcgtctgctgttgattccactgaaacctctgttctcatgaaggagaggatttggctcgctgtggtttctcgtactttcacatctctgtagatacaggggcaaaagtcattgctgacagagccctatctatgtcctggaagtgtgtgtttcttgctttgaatgcatgtgtgaagattataaaagccaaatagtttttaaagatctcggtgctgaacgacagtcccagttcccatttgt

SEQ ID NO: 286103 - DNA, 1000 bp, Homo Sapiens; identical to SEQ ID NO: 116066

SEQ ID NO: 286104 - DNA, 865 bp, Homo Sapiens; identical to SEQ ID NO: 116067

SEQ ID NO: 286105 - DNA, 1000 bp, Homo Sapiens; identical to SEQ ID NO: 116069

SEQ ID NO: 286106 - DNA, 1000 bp, Homo Sapiens; identical to SEQ ID NO: 116070

SEQ ID NO: 286107 - DNA, 1000 bp, Homo Sapiens
ctcaactctctagaggggagaaacaacgcattgctattgctcgggccattgtacgagatcctaaaatcttgctactagatgaagccacttctgccttagacacagaaagtgaaaagacggtgcaggttgctctagacaaagccagagagggtcggacctgcattgtcattgcccatcgcttgtccaccatccagaacgcggatatcattgctgtcatggcacagggggtggtgattgaaaaggggacccatgaagaactgatggcccaaaaaggagcctactacaaactagtcaccactggatcccccatcagttgacccaatgcaagaatctcagacacacatgacgcaccagttacaggggttgtttttaaagaaaaaaacaatcccagcaggagggattgctgggattgttttttctttaaagaagaatgttaatattttacttttacagtcattttcctacatcggaatccaagctaatttctaatggccttccataataattctgctttagatgtgtatacagaaaatgaaagaaactagggtccatatgagggaaaacccaatgtcaagtggcagctcagccaccactcagtgcttctctgtgcaggagccagtcctgattaatatgtgggaattagtgagacatcagggagtaagtgacactttgaactcctcaagggcagagaactgtctttcatttttgaaccctcggtgtacacagaggcgggtctataacaggcaatcaacaaacgtttcttgagctagaccaaggtcagatttgaaaagaacagaaggactgaagaccagctgtgtttcttaactaaatttgtctttcaagtgaaaccagcttccttcatctctaaggctaaggatagggaaagggtggatgctctcaggctgagggaggcagaaagggaaagtattagcatgagctttccagttagggctgttgatttatgctttaacttcagagtgagtgtaggggtggtgatgct

SEQ ID NO: 286108 - DNA, 1000 bp, Homo Sapiens
gcggccagaaccttcctcctcttcctcctcctcgcccgcggcccccgcgcgcccgcggccgtgccccgcggtcccggccccggcccccggcgacacgcacttccgcacattccgttcgcacgccgattaccggcgcatcacgcgcgccagcgcgctcctggacgcctgcggattctactgggggcccctgagcgtgcacggggcgcacgagcggctgcgcgccgagcccgtgggcaccttcctggtgcgcgacagccgccagcggaactgctttttcgcccttagcgtgaagatggcctcgggacccacgagcatccgcgtgcactttcaggccggccgctttcacctggatggcagccgcgagagcttcgactgcctcttcgagctgctggagcactacgtggcggcgccgcgccgcatgctgggggccccgctgcgccagcgccgcgtgcggccgctgcaggagctgtgccgccagcgcatcgtggccaccgtgggccgcgagaacctggctcgcatccccctcaaccccgtcctccgcgactacctgagctccttccccttccagatttgaccggcagcgcccgccgtgcacgcagcattaactgggatgccgtgttattttgttattacttgcctggaaccatgtgggtaccctccccggcctgggttggagggagcggatgggtgtaggggcgaggcgcctcccgccctcggctggagacgaggccgcagaccccttctcacctcttgagggggtcctccccctcctggtgctccctctgggtccccctggttgttgtagcagcttaactgtatctggagccaggacctgaactcgcacctcctacctcttcatgtttacatatacccagtatctttgcacaaaccaggggttgggggagggtctctggctttatttttctgctgtgcagaatcctattttatattttttaaagtcagtttaggtaataaactttattatgaaagtttttttttt

SEQ ID NO: 286109 - DNA, 1000 bp, Homo Sapiens; identical to SEQ ID NO: 116071

SEQ ID NO: 286110 - DNA, 1000 bp, Homo Sapiens; identical to SEQ ID NO: 116073

SEQ ID NO: 286111 - DNA, 1000 bp, Homo Sapiens
cgttaagtctcaagataatggatttaaactggtgtcttaaataggtttgatcacattcaaggattattatacttgtgcttcaaccaatctaaattggattctttaatgttgtttcaccataacacaaaaagcatgaacttgtattaatcctatataatagattgatcatgcaccatatccacaggaggttggaaaaaccatgccattttctggaatttaagggtgttgcattatttcatcaatcatttgttgacaaaaaagaaaaactaaaaaataaatttaaaatgtgaaccttcaggtattgagtaacacctttatcttggtatagaactgataccattttttgattttgaaatatctgataataatttggaatgaagtaaggttctgttaaaatatatttgaagaccctttaaagcagtgaatctgaaacaattttcacacccttaagtggttgatacgtacctattttaggtattttgaggtatttaccataaactaaatttagaaattttttagattcacttgaagtaaacattacaaacattggatacggtggggttttctttagattttacttgagagaaggtgagtacaaagcaatttgcagttgttgtaatgacaagattactgcgcaagtgtgaatccaaacagtatagcttttaaattttaaagcatttggtaaattatcgctgagtttttttctgttgccaatagcaaactgcttttccattaatggagaattcatgcctttcaagcattttaaatatgacaatatttataaatgtatggtttggaggaatcgtttaaattctctttcctaattttctttcttttgaagatagattctttcaacaagtaatttgtagtaatgactgtgttgacttcaattttggagcgcagtagctatgttaaagatgaactatttggtctcattgaagccaacacagaacttgctgctgtgttttttcttcagtgataaataaaatacttacagaaa

SEQ ID NO: 286112 - DNA, 1000 bp, Homo Sapiens; identical to SEQ ID NO: 221380

SEQ ID NO: 286113 - DNA, 1000 bp, Homo Sapiens; identical to SEQ ID NO: 116075

SEQ ID NO: 286114 - DNA, 750 bp, Homo Sapiens; identical to SEQ ID NO: 116076

SEQ ID NO: 286115 - DNA, 1000 bp, Homo Sapiens; identical to SEQ ID NO: 116078

SEQ ID NO: 286116 - DNA, 1000 bp, Homo Sapiens
accttccgaccgacgtgcgcgagaaggacttggaggacctgttctacaagtacggccgcatccgcgagatcgagctcaagaaccggcacggcctcgtgcccttcgccttcgtgcgcttcgaggacccccgagatgcagaggatgctatttatggaagaaatggttatgattatggccagtgtcggcttcgtgtggagttccccaggacttatggaggtcggggtgggtggccccgtggtgggaggaatgggcctcctacaagaagatctgatttccgagttcttgtttcaggacttcctccgtcaggcagctggcaggacctgaaggatcacatgcgagaagctggggatgtctgttatgctgatgtgcagaaggatggagtggggatggtcgagtatctcagaaaagaagacatggaatatgccctgcgtaaactggatgacaccaaattccgctctcatgagggtgaaacttcctacatccgagtttatcctgagagaagcaccagctatggctactcacggtctcggtctgggtcaaggggccgtgactctccataccaaagcaggggttccccacactacttctctcctttcaggccctactgagacaggtgatgggaattttttctttattttttaggttaactgagctgctttgtgctcagaatctacattccagattgaggatttagtgtcttaggaaatttttttaattttttttttttaaagaagaaaaaaaactacataatttctaccagggccatattagcagtgaaacattttaaactgcagaaattgtggttttggttcagaaacaagttgtatatttttcacccctgattatgggaaaaaaatcagttctgtctttgtgggttgctctactatggagatcaacagttactgtgactgagtcggcccattctgtttagaaatatattttaaatgtttagtaattgaaaaaaaaaaaaaaaaaaaaaaaaaaaaaaaaaaaaaaaaaa

SEQ ID NO: 286117 - DNA, 1000 bp, Homo Sapiens
atgaaggctgccatagttatcttttcttgtgttaaccatcttaaatgatgttttgtatattttaatagactgataggatgagaaagatttatattattagatttcaggatgatttataataattcaaaaatgaaattcaataatggggaaataattatgaattatagaaattatgccttcattctcttacatttgtgtgggttgcaagagggggagattattctggaaatgaagtaaatatgggaagttattgccaaatgagagagaaactatgggaaagctgatctataaagaggcattctgatcaattcatttgtaggaaactgggaaataaaaacctggggaactttaggttatttatacaagggaataaataggctgattttaatttggtaagttgatctttttattatgaatttggtaatagtataggtttattatttattcatctaattttatagtacaggttttgtaatgttacatgtgatgatatgagctcccaccttatatgggggaacatcttgggaatttgagatttaataagtttttttttttttttttttagtgtttttactgcatactcacaaatgttgtctataatttgaaaaatattgtcatatctggccctttgatgagaaaaggaaattacaataataaagttttatgattttaaataagtcatatgtttgtatcctgttttatgaagaaagcagaaataattactgaaagtgccagacactaaggaatattattgtttattattttaatacatataaaaagggattaatctgctaaaatgtaatctaaatcagaattttgataaattttttttgtaaactaagtatgtttattcaagacattgaaactactttgcacatatgaatattaatgtaacttgtaatttaaaagtaaagtgtttccatgctatttcatgttttggccaaaaatttttaaaaaataaattacaattgttctctattagtaaaaaaaaaaaaaaaaa

SEQ ID NO: 286118 - DNA, 1000 bp, Homo Sapiens
tctttttatttatttttggttttcttgttagccacctgttatatgggagaacgaaaattgttatattttgaaagtacttattacattatttttattttagtatcttgatgctcctgtcaaaagggaaatgaggcttttaaaaataaagtaccttaattctttattgactttttgccctaaattgctaggtgtgacccagcaatcttttaggaagagattttacagtggtgctttatttatatcaataatccagtatagttaggctgttcattcctcataatagagtacataacagaaaagtgggactttcacattttcatatttaggcacgttccaatttaattccaaaaatactctgtaattctacatctaaaaaaaccgattccctaattcgaatttattggtaccaaagctctctttggctatagacaattaagagttgaccttttaagttaatgtatatgcttaaaaacagttttaggaaaatatttggtagacaaagagtttcaactttaaatgttcactatgtcatttagtgtccaactttacggataggttgactatctaaataggcatttttagtcattaaaaaaaatctagtcaccaggaggatccctataactcaaaataacttgtttgtaaaagaaaatttgtttacttacccattagtaagttcctgcatattcattataagatggcaaatcaaacttttctaggatgaagacagcttatttttaagttgtatagtcttagttggtttagggtctcaattttaattaataaaatacttggtttttatttgcttgtccttttgaattcctgttttaataattttaaaatgagcacaaagaacgttgaagttcagattaatctcttctgaatgatgtttttttcctctgtgatgagttgtttctgacttttttccttttgtatttgtaatgttgattaagatgtaaaataaaaagtgtgcctgattatttttgcaaaaaaaaaaaaaaaa

SEQ ID NO: 286119 - DNA, 787 bp, Homo Sapiens; identical to SEQ ID NO: 116079

SEQ ID NO: 286120 - DNA, 1000 bp, Homo Sapiens
cagtccttcttaactgcaatcatgcagacgatggctcgaaaaaatgagtggcccctggataaaacgcgcttgactgctgatgttaccaaaaaaacaaaggaagattatggacacccgccaagggaaggtgcatacctccacggactcttcatggagggcgcccgctgggacacccaagcaggaaccattgttgaagcccgtctcaaggagctggcatgccctatgccggtcatctttgcaaaagccacccccgtggacagacaagaaaccaaacagacctacgagtgccctgtgtatagaaccaaactgagaggccccagctacatctggaccttcaggctgaagagcgaagagaagactgcaaaatgggttctggctggagtggctctgcttctagaagcgtaaggtaacactggcattcctctagcctctgctggagtgcagtgaggattttctagcatgttgctgcactgttcccatgcacattattctaactttttagtaactcacacgtgcattcttttttcaacgctatccttagagtgaaagtcagaaaaaaatactagaaactaactcagggctgagcgtggtggcacacgactgtaatcccagttactcaggaggtaggagaatcacttgaacctaggaggcaaaggttgcagtgagccgaggttgcaccactgcactccctcctgggcaacagaacaagactccatctcaaaaaaaaaaaagtacatcataaaagtacatcatatgtgaacatgcaaaagcaatgcagccggaaagaacggagattttaatttttaacaaacaacaaattaaattattagcccttaaactctttcaaaatataaaagcagcaggccccaggtgagtcctgaaggaagaggctagcactctgtaaggcctccagtgtccagtgtctacaatgttgatggtccccttttgttcagtcaagttttaataaaaataaaactgttctacagttaattgcaaaaaa

SEQ ID NO: 286121 - DNA, 1000 bp, Homo Sapiens
tacccccagtacttcggaggagtctcagcacttactcctgaccagtacctgaagatgaatggcttccccaatgaatactggggctggggtggtgaggatgacgacattgctaccagggtgcgcctggctgggatgaagatctctcggccccccacatctgtaggacactataagatggtgaagcaccgaggagataagggcaatgaggaaaatccccacagatttgacctcctggtccgtacccagaattcctggacgcaagatgggatgaactcactgacataccagttgctggctcgagagctggggcctctttataccaacatcacagcagacattgggactgaccctcggggtcctcgggctccttctgggccacgttacccacctggttcctcccaagccttccgtcaagagatgctgcaacgccggcccccagccaggcctgggcctctatctactgccaaccacacagccctccgaggttcacactgactcctccttcctgtctaccttaatcatgaaaccgaattcatggggttgtattctccccaccctcagctcctcactgttctcagagggatgtgagggaactgaactctggtgccgtgctagggggtaggggcctctccctcactgctggactggagctgggctcctgtagacctgaggggtccctctctctagggtctcctgtagggcttatgactgtgaatccttgatgtcatgattttatgtgacgattcctaggagtccctgcccctagagtaggagcagggctggaccccaagcccctccctcttccatggagagaagagtgatctggcttctcctcggacctctgtgaatatttattctatttatggttcccgggaagttgtttggtgaaggaagcccctccctgggcattttctgcctatgctggaatagctccctcttctggtcctggctcagggggctgggattttgatatattttctaataaaggactttgtctcgc

SEQ ID NO: 286122 - DNA, 1000 bp, Homo Sapiens
atgcataaatcaatggttcaagtcttctgttagggggccaataaaatgtatctgcatatgttttccacataaattttaattcaagaaatgacagtcaaaagatccttcattttagattaagcttttcattttaatatataatttaatgtaaataaaacatcactatcaattttaaggaaactttttaattgtgcaaaggataaattttttgacctattttagggttctaaatgcaataagatttagttgagttattccacaaacacattataaagttcagatgtttcatcaatgcagttctcacgaaagtatttactttttaaaaataactgagatattattttaaatttcttttattaatactttcttttattaatatatgggggaaaattattttgacatgacgtggtaaaatgtgaaaaactaatgtgtctcaggctcaagtttttatagttattaaatgtttcaaaatagacaagttttgtttcctcattgatgttaagaaccaaactcctatttcaatgagttattggattagaccaattactgcactcttaaacagcaccaccatttaatttcatgtaatatctaacttcgaatatatctgtaaaggataatcgaagcaaaagtaatcacttaaaggcacaaataggatgtactgttgaaaaagataaagagtgcaggtgcagtttcattcaacacatttttaagatgcatgtctgccaaaatgcaacatacgggaagtttatttcctgacagcaggtgtacacatgccaacacttaatcattttatggcacctatttctttcttggagtgccaagtttgcaaacctgcagtttttaatttggtagatgacaaatattctgaatcaccaattaaaaacctttttgggagggatggggaaaactacaaacgtttgacaaacacaattctaggatgaacaatgtatacaatgcacttttatgaagtttttaaaaataaaggaaaacaaaaaacttt

SEQ ID NO: 286123 - DNA, 1000 bp, Homo Sapiens
ctgaaagatatctttgatgaatccaaagcagatctctctgggattgcttcggggggtcgtctgtatatatcaaggatgatgcacaaatcttacatagaggtcactgaggagggcaccgaggctactgctgccacaggaagtaatattgtagaaaagcaactccctcagtccacgctgtttagagctgaccacccattcctatttgttatcaggaaggatgacatcatcttattcagtggcaaagtttcttgcccttgaaaatccaattggtttctgttatagcagtccccacaacatcaaagraccaccacaagtcaatagatytgrgtttaattggaaaaatgtggtgtttcctttgagtttatttcttcctaacattggtcagcagatgacactggtgacttgacccttcctagacacctggttgattgtcctgatccctgctcttagcattctaccaccatgtgtctcacccatttctaatttcattgtctttcttcccacgctcatttctatcattctcccccatgacccgtctggaaattatggagrgtgctcaactggtaaggagaacgtagaagtagccctagggatcctttttgaaactctacagttatcgcagatattctagcttcattgtaagcaatctaggaaataagccctgctgctttctagaaataagtgtgaaggataaattttctttgttgacctatgaagattttagagtttaccttcatatgtttgattttaaatcagtgtataatctagatggtaaaaaatgtgaaattgggattagggacctaccaaaatatttcattaatgctttcaattgacaaattttggcctttctttgataagacaatatgtacatgttttttcaaatattaaagatcttttaactgttggcagttgttatctacagaatcatatttcatatgctgtgtagtttataagtttttcctctatttatcagaataaagaaatacaacatacctgtaaa

SEQ ID NO: 286124 - DNA, 680 bp, Homo Sapiens; identical to SEQ ID NO: 221385

SEQ ID NO: 286125 - DNA, 1000 bp, Homo Sapiens; identical to SEQ ID NO: 117714

SEQ ID NO: 286126 - DNA, 1000 bp, Homo Sapiens; identical to SEQ ID NO: 221386

SEQ ID NO: 286127 - DNA, 1000 bp, Homo Sapiens
aatgaagattaaatattataatttgaggttttggggactggtgctgattccaaaaagttaatttaataatatataccaacagattgtttgtcacgcttctgaaccaatgactgaatgtcaagatgttcgttaatttctagatgtttgtttcaagaccagctgtttcagatctattaatgtagggaatttttccctaagattgaattcctatatttacttggtaagatccactaatctgttatagggagttgttttctcttgccttatagttgagctatttggtttgacaaagctcagcagaaacttgatgtgaaaaatctacgattttcttctacattcattgatgccccttgtaatgtttgcatacactagaaaatgccttcaatttgtgttttaccagaattttgatactggtcagaaattttatactgccaacaaagaagactcaacttctcagatctataatgggatacattgtcatcctctagcaactcctatatagaaagttttaactgaatatgttacatataagaattaaattcttctcaaataattcttaacctcagtaatgagcctaaatttactctgcttggctctctacacatggcatttcagggtataagatgtagcatttcaatgtgtaagatatatgtactaaacatatgtgttgctatcttcatcattaacatccttcttttctattgcttggctgtaatttttgtaaagataaattatattgtttttttgtatgtgtgtttgtagtatatgttcagaaggcaagcatcttcattttgctagctttgcagaatcttaaaatgtgtactcgttatttctaatgatgtaaaaaaaaatccctagtcctgtttagcatttgacttttttatatgttttaaatgttgctggatttttgtgctgtttgccaaacttatacaataaataaatgaaatattgtgctgaaaaaaaaaaaaaaaaaaaaaaaaaaaaaaaaaaaaaaaaaaaa

SEQ ID NO: 286128 - DNA, 1000 bp, Homo Sapiens
caagacaaatcttcctattttcaagctgaaagaatctactgttagaagaagatacagtgactttgaatggctgcgaagtgaattagaaagagagagcaaggtcgtagttcccccgctccctgggaaagcgtttttgcgtcagcttccttttagaggagatgatggaatatttgatgacaattttattgaggaaagaaaacaagggctggagcagtttataaacaaggtcgctggtcatcctctggcacagaacgaacgttgtcttcacatgtttttacaagatgaaataatagataaaagctatactccatctaaaataagacatgcctgaaatttggcaagaaggggcaaaaacgtgactattaatgattgataagcaccagtgaagaagttctaacttttagcatgctgcacagaaactggtataacatgccttcagtatactaacactcatatgctcagttttgttttgttttggcagttgacaagaagttaatttgctttagtaaaaatccctcattccagcctttctatataaatagctctttcttgctgttttaatgtggtgcacactatagcctcacaaacctgttattccagtgtaatctgcagtgtcgtaactaaagttactggcttggtcttatttgcacagtttttgcgtcttgtttgcttcttgcatctgattaactagaatatttctctttcccccttttaatttgtgatgtcacttgaccccatttatgtgtaggagcactacaccattggtttccaatactgcacacataagatacatacttgtgtgcagaaagtatcttcctccaggcttgtaatacccttcacatggaagattaatgagggaaatctttatattctgtataaaaacaaaagcaaatttatatactaaaatcatttgtctaaaaatttaagttgttttcaaataaaaattaaaatgcatttctgatatgcaaaaaaaaaaaaaaaaaaaaaaaaaaaaaaaaaa

SEQ ID NO: 286129 - DNA, 1000 bp, Homo Sapiens
tgacagctaatgtttattagcctcctacctaagtcagtcactttgctaaattcttcacctgtggtaactcattttgattgttataacatctcagcaccattattcccattttaatgatgaggaaactgagtcatagaggatacagacttgcccaaaggagagccaggattttcacaccccctcctcaagctgggcctgccctccaagtgcttgttatatacctccacgggtgtcagcccagatgactcctcacccatccaccacctgcagcttgagatgttaactattagagctccattcttttggttcaaaacgttgatacttacttagatgttccctgagaggagtgtttatttctgagtaaggggctttgttgaaagagggggttagagagagcaagacagcacttgagtgcactggcaggaagcagagataagacttgaatttcagtttggtagaccaccttctttagcagcccaacctgtagcaaatctagtttagcctgcatggcagggagagggattctcttcccaccctcaccatttgcaagtggcaggagctgagaatgccagtacgagagtgtagccaaagtgagaggctgagagcaaaggagacatttttttcagttttgagtcgagtatccagacagaggcaaatcattttgtttaactttttattaaagtgtaactatagaaacacatcaatgatttttcacaagtggagcacgtgcatacaatcggcaccccagaagccccccgtcagattcccttccagttaactacctctccaagggaaaccactatcctgagttctaagcgcatagattagttctgtctggtttggggagatatataaatggaattatgcattcttcgtatctggtttcttttcaccaatattatgtttgtgagatttttgttgcatgtatttgtacatggattttcattctcatggttgtataatatttcattgtgtgaataaaccacatactgtttatctg

SEQ ID NO: 286130 - DNA, 1000 bp, Homo Sapiens
tagcacagatgaaccaaaaatgtatttatattcacctgagttttaatgtttttaaacaaagttttctcctgcagtgcttttctatatgaaatagttgagtcaagcttgggcttttttcttcgttgttcccaagtcatgtaatgtatagtgaatttatccaaaacgccattgtaacgttttttactagagtgtttttgcacatttgggcgctaaagggattaaaacaactgatgccacaatgactattgaaggagggaaaattctcaaggttccatagtatctttacaaaatggattaaaaaaaaatgcctatgcaacttcaaatagtctgatgcctgcttccccaggacgagtgactcttccacggtgtgctgctttccctccgagcctgtggaaaggcagagcccttttgcagatacgaaagcaagcttttgccaatgatctttaatggagttaaaatgtttatggtaattgtaacctttcaaatgagttacgtgaaaagagcatctcacttttaatacacccagatattttcttcaagtctttgcgcatttttagcaggacttaattttcctaaatttattctttcctttcaattatagtgacatagagtagttggccttataagtagatcccatttagcccctgaacataataccatctgcagtattataaaagtcatttagaaggtcagggggataatctagaggcaggattttggacattgtgaaggaaatgtgctccttctcagctcacttcaataactattttctgagactgaagttttttagacaagaataagaaaactttgctttcttcagttatcacatgtgaaagcttttgctttttgttaggaaaaggtgtggatgactctactgcgtggatggttacatttgctttccgtgaaatgctcagaaaatgtcaggacattccttttccaattgtgtgtcagtgcgtattgtaataaaactactgatggaattccggaaaaaaaaaaaaaa

SEQ ID NO: 286131 - DNA, 1000 bp, Homo Sapiens
gatctggctacaaatcaacgagcccaccccgaatgacaaagggaagtatgtcatggagctctttgatggcaaaactggacatcagaagacagtggatctctctggacaagcatacgatgaggcctatgctgaattccagaggttgaaacaagctgccattgccgagaaaaatcgtgcccgggtgttgggaggtctcccagacgtggtcaccatccaggaggggaaggcccttaatctcacttgcaacgtgtggggagacccgcctccggaggtgtcgtggttgaagaacgagaaggccctggcctcagacgaccactgcaacctcaagttcgaggctgggaggaccgcgtacttcaccatcaacggcgtgagcaccgctgactcgggcaaatacgggctggttgtgaagaacaagtatggctcggagaccagcgacttcaccgtcagcgtgttcatcccagaggaggaggcgaggatggccgccttggagtccctgaaaggtggcaagaaggccaagtgaccggaggtgcgaggagagccagccggcctgtgtgacttgggtgtgaatggtttgggttaaggatgagacgtcttcatgctttctcctccctattattttctggcttgaggggaaaataatgtcaggtctttcactcatataaaaaagcaccaactaatgacactttaattgtttttctttatctacaaaattatgtgttaagaaaataccattcatagcatgaagattaggaaacagttttaaggagaagacttgaatgaagttggagggacattgaatgatggtcagagggcagacgaatgtgtcgtggggcgaattgggatttgctgcagctgtgaagccatggccgtgtctcgtgtgttgttacagaggtgatgtgcttttcgacgggcgcctcgtggcttggaacctcctctgtatgaataaacagttttcacgtctgtcctcttccccgaaaaaaaaaaaaaaaaaaaaaaaaaa

SEQ ID NO: 286132 - DNA, 1000 bp, Homo Sapiens; identical to SEQ ID NO: 221387

SEQ ID NO: 286133 - DNA, 1000 bp, Homo Sapiens; identical to SEQ ID NO: 116084

SEQ ID NO: 286134 - DNA, 1000 bp, Homo Sapiens; identical to SEQ ID NO: 221389

SEQ ID NO: 286135 - DNA, 1000 bp, Homo Sapiens; identical to SEQ ID NO: 221390

SEQ ID NO: 286136 - DNA, 1000 bp, Homo Sapiens; identical to SEQ ID NO: 116085

SEQ ID NO: 286137 - DNA, 1000 bp, Homo Sapiens
tttttttggagggtattttttatttgtgggttcaaaaaatctgtatatacagtctatgtgtttagaatttgtgttgtaagtaaactacagctttgagttggaaagaagtcacgggttgtaaaaccatttggatttttttaaaacaaaagtattaataatctggaagacagtgttgcccaggtcaggagtgttttcttggtggttccagcccccatcaattgaactgtttctgggctcagtcagacacagacattcatctgtgtctgaccaaatcaggggacttccccacctgtggtgggaggcacagcttagatgttttgtacacctggtcttttctagaaatccctgcttggagctgcagaagggttgccttctgtaggtcggaggaatggaggcttactaaccaggtaagccttctatgcatccacaccaaaatcctgcagaatgtaagtaagctctgctttataagatgggttcaccttcatcgcagactgaaagtttcagtttttatttttttcagaaagcacgaaaaattatttataatagtctggagaaaaaacacactgtaatatttcaagtgtatgcagtagaatgtactgtaactgagccctttcccacatgtctaggctccaatgtctcctgtaggtccacctaactgtgtgttttcagggacaatgccatccatgtttgtgctgtagacttgctgctgctgaatcctttctggggactttctcatcgggcagggagcagagggcttctcgttcatgcaccctttgcctgaacacccatgtagctgctgtgttgtgtatatattactcttaagaggagtgtgtgtgtctgtgtttgttttaaaagtcacttatttcttacagtgatttcaattgcaccatgacttcttcactaaaaccacaaagtcctgcttaaaactatggaaaacctaacctgattagagccttgactattttgaagattaaatgcacactttttatataaaaaaaaa

SEQ ID NO: 286138 - DNA, 1000 bp, Homo Sapiens; identical to SEQ ID NO: 116086

SEQ ID NO: 286139 - DNA, 1000 bp, Homo Sapiens
cagcccgggccagagggtgcagaagggaggcaccgagagtcaggacaccctgtgtcagaactgccccccggggaccttctctcccaatgggaccctggaggaatgtcagcaccagaccaagtgcagctggctggtgacgaaggccggagctgggaccagcagctcccactgggtatggtggtttctctcagggagcctcgtcatcgtcattgtttgctccacagttggcctaatcatatgtgtgaaaagaagaaagccaaggggtgatgtagtcaaggtgatcgtctccgtccagcggaaaagacaggaggcagaaggtgaggccacagtcattgaggccctgcaggcccctccggacgtcaccacggtggccgtggaggagacaataccctcattcacggggaggagcccaaaccactgacccacagactctgcaccccgacgccagagatacctggagcgacggctgctgaaagaggctgtccacctggcggaaccaccggagcccggaggcttgggggctccgccctgggctggcttccgtctcctccagtggagggagaggtggggcccctgctggggtagagctggggacgccacgtgccattcccatgggccagtgagggcctggggcctctgttctgctgtggcctgagctccccagagtcctgaggaggagcgccagttgcccctcgctcacagaccacacacccagccctcctgggccagcccagagggcccttcagaccccagctgtctgcgcgtctgactcttgtggcctcagcaggacaggccccgggcactgcctcacagccaaggctggactgggttggctgcagtgtggtgtttagtggataccacatcggaagtgattttctaaattggatttgaattcggctcctgttttctatttgtcatgaaacagtgtatttggggagatgctgtgggaggatgtaaatatcttgtttctcctcaaaaaaaaaaaaaaaaaaaaaaaaaa

SEQ ID NO: 286140 - DNA, 1000 bp, Homo Sapiens; identical to SEQ ID NO: 116087

SEQ ID NO: 286141 - DNA, 1000 bp, Homo Sapiens
ctgctccaaagagaaaaatagaatgagttttctttcttttttttttttttggagtcagagtctcgctctcttgtccaggctggagtgcaatagcgcgatctgggctcactgcaacctccgcctccctggttcaagcaattctcctgccttgcctcctgagtagctgggattacaggcgtgtgtcaccacgctcggctaatttttgtatttttagtagagacagggtttcaccatgtcaagctggtcttggactcctgacgtcgtgatccacccgccttggcctcccaaagtactgggattacaggcgtgagccactgtgcctggctgagttttcttaaagtgagcttaatttctgaactcttagtgattcatatatgtacataaatctgtgatcccatttcttattgcaccattcaggaacactttatataaatgagtggctttttatttcatattattagtagtatcatggttccattacaggcctattaacatcatacattgtcattagtctttgaagaaaaaatatgtaaatatatatgtgtaacatgagaatttctctctaaagcagggcttaaaattttttggaaaagtttgacaaagcataccacatgaattcagatttacctcaatgctaagaattatgtttagttaggaaaaaggaaagtcattttgacctcaggtagaaaaatagattgctttgagttttatgtagctttagactttaaaaagttagaatttattctgtaactaaaaattatttgaaaaaattatgcctctggtttaattattggtgattacacactctttctcttacccttgtgtattgaactatgtccataatcaagttgatgtggatcctgaaaagtgttatgaacatctgattggtatttgtcacatttattttaaaattagcatctgaacacttcaaagctgtcagtgtgtattggtttcaccaataaccactgcttgatccttacaattaaattttttaactaac

SEQ ID NO: 286142 - DNA, 1000 bp, Homo Sapiens; identical to SEQ ID NO: 116089

SEQ ID NO: 286143 - DNA, 1000 bp, Homo Sapiens
gatcacctttatagctgtctttttgggacctttttgtgcaactgtgaacagcagcgattcaaagaggatgtatatacaaagacgatatctttatggtcgtatatcaatagccagctagacgagttttctaatcccttctttgtgaattatgaaaaccacgtgttatatcctgttgctagtctgagtcatttggaattgtgggtaaattattatgtacgatggaatccacggatgagacctcagatgcccattcaccagaatctcaaggagctgctggccgtcagggcggagctgcagaagcgtgtggagggcctacagcgggaggtggccacgcgcgccgtctcatcctcatctgagcggggctcctcgccctcccactccgccacctccgtccacacctcggtctgatgggcgagaaatatgtaatcccctggctgactaggactgttaaacatagtgtggactggatgatgccttcgacaaaccagagaagccaagttggggggagctggtgcctggagtgggccctgtgcacctcacctggcggaggctggggggggctctgtcagcaggaccctagaggagactctcattcgattttaaagaagcacaacgggtcattttcctttgtatgttcctagcgcagaactgtttctaaaacaacttgaagtatagttttgttatctaagcaatttttgttttaagtaagtaagtgtactagaatgcgaagccgttatggttcaggtttttaaaaactggtacagtattgtatttgtctcatctgttgcactgtatttcaatcatctgtaattaaaatgatcatatgtttgctccctggtcttttttaagtaagtaagtaagtatcttagtagatttttcctttgaggaaaatcggtaataaaataacatggattgaatgtttactgtgcgtcaagcacagttaatatatgatgatgtaaagtaactaactttatgtgatttaattcattcagtaaattgt

SEQ ID NO: 286144 - DNA, 1000 bp, Homo Sapiens
gaatcagcatcgctggaggagtaggcagcccacttggtgatgtgcctatatttattgcaatgatgcacccaactggagttgcagcacagacccaaaaactcagagttggggataggattgtcaccatctgtggcacatccactgagggcatgactcacacccaagcagttaacctactgaaaaatgcatctggctccattgaaatgcaggtggttgctggaggagacgtgagtgtggtcacaggtcatcagcaggagcctgcaagttccagtctttctttcactgggctgacgtcaagcagtatatttcaggatgatttaggacctcctcaatgtaagtctattacactagagcgaggaccagatggcttaggcttcagtatagttggaggatatggcagccctcatggagacttacccatttatgttaaaacagtgtttgcaaagggagcagcctctgaagacggacgtctgaaaaggggcgatcagatcattgctgtcaatgggcagagtctagaaggagtcacccatgaagaagctgttgccatccttaaacggacaaaaggcactgtcactttgatggttctctcttgaattggctgccagaattgaaccaacccaacccctagctcacctcctactgtaaagagaatgcactggtcctgacaatttttatgctgtgttcagccgggtcttcaaaactgtaggggggaaataacacttaagtttctttttctcatctagaaatgctttccttactgacaacctaacatcatttttcttttcttcttgcattttgtgaacttaaagagaaggaatatttgtgtaggtgaatctcgtttttatttgtggagatatctaatgttttgtagtcacatgggcaagaattattacatgctaagctggttagtataaagaaagataattctaaagctaaccaaagaaaatggcttcagtaagttaggatgaaaaatgaaaatataaaaaaaaaaaaaaaaaaa

SEQ ID NO: 286145 - DNA, 1000 bp, Homo Sapiens
gagctagtgaagcgcttcgtgaaccagattgtggacttcctagatgtgtcccccgagggcacgcgggtggggctggtgcagttctcgagccgcgtgcgcaccgagttccctctgggtcgctacggcaccgcagccgaggtgaagcaggcggtcctggccgtggagtacatggaacgcggcaccatgacagggctggcgttgcggcacatggtggagcacagcttctccgaggcgcagggtgcacggccccgtgcccttaacgtgcctcgtgttggcctggtcttcacggatggccgctcccaggatgacatctcggtgtgggcagcgcgcgccaaggaggaaggcatcgtcatgtacgccgtgggcgtgggcaaggcggtggaggcggagctgcgcgagatcgcctcggagccagcggaactgcacgtgtcctatgccccggacttcggcaccatgacgcacctgctggagaacctcagaggcagcatctgtccagaggagggcatcagcgcagggacagagcttcggagcccatgcgaatgcgaaagcctcgtggagttccagggccgcacgctgggggcgctcgagagcctgacgctgaacctggcccagctgacggcgcgcctggaggatctggagaaccagctggccaaccagaagtgagggccacggacggcccagacccgggctggggcgcggcaccacggacggtgccccttgcgcgccatcggtgcgccggggccaggcagaacctgggcccgtccggcttgggctgtcggggcggaggcgctggcgggcttccggcattgagctgagttggcctcgcccggaccattaggcggactgcggcgtcagggggatagcgggtggtgagggaaggggcacgtgctagaccggcacgccctcgccgcgtgctgcgctcagttctttgttggatttcttgtttgtgttcttaaaaaaataaaaaaaactgatttccacggaaaaaaaaaaaaaaaaa

SEQ ID NO: 286146 - DNA, 1000 bp, Homo Sapiens
tccagcccaagccctgtcatcctgagacagctggaagaggaagccaaggcccgagaagcagccaacactgtggacatcacccagccgggccagcacatggctcccagcccccatctgaccgtgtacaccgggacctgcatgcccccgtctccttctagccccttctcctcctcctgccgctcccccaggaagcctttcgcctcacccagccgcttcatccggcgaccaaccatctgcccctcaccgatcctagtggtcttggatagctcatcgggcttggagcagaaaggggagtgcagctggtctggtgccaaccctgggccctctgtcaccgacagcagcgaggcctcccgcgacacctcctggactcgcagccggcccagggcccctctcaaggcccgcatggctctgtccttcagcaggtttctgagacgaggctgtctggcttcacctgtctttgccagggtgtcacccaagtgccctgctgtgtcccacgggagggtgcagcccctgggggacgtgggccagcagctgccacgattgaaatccaagagagtagcaaactttttccagatcaaaatggatgtgcccacggggagcgggacctgcttgatggactcggaggatgctggaacaggagagtcgggtgaccgggccacagaaaaggaggtcatctgcccctgggagagcctgtaaggaaagaggcaggctgagttgggggctctggaccaggaagatgttctgacagatgccatggtatgggccacaggacacacttgctcgagaaccaaagtgcatttgggtgacatttgaagattggggagacaagatggggtagattgtggcaaagaatgctctggctggttaccaggggccaactccttctcctcttcctgaccctccctcccctgggcagaagaaacgcatgtggaccagaagactttccctgctgccttaaaaccaataaaaggttaaattgaaaaaaaaaaaaaaaaaaaaa

SEQ ID NO: 286147 - DNA, 1000 bp, Homo Sapiens; identical to SEQ ID NO: 221394

SEQ ID NO: 286148 - DNA, 1000 bp, Homo Sapiens
cagggcagagcaggtgtttatctgccccggcatctgccatggcatcaagagggaagagtggacggtgcttgggaatggtgtgaaatggttgccgactcaggcatggatgggcccctctcgcttctggtggtctgtgaactgagtccctgggatgccttttagggcagagattcctgagctgcgttttagggtacagattccctgtttgaggagcttggcccctctgtaagcatctgactcatctcagagatatcaattcttaaacactgtgacaacaggatctaaaatggctgacacatttgtccttgtgtcacgttccattattttatttaaaaacctcagtaatcgttttagcttctttccagcaaactcttctccacagtagcccagtcgtggtaggataaattacggatatagtcattctaggggtttcagtcttttccatctcaaggcattgtgtgttttgttccgggactggtttggctgggacaaagttagaactgcctgaagttcgcacattcagattgttgtgtccatggagttttaggaggggatggcctttccggtcttcgcacttccatcctctcccacttccatctggcgtcccacaccttgtcccctgcacttctggatgacacagggtgctgctgcctcctagtctttgcctttgctgggccttctgtgcaggagacttggtctcaaagctcagagagagccagtccggtcccagctcctttgtcccttcctcagaggccttccttgaagatgcatctagactaccagccttatcagtgtttaagcttattcctttaacataagcttcctgacaacatgaaattgttggggttttttggcgttggttgatttgtttaggttttgctttatacccgggccaaatagcacataacacctggttatatatgaaatactcatatgtttatgaccaaaataaatatgaaacctcatattaaaaaaaaaaaaaaaaaaaaaaaaaaaaaaa

SEQ ID NO: 286149 - DNA, 1000 bp, Homo Sapiens
ggtcaacatttttggaggaatcatgcgctgtgatgttattgcacagggtatagtcatggcagtaaaagacttggaaattaaaatacctgttgtggtacggttacaaggtacacgagtcgatgatgctaaggcactgatagcggacagtggacttaaaatacttgcttgtgatgacttggatgaagctgctagaatggttgtaaagctctctgaaatagtgaccttagcgaagcaagcacatgtggatgtgaaatttcagttgccaatatgatctgaaaacccagtggatggctgaaggtgttaaatgtgctataatcattaagaatactgtgttctgtgttattgttctttttctttttagtgtgtggagattgtaattgccatctaggcacacaaacatttaaaaggatttggactgcatttaattgtaccattcagaatggactgtttgtacgaagcatgtataatgcagttatcttctttctttcgtcgcagccagtcttttttgcttctcctacaaaacgtaacttgcaatttgccagtttattattgttggatacaaagttcttcattgataagagtcctataaataagataaatacgaagataaagctttattctttagtgttaaaatacagtatatctaataactagcctcattagtagagcagtatattaaaacaatgttttatgtaaaaagtgtttatcttcagcaccaaatacatgataaatgtatcaatcactatttataaacagagctttcaaacactcctcagaatattcttctaagtattttgatgaagtaactttgtaattatttgaacattgttttaatcattaggaaacactgattaactgcaagtcttcatgattctgtcatattaagaaacacctgtaggtttgcttcaaataaaggcatatataccaaggacttacagacaaaattaagaatgtcaatttaagttaataaaaatctcccaatatgaaaaaaaaaaaaaaa

SEQ ID NO: 286150 - DNA, 1000 bp, Homo Sapiens
gaagaggaatgagtaccagttttaaattgcccattggcatttgaaggtagttgagtatgtgttctttattcctagaagccactgtgcttggtagagtgcatcactcaccacagctgcctcctgagctgcctgagcctggtgcaaaaggattggcccccattatggtgcttctgaataaatcttgccaagatagacaaacaatgatgaaactcagatggagcttcctactcacgttgatttatgtctcacaatcctgggtattgttaattcaacatagggtgaaactatttctgataaagaacttttgaaaaactttttatactctaaagtgatactcagaacaaaagaaagtcataaaactcctgaatttaatttccccacctaagtcgaaacagtattatcaaaacacatgtgcacacagattattttttggctccaaaactggattgcaaaagaaagaggagaagaatattttgtgtgttcctggtattcttttataagtaaagtttacccaggcatggaccagcttcagccagggacaaaatcccctcccaaaccactctccacagctttttaaaaatacttctactcttaacaattacctaaggcttcctcaactgccccaaatctcttaatagcttctagtgctgctacaatctaagtcaggtcaccagagggaagagaacatggcattaaaagaatcacatcttcagaagagaagacactaatattattacccatatacatgatttcagaagatgacataagattcctcttaaagaggaaatgtcaggaatcaagccactgaatccttaaagagaaaagttgaatatgagtcattgtgtctgaaaactgcaaagtgaacttaactgagatccagcaaacaggttctgtttaagaaaaataatttatactaaatttagtaaaatggacttcttattcaaagcatcaataattaaaagaattattttaatgaaaaaaaaaaaaaaaaaaaaaaaaa

SEQ ID NO: 286151 - DNA, 1000 bp, Homo Sapiens
ccagagcaaggatcagacgcttggggataaaaaggattttgatgctttcgtatcctatgcaaaatggagctcttttccaagtgaggccacttcatctctgagtgaagaacacttggccctgagcctatttcctgatgttttagaaaacaaatatggatatagcctgtgtttgcttgaaagagatgtggctccaggaggagtgtatgcagaagacattgtgagcattattaagagaagcagaagaggaatatttatcttgagccccaactatgtcaatggacccagtatctttgaactacaagcagcagtgaatcttgccttggatgatcaaacactgaaactcattttaattaagttctgttacttccaagagccagagtctctacctcatctcgtgaaaaaagctctcagggttttgcccacagttacttggagaggcttaaaatcagttcctcccaattctaggttctgggccaaaatgcgctaccacatgcctgtgaaaaactctcagggattcacgtggaaccagctcagaattacctctaggatttttcagtggaaaggactcagtagaacagaaaccactgggaggagctcccagcctaaggaatggtgaaatgagccctggagccccctccagtccagtccctgggatagagatgttgctggacagaactcacagctctgtgtgtgtgtgttcaggctgataggaaattcaaagagtctcctgccagcaccaagcaagcttgatggacaatggagtgggattgagactgtggtttagagcctttgatttcctggactggactgacggcgagtgaattctctagaccttgggtactttcagtacacaacacccctaagatttcccagtggtccgagcagaatcagaaaatacagctacttctgccttatggctagggaactgtcatgtctaccatgtattgtacatatgactttatgtatacttgcaatcaaataaatattattttattagaaa

SEQ ID NO: 286152 - DNA, 1000 bp, Homo Sapiens
ctgcaacagcccccatctcttcagcctacaccacaagtgccgcaagtacagcagtcacagccgtctcaaagctccgaaccatcccagccccagcagaaggaccccctcatcctcctccagggttgggcctgccgccagccagctacccacctcctgccgtcccccctggaggacagcctcctgtgcccccgcccattcccccacccggcatgcctccagttggggggctggggcgggcagcctggatgagataacgtgagccttttttccctctttgtttttttaacaagattttctaatcgacttgcagagtagttgaagtgggtaagcagcagggtaccttgtataatgcacgacagttgcagtatgggaagaatggaccgggcccctgggataaaatcagagtggtcctcacacctagaggacggggacaaccagctttcagagtagcctcatcagtgcccttgcagtctgactgtgtacacttggttcagctaatgtctgagagtcctgcactgggttactttatactagtgaggacgttaaccagccatattggctcaataaatagcttcggtaaggagttaatttccttctagaaatcagtgcctatttttcctggaaactcaattttaaatagtccaattccatctgaagccaagctgttgtcattttcattcggtgacattctctcccatgacacccagaaggggcagaagaaccacatttttcatttatagatgtttgcatcctttgtattaaaattattttgaaggggttgcctcattggatggctttttttttcctccagggagaaggggagaaatgtacttggaaattaatgtatgtttacatctctttgcaaattcctgtacatagagatatattttttaagtgtgaatgtaacaacatactgtgaattccatcttggttacaaatgagactccttcagtcagttatccaaataaaagcagttctgaaactaaaaaaaaaaaaaaaa

SEQ ID NO: 286153 - DNA, 1000 bp, Homo Sapiens
gctggaagtgcgcagtccacgacagaacaaatattcggtgcttttacctacctacaacgagcgcgagaacctgccgctcatcgtgtggctgctggtgaaaagcttctccgagagtggaatcaactatgaaattataatcatagatgatggaagcccagatggaacaagggatgttgctgaacagttggagaagatctatgggtcagacagaattcttctaagaccacgagagaaaaagttgggactaggaactgcatatattcatggaatgaaacatgccacaggaaactacatcattattatggatgctgatctctcacaccatccaaaatttattcctgaatttattaggaagcaaaaggagggtaattttgatattgtctctggaactcgctacaaaggaaatggaggtgtatatggctgggatttgaaaagaaaaataatcagccgtggggccaattttttaactcagatcttgctgagaccaggagcatctgatttaacaggaagtttcagattataccgaaaagaagttctagagaaattaatagaaaaatgtgtttctaaaggctacgtcttccagatggagatgattgttcgggcaagacagttgaattatactattggcgaggttccaatatcatttgtggatcgtgtttatggtgaatccaagttgggaggaaatgaaatagtatctttcttgaaaggattattgactctttttgctactacataaaagaaagatactcatttatagttacgttcatttcaggttaaacatgaaagaagcctggttactgatttgtataaaatgtactcttaaagtataaaatataaggtaaggtaaatttcatgcatctttttatgaagaccacctattttatatttcaaattaaataattttaaagttgctggcctaatgagcaatgttctcaattttcgttttcattttgctgtattgagacctataaataaatgtatatttttttttgcataaagt

SEQ ID NO: 286154 - DNA, 1000 bp, Homo Sapiens
aggaagtcctctccctggaggcctatctccctcagaacggcgcgagaagcgagaccttagaaggcagcgcttcccgcgaaggaccggaaaggagcgcctactaaggacgccgtcgaggtccggggcgcctcaactctatagctctaactggctagaagtgcccaacgtggaatgtttcttttttaaaggcggctcttgaagcgacccggaagcggaagtggaagaaagttctagtggcttgaggtatccgcagagcggccgggtggcgggaggaaccgttacgggaactgaagttgcggattaagcctgatcaagatgacaacctcccaaaagcaccgagacttcgtggcagagcccatgggggagaagccagtggggagcctggctgggattggtgaagtcctgggcaagaagctggaggaaaggggttttgacaaggcctatgttgtccttggccagtttctggtgctaaagaaagatgaagacctcttccgggaatggctgaaagacacttgtggcgccaatgccaagcagtcccgggactgcttcggatgccttcgagagtggtgcgacgccttcttgtgatgctctctgggaagctctcaatccccagccctcatccagagtttgcagccgagtagggactcctcccctgtcctctacgaaggaaaagattgctattgtcgtactcacctccgacgtactccggggtcttttgggagttttctcccctaaccatttcaacttttttttggattctcgctcttgcatgcctcccccgtcctttttcccttgccagttccctggtgacagttaccagctttcctgaatggattcccggccccatccctcacccccaccctcactttcaatccgtttgataccatttggctccttttttggcagaacagtcactgtccttgtaaagttttttagatcaataaagtcagtggctttcaaaaaaaaaaaaaaaaaaaaaaaaaaaaaaaaaaaaaaaaaa

SEQ ID NO: 286155 - DNA, 1000 bp, Homo Sapiens; identical to SEQ ID NO: 116090

SEQ ID NO: 286156 - DNA, 1000 bp, Homo Sapiens
ctccttttttctcttgctgcccacattgtgcctttattttatgagccccagttttctgggcttagtttaaaaaaaaaatcaagtctaaacattgcatttagaaagcttttgttcttggataaaaagtcatacactttaaaaaaaaaaaaaactttttccaggaaaatatattgaaatcatgctgctgagcctctattttctttctttgatgttttgattcagtattcttttatcataaatttttagcatttaaaaattcactgatgtacattaagccaataaactgctttaatgaataacaaactatgtagtgtgtccctattataaatgcattggagaagtatttttatgagactctttactcaggtgcatggttacagcccacagggaggcatggagtgccatggaaggattcgccactacccagaccttgttttttgttgtattttggaagacaggttttttaaagaaacattttcctcagattaaaagatgatgctattacaactagcattgcctcaaaaactgggaccaaccaaagtgtgtcaaccctgtttccttaaaagaggctatgaatcccaaaggccacatccaagacaggcaataatgagcagagtttacagctcctttaataaaatgtgtcagtaattttaaggtttatagttccctcaacacaattgctaatgcagaatagtgtaaaatgcgcttcaagaatgttgatgatgatgatatagaattgtggctttagtagcacagaggatgccccaacaaactcatggcgttgaaaccacacagttctcattactgttatttattagctgtagcattctctgtctcctctctctcctcctttgaccttctcctcgaccagccatcatgacatttaccatgaatttacttcctcccaagagtttggactgcccgtcagattgttgctgcacatagttgcctttgtatctctgtatgaaataaaaggtcatttgttcatgttaaaaaaaaa

SEQ ID NO: 286157 - DNA, 1000 bp, Homo Sapiens; identical to SEQ ID NO: 116091

SEQ ID NO: 286158 - DNA, 1000 bp, Homo Sapiens; identical to SEQ ID NO: 221396

SEQ ID NO: 286159 - DNA, 1000 bp, Homo Sapiens
gaaagtgcatcccttgttgcaagtggcaaagctgaactcatcaaaacccatcacaatgacacagagctcatcagaaagttgagagaggagggaaaagtaatagaacctctgaaagattttcataaagatgaagtgagaattttgggcagagaacttggacttccagaagagttagtttccaggcatccatttccaggtcctggcctggcaatcagagtaatatgtgctgaagaaccttatatttgtaaggactttcctgaaaccaacaatattttgaaaatagtagctgatttttctgcaagtgttaaaaagccacataccctattacagagagtcaaagcctgcacaacagaagaggatcaggagaagctgatgcaaattaccagtctgcattcactgaatgccttcttgctgccaattaaaactgtaggtgtgcagggtgactgtcgttcctacagttacgtgtgtggaatctccagtaaagatgaacctgactgggaatcacttatttttctggctaggcttatacctcgcatgtgtcacaacgttaacagagttgtttatatatttggcccaccagttaaagaacctcctacagatgttactcccactttcttgacaacaggggtgctcagtactttacgccaagctgattttgaggcccataacattctcagggagtctgggtatgctgggaaaatcagccagatgccggtgattttgacaccattacattttgatcgggacccacttcaaaagcagccttcatgccagagatctgtggttattcgaacctttattactagtgacttcatgactggtatacctgcaacacctggcaatgagatccctgtagaggtggtattaaagatggtcactgagattaagaagattcctggtatttctcgaattatgtatgacttaacatcaaagcccccaggaactactgagtgggagtaataaacttcttgttctattaaagtaccgtgtgcagtttaaa

SEQ ID NO: 286160 - DNA, 1000 bp, Homo Sapiens
ccgatgccgccttggcgcgagacgttggcaagcagagtgtctccaagatggccgcttggggaaggaggcgtcttggcccgggcagcagtggcggcagcgcccgagagagggtgagcttgtcggccacagactgctacattgtgcatgagatctacaatggggagaatgcccaagaccagtttgagtacgagctggagcaggccctggaagcccagtacaagtacattgtgattgagcccactcgcattggcgacgagacagcccgctggatcaccgtgggcaactgcctgcacaagacggccgtgctggcgggcaccgcctgcctcttcaccccgttggcgctgcccttagattattcccactacatttccctgcccgctggtgtgctgagcctggcctgctgcaccctctatgggatctcctggcagtttgacccttgctgcaagtaccaagtggagtacgacgcctataaactgtcgcgcctgcctctgcacacactcacctcctccaccccggtggtgctggtccggaaggacgacctgcacagaaagagactgcacaacacgatagcactggccgccctggtgtactgtgtaaagaagatttacgaactctatgccgtatgatttcagtagaacagggagcgaagcaaaaccacccggcccacaagagacaacagagtattcagatcgccacactctgtgaggcagcagagcctgggcaggtgtttggcttagtatttgttatttttaaaaaataacagatcacgggtgtacccagggtttttcagctcattacactaagatgtggatttccataacccaagaggggggtctgaggctgtggaagtccgactgggcagtggaatgctgatggaggcagacgctgccgagggggtgtggacgtgctttgggggaggtctttaagtctattgtttaactgtaccatccagagcccaccagaagctattgatcattaaaattatgagaatttcaactcc

SEQ ID NO: 286161 - DNA, 1000 bp, Homo Sapiens
tctcacatagagtatctccgaatgcagctatgtaaaagagaaccaaaacttgagtgctctggataactatatggaatgctttctaagaacagctgaagctaatctaatttaaatttaacagcttgaagaggtagctaggtgtttaaagttcctccagatacttttacctgagtgatgcttcccttcctaaggctgaccaagacctgttgatccttttagattaaaaataaaatgtcgcatgtaaaggctgaagtcgcgttttatcagaatgccttgccttcttaggttcttttccattatgtcaaaggtccaggctccagtaggagagaaagaactcctcataggaatactgaagaagtgggaaggaaccaagctgacacaggcctcactgcaatttgatatgcctgctgatcagagtctcttgggcattttatattttgcattctgatgtacctaggagttttgttaaacagatgatgtatgtgagtatttatcccattttatgcaattaaccaaatcaaccaaaaaaagtgaccatgaagtcctgtatttgtctttttactacatgtaggaactctcatgtgaatgagtactgtagtaatccattctatgggagccttatttcagaaatatttcaaactggtgcaaatggaaaagactttctcttttcctttaaagctaaagacaagaatatcatgctatacaggtgcaactcaatccccgttaataaaaaccaatgtaggtataggcattctaccctttgaaatagctgtgtcccaacctgttgccattgattttttggaaatggctttagaaatatccaagttgtccttgaattgtctaaccatggacataaacagttgtctcccttctactgtgtagaatactttgacttaattttcttccagatacagggggatacctgcctgtttttcaaagtgtttatttactgctgttactatttgattagaatgtattaaataaaaaaaacctgatttct

SEQ ID NO: 286162 - DNA, 1000 bp, Homo Sapiens; identical to SEQ ID NO: 116092

SEQ ID NO: 286163 - DNA, 1000 bp, Homo Sapiens
acgacagcagctgtgaggtgaacggccgcctgtatcgggaaggggagaccttccagccccactgcagcatccgctgccgctgcgaggacggcggcttcacctgcgtgccgctgtgcagcgaggatgtgcggctgcccagctgggactgcccccaccccaggagggtcgaggtcctgggcaagtgctgccctgagtgggtgtgcggccaaggagggggactggggacccagccccttccagcccaaggaccccagttttctggccttgtctcttccctgccccctggtgtcccctgcccagaatggagcacggcctggggaccctgctcgaccacctgtgggctgggcatggccacccgggtgtccaaccagaaccgcttctgccgactggagacccagcgccgcctgtgcctgtccaggccctgcccaccctccaggggtcgcagtccacaaaacagtgccttctagagccgggctgggaatggggacacggtgtccaccatccccagctggtggccctgtgcctgggccctgggctgatggaagatggtccgtgcccaggcccttggctgcaggcaacactttagcttgggtccaccatgcagaacaccaatattaacacgctgcctggtctgtctggatcccgaggtatggcagaggtgcaagacctagtcccctttcctctaactcactgcctaggaggctggccaaggtgtccagggtcctctagcccactccctgcctacacacacagcctatatcaaacatgcacacgggcgagctttctctccgacttcccctgggcaagagatgggacaagcagtcccttaatattgaggctgcagcaggtgctgggctggactggccatttttctgggggtaggatgaagagaaggcacacagagattctggatctcctgctgccttttctggagtttgtaaaattgttcctgaatacaagcctatgcgtgaaaaaaaaaaaaaaaaaaaaaaaaaaaaaa

SEQ ID NO: 286164 - DNA, 1000 bp, Homo Sapiens
cgaaatgttgcccgctgctggacatatgagacatcgctgctggtagaagaggccattagtgaggagcttccctatagtgaatacttcgagtactttgccccagacttcacacttcatccagatgtcagcacccgcatcgagaatcagaactcacgccagtatctggaccagatccgccagacaatctttgaaaacctgaagatgctgaaccatgcacctagtgtccagattcatgacgtgcctgcagacctcctgacctatgacaggactgatgaggctgatgcagaggagaggggtcctgaggagaactatagcaggccagaggcacccaatgagttctatgatggagaccatgacaatgacaaggaaagcgatgtggagatttaagagtggcttgggatgctgtgtcccaaggaatttcttttcacctcttggttgggctggagggaaaaggagtggctcctagagtcctgggggtcaccccagggcttttgctgactctgggaaagagtctggagaccacatttggttctcgaaccatctacctgcttttcctctctctcccaaggcctgacaatggtacctattagggatggagatacagacaaggatagctatctgggacattattggcagtgggccctggaggccagtccctagccccccttgccccttatttcttccctgcttccctcgaacccagagatttttgagggatgaacgggtagacaaggactgagattgcctctgacttcctcctcccctgggttctgacttcttcctccccttgcttccagggaagatgaagagagagagatttggaaggggctctggctccctaacacctgaatcccagatgatgggaagtatgttttcaagtgtggggaggatatgaaaatgttctgttctcacttttggctttatgtccattttaccactgtttttatccaataaactaagtcggtattttttgtacctttaaaaaaaaaaaaaaaaaaaa

SEQ ID NO: 286165 - DNA, 1000 bp, Homo Sapiens; identical to SEQ ID NO: 116093

SEQ ID NO: 286166 - DNA, 1000 bp, Homo Sapiens
tcctgctgccgcgtgcgaccagaggtgggaggcccctggtggcatggaagagggagggtcagtgccaagtctcaggaggagggcgcatgtgtgtatcaccctcagctggcggaacctggctgcgaactgtgcagttacgttgcatccacaggattccagttgcgtgtctgtttccttctctttctccgtatttatttttttattcttcggaggaggtggacatttcggaagtggtggggactaagggaagaactctctagttccctcagtgtgaagcctgtcgtgttctctccccttgcactggtcatcagtattgtgtaaaggaacaactgatatacttgagtgtgcaagcaaagaacccatttgccatgctgctatgaagactacttttagatcaacaataaaaaaaaacctacaaaaaaacctttattctttaattgttgcttttacggtgatattgtgcatgcaaaccaggagcattttgtgtcttaagaaaaataatcttagaacagatggctgtgaaaattacacccatgcacagaacaagccacaggaataatagttcaggatttggtttttctctttttcttgtaaacctggagggttgatatattctttccatgcagttattagaacttagttttgttccaacagttaaacttgcaatgaaaagaaaatgtgccatttttttcactcagaattattcatagctgtatatttgaaactgctaattacacacgtgtgatgtatgttggttttttagtgcaatttcttctgtagctattctttgaccaaactgtgggtattgttaatattaatttatatttgtctcattttgtatgtatgtgtagtgtgtttgtgagtatgtgtggtttataatctgacaaagtcatgaagctcagtttggctgtaatttaattccccttcccttatttttatttatttttgtactgtgctgattcaataaaatgcactgaccatccaaaaaaaaaaaaaaaaa

SEQ ID NO: 286167 - DNA, 1000 bp, Homo Sapiens
gtgtggaggtggccaaagtgccaaagcactttcagtgaaacaactagaatctcacagagcccctggaccatccacctgtcaaaaggagaaccaacacctggactcccagaaaatggatatgtcaaacatcgttctaatgctgattcagaaactgcttaatgagaaccccttcaaatgtgaggatccatgcgaaggtgagaacaagtgttctgagcccagggcaagcaaagcagcttccatgtccaacagatctgacaaagcggaagaacaatgccaggagcatcaagaacttgactgtaccagtgggatgaagcaagcgaacgggcaatttatagataaactagtagaatctgtgatgaagctctgccttatcatggctaagtatagcaacgatggggcagcccttgctgagttggaagaacaagcagcctcggcaaataagcccaatttcaggggcaccagatgcattcacagtggtgcaatgccacagaactatcaagactctcttggacatgaagtaattgtcaataatcagtgctctacaaatagcttgcagaagcagctccaggctgtcctgcagtggattgcagcctcccagtttaacgtgcccatgctctacttcatgggagataaggatggacaactggaaaagcttcctcaggtttcagctaaagcagcagagaaggggtacagtgtaggaggtcttcttcaagaggtcatgaagtttgccaaggaacggcaaccagatgaagctgtgggaaaggtggccaggaaacagttgctggactggctgctcgctaacctgtgagctgatccttgactcctcttcatcttagcccccctagcagcattccatcccagccagagcacccccaccatcaggccagtcaactgcacaatacacaactgtatttcccaatacacttgagcagttgcctgtgaatgtaagaggtgtcaacaaactgggaaataaaataaaaaaaaataataataaatgtgt

SEQ ID NO: 286168 - DNA, 1000 bp, Homo Sapiens; identical to SEQ ID NO: 116094

SEQ ID NO: 286169 - DNA, 1000 bp, Homo Sapiens; identical to SEQ ID NO: 221400

SEQ ID NO: 286170 - DNA, 1000 bp, Homo Sapiens
tctggggagaaatccctcagatcccactaaagtgtcaaggtgtggaagggaccaagcgaccaaggataggccatctggggtctatgcccacatacccacgtttgttcgcttcctgagtcttttcattgctacctctaatagtcctgtctcccacttcccactcgttcccctcctcttccgagctgctttgtgggctccaggcctgtactcatcggcaggtgcatgagtatctgtgggagtcctctagagagatgagaagccaggaggcctgcaccaaatgtcagaagcttggcatgacctcattccggccacatcattctgtgtctctgcatccatttgaacacattattaagcaccgataataggtagcctgctgtggggtatacagcattgactcagatatagatcctgagctcacagagtttatagttaaaaaaacaaacagaaacacaaacaatttggatcaaaaggagaaatgataagtgacaaaagcagcacaaggaatttccctgtgtggatgctgagctgtgatggcgggcactgggtacccaagtgaaggttcccgaggacatgagtctgtaggagcaagggcacaaactgcagctgtgagtgcgtgtgtgtgatttggtgtaggtaggtctgtttgccacttgatggggcctgggtttgttcctggggctggaatgctgggtatgctctgtgacaaggctacgctgacaatcagttaaacacaccggagaagaaccatttacatgcaccttatatttctgtgtacacatctattctcaaagctaaagggtatgaaagtgcctgccttgtttatagccacttgtgagtaaaaatttttttgcattttcacaaattatactttatataaggcattccacacctaagaactagttttgggaaatgtagccctgggtttaatgtcaaatcaaggcaaaaggaattaaataatgtacttttggctaaaaaaaaaaaaaaaaaaaaaaaaaaaaaa

SEQ ID NO: 286171 - DNA, 1000 bp, Homo Sapiens
ccactactccatctgcactcgcacctgccagggatcctgtgcggctctctccggcctcacgggctgcaccacccgctgttttgagggctgtgagtgcgacgaccgcttcctgctttcccagggtgtctgcatccctgtccaagattgtggctgcacccataatggccgatacttgccggtaaactcctccctgctgacctcagactgcagcgagcgctgttcctgttcctcaagctctggcctgacatgccaggccgctggctgcccaccaggccgtgtatgtgaggtcaaggctgaagcccggaactgctgggccacccgtggtctctgtgtcctgtctgtgggtgccaacctcaccacctttgatggggcccgtggtgccaccacctctcctggtgtctatgagctctcttcccgctgcccaggactacagaataccatcccctggtaccgtgtagttgccgaagtccagatctgccatggcaaaacggaggctgtgggccaggtccacatcttcttccaggatgggatggtgacgttgactccaaacaagggtgtgtgggtgaatggtctccgagtggatctcccagctgagaagttagcatctgtgtccgtgagtcgtacacctgatggctccctgctagtccgccagaaggcaggggtccaggtgtggcttggagccaatgggaaggtggctgtgattgtcagcaatgaccatgctgggaaactgtgtggggcctgtggaaactttgacggggaccagaccaatgattggcatgactcccaggagaagccagcgatggagaaatggagagcgcaggacttctccccatgttatggctgatcagtcatccaccaggaacgaagatttcctgaagaagacctggtccctctggaggttgcggtggctgaaggatgcatcatgtgctcctaccctgctctaccgcttttctgggtcacagaggccaaatgtgagagcattgaataaatatcttaagct

SEQ ID NO: 286172 - DNA, 1000 bp, Homo Sapiens
aggaccacaaacagtgtgtgccccacgaccagtgtgcctgcggggtgctgacctctgagaagcgtgcaccggatctacaggacctcccgtggcaggtaaagttaacaaattccgaaggaaaagacttctgtggtggtgttataatacgggaaaattttgtactgacaacagcaaaatgttcactgttacacaggaatattactgtaaaaacatattttaacagaacgagccaagacccgctgatgatcaagataacgcacgtccatgtgcacatgcggtatgacgcggacgcgggggagaatgacctgtcactgctggagctggagtggcccatccagtgcccaggtgcggggctccccgtgtgcacccctgagaaagacttcgctgagcacctcctcatcccacgcaccaggggcctcctcagcggctgggcacgcaatggcactgacctgggcaactcgctgaccacgcggcctgtcacacttgtggagggggaggagtgcgggcaggtcctgaatgtgactgtcaccaccaggacctactgtgagagaagcagcgtggcggccatgcactggatggatggaagtgtggtcaccagagaacacagaggctcctggtttctcacgggggtcctgggctcgcagccagtaggagggcaggctcacatggtccttgtcaccaaggtctccaggtactcactctggtttaaacagatcatgaactaactgaaactcagctagccagaatgaacaacacaaccggaagcgggattccaagctggcactgccactgtggagggcgctgaaacttcatcacacactgagaggccgtcacagccccagaccacccgcttggcccacgcagcagcagagccgccgtttgctgggttgtttaccgagcactgtgacctttctttccctggaactctttatctcaatagagaccttaaaagaaaacatgagatacgttaaataataaaataagataatctgtcagtcat

SEQ ID NO: 286173 - DNA, 1000 bp, Homo Sapiens; identical to SEQ ID NO: 116095

SEQ ID NO: 286174 - DNA, 1000 bp, Homo Sapiens
gtagtgaaatcttactgtaccgcctgttgtatctgggagcctcgtacagaggctcgcacagcagtgatcaagtgtcatcccttacgtgactgggggatgtctgtcctaaaagctgactgctaggatagtaaggatcatcttgcctgggctatgccactgtcttgttaccaattagacatctggaatttcataattagttttcattgtcactgtcaagatatattgcagattacttaaatatggccatcaaaacaaaagttacaacacgtatctcttttcatctgaaaactaatacctggaaaaggataaaaaaaaaaaggaatccgtgacccacagagctagacagataagatgcatagttgaccagtcataaaaggcggtgtttaagtgatcaggatgccgttggtggcatttacgtgctttatatgatttttacctctgtaacaaacacaagaaataaacagaatggtccttaacagagtttgggggagagagcaagatgggttccttggagaagctgatttgccaagatgcacatcgctattaacagccagagtcataaatgaaatgaaattgaagaattcattcaaatgctcttttccctataacctcttttctcaccaaaaaggagataaatttgaaaacagataaatgtaacaaccagtcaaagaagcaggggaaaagtaagctcctccaaagttgcttgcagtgctggaaatagatctcatttttaggttttctcttcgttccagataccaaataaatgggacagagaataaaatttttgttaaaatatgtgctcatctcctaagtagctcttcagagtctgaccgtaagtaaaaacacacagaattgtgttgactgggggaggtgaatcacaaaaaagttacgaggagtttaagagttaaatattatttgatcgtggctgtcaaatttagtgaacaacatagattggatttggagttggtagtaagtatggttctcataccagaattctctt

SEQ ID NO: 286175 - DNA, 1000 bp, Homo Sapiens; identical to SEQ ID NO: 116096

SEQ ID NO: 286176 - DNA, 1000 bp, Homo Sapiens; identical to SEQ ID NO: 116097

SEQ ID NO: 286177 - DNA, 1000 bp, Homo Sapiens
ggaggggagtacttaagatgagtcaaaagacactttcctctgttccattccccatctcagggactcctgaatattcagcctctccaggctggtgtcttctagtttcccccactgggaatgctggctgggagagccatgactaccagacttttcctcaggctccttggcatgttagtctgaattgttcttgagcactgtactactgacccaacaactgtgactagctggccacgccattcagggctggtgtggcatttatgtgtgtgtgtgtgtgtgtgtgtttttcctgtttgcccagcagtgcattgtgggttccaagagtgggtagtgtgtgtatgtgtgtgtgtcagagggagacctggcaggcacctctttgagagtagctgtggtcagagctgtttggtcagtgcattatgttgaatgaggtccaggaacccagagccacccagcagacaccactgtggcttgccagctgccaagatggagaagcatgtgcccctgtagagcgtctccccagaaccagaccccgagccactcgcttcctctgtgctgtgacaacattggtgccaggggagatggtgtttttcaaagggacctactgtagccactttaatttacaattaagagccttagtttgacttaacacttttgtaggcttttcattgtgtatttttgtgtatgtgtgcatatagcagctactctgtagcagaggtgggtagagacacttaatagtatcatgtcgcatgcagatgtcacatcggcctctgcaaaaactgtactgtcttgtttctgcattagacttaagtagtcatgtgaatatactgctatgtcacttttaatattacgagttttatacttggaaaatggtacttgcttcttttaaatctctgtcttctctaacctcccccttcccatttcaatgctcccttcctaatttcagcaataatctcaaaaagcaattaaatagttaaatgaccctaattgtaaaaaaaaaaaaaaa

SEQ ID NO: 286178 - DNA, 1000 bp, Homo Sapiens; identical to SEQ ID NO: 116098

SEQ ID NO: 286179 - DNA, 1000 bp, Homo Sapiens
cctcccagatccccagctcacgccagacacagcctgtcctccagtcccaggtggagaacctgctccacagaacctactgtaggtggaagagcaagagtccctccccagtccatggggcaggcccctcggtcatggagatcccatgggatgatcttatcgccttgtgtatcaaccacaagctgagagactggacgcccccccggcttcctgttacatcagaggcgctgagtgaagatggtcagatatgtgtgtatttttttaaaaacgatttgaaaaaatatgatgttcctttgtcgtgggaacaagccaggttgcagacgcagaaggagctacagctgagagagggacgtttggcaataaagccttttcatccttctgcaaacaattttcccataccattgcttcacatgcaccgtaactggaagaggagcacagagtgtgctcaagaggggaggattcccagcacagaggatctgatgcgaggagcttctgctgaggagctcttggcgcagtgtttgtcgagcagtctgctgctggagaaagaagagaacaagaggtttgaagatcagcttcagcaatggttgtctgaagactcaggagcatttacggatttaacttcccttcccctctatcttcctcagactctagtgtctctttctcacactattgaacctgtgatgaaaacatctgtaactactagcccacagagtgacatgatgagggagcaactgcagctgtcagaggcgacaggaacgtgtctaggcgaacgactaaagcacctggaaaggctgatccggagttcaagggaagaggaagttgcctctgagctccatctctctgcgctgctagacatggtggacatttgagcagcctgacctgtggggagggggtctctcccgaagagtttctgtttttactcaaaataatgttattctcagatgcttgatgcactgttggaaatgtgattaatttaatcatgcagataaaccatttaaatgtc

SEQ ID NO: 286180 - DNA, 1000 bp, Homo Sapiens; identical to SEQ ID NO: 116100

SEQ ID NO: 286181 - DNA, 1000 bp, Homo Sapiens
gcaacggctgaggcgggagaccggtggtctgcaccgtcctggagggagatatgagtggctggactctcagccagccactgggatgtgttcgggctttggaccctgaggccggagagagctcccgagaggaggcggcgccacgttcgttcttctgaggggacggtagatttgggggttttcctctaggattctcgcgccgtttcctctgaagaaacaggaccagagagggaaggtgacctgaaagtcacagaataattttttagagctgaacaagaatccaagcctgcaactgcagagacgagagatctttctgctgtctatactcttggaaagcacatcctaagatctttgcagattatcctgtggaaggaaaatgcctaaagtcaaaagaagccggaaagcacccccagatggctgggagttgattgagccaacactggatgaattagatcaaaagatgagagaagctgaaacagaaccgcatgagggaaagaggaaagtggaatctctgtggcccatcttcaggatccaccaccagaaaacccgctacatcttcgacctcttttacaagcggaaagccatcagcagagaactctatgaatattgtattaaagaaggctatgcagacaaaaacctgattgcaaaatggaaaaagcaaggatatgagaacttgtgctgcctgcggtgcattcagacacgggacaccaacttcgggacgaactgcatctgccgcgtgcccaaaagcaagctggaagtgggccgcatcatcgagtgcacacactgtggctgtcgtggctgctctggctgaggctggcgcgctccaccctggactctggacttcgcaggttcctgcctgtcacgccacccccttcctgggagcagcgagcagtgccccaggcccgagttggagcacggtctctatggggaaggcttcgctgtctatcagctgtgatttgtaaaaataaaatctttaaatctctcgaaaaaaaaaaaaaaaaaa

SEQ ID NO: 286182 - DNA, 1000 bp, Homo Sapiens
gagaatagttgagatctggaaagcatagacattttttacactctggatagactttattcttgaagatcatcagaaatgaggttggaatttcgaggttttgagcagggggagcatcttatattcacccttaaatcgttattaatacatcctgttttcttcattccctgatagctatctcatttcactctactgtctcaaaattttgttttaaaataatagaaatgttttgccattattaagtaccactttattcctaacaaaaataagtactcaggacttttttttcaaaatgaaatatttatgtactgttttatggtatgtggtagagtaagtaaaatgtaatgttctcagttttgttccatatttgcattcctcttatgctttacctgtattttatcatttgtaagcagaactctagctatatggggtagaaataaaatctctgagatgaaacaaaggaatcaacatgataaaatttaggcgaagtagttaagaaatggcccttttgaatgttgaagataggaaagaaagccatatattcaaatatgtaattttcctcatttagttataatgacatctttaccaattgggcttcataaatgtgtttctttcttaatagtatcctagttccagcatatattcaacatgaattttatcattctcctcctaatggaatgtcttccttatagaaatgttcacgacaaattcatttgtgttttttacatgtcaataatgtatgctaaattaaaatgttttccagttattctgatagatgtcattatggcatccttaatttttcttctccttctgtatatagggtaagggactgttctgaagaacctttccatttagtgatcaagatatggaagctgatttctgaaaatgctcagtgtgtactctaattatttatggtaccatttgaattgtaacttgcattttagcagtgcatgtttctaattgacttactgggaaactgaataaaatatgcctcttattatca

SEQ ID NO: 286183 - DNA, 1000 bp, Homo Sapiens; identical to SEQ ID NO: 116101

SEQ ID NO: 286184 - DNA, 1000 bp, Homo Sapiens
ggaaattacataccttttttttttttttttaaaggactacagattatttttaatgactaaattggagtgatacttcttacactaaaaattatttcttaggcattctgaatctgggatgagaaacaggattgtttcacaatagtaagcacataatttttaaggccaaggcacatttgactcctgagatgaattttttgtggtcataatcaaatacttagttgtttttgatgccccaaaataaagtgagaatggtaatttgccaggaattcttcataacagtatcttacaaaaaacgtgttgctctcttcacagtattatgtgtaaagtcattgtttaaagcacgaatgttccctctggggtacttgttaaagctaaatttattttgcttccctccacttagaagtgctgcacactttacagcagcttcctttctttccatggcactgcctagttaacagaagtcttataaaaatttaaaaagacacatttcttacaaaaaagagttgaatgaggtaaaatggcattagatggctctatattttttaaagctatgtaattgttcagcgtcacttttctaagtacttatacatatctaaacatgtcttcatggtttatattttcacttatatatgctgggctggattaagctttgttgtgattgtgaccaacattcaggccacgtgagcactgtcttatcacatcgccaattagttgtaataaacgttcaacgtacaaacactggagtgtgtttttatctctttccaaaagtttgtcaaactatgcagagctgctgaaggaagaatttctcatttttttttcagtaaaatgttgaaaattcccctccatttgaatatggtggttgttataagcacacacaagatacatggtggaagatctaaggagtcttcatgtacttcattaaaaaataacatggattccatactgagagcctatctacacatttattttcaatcaataaatgctgcttttaaaaccttga

SEQ ID NO: 286185 - DNA, 1000 bp, Homo Sapiens; identical to SEQ ID NO: 116102

SEQ ID NO: 286186 - DNA, 1000 bp, Homo Sapiens
ctaaggaaacatttagacgtggtgactgactttcatttggacttggcgaagtgtatctgagaaacacctcggctgtggtctctctgctttaaatcctaacaggacttcctagagcgttgacagaaattctactcgtggacgttgggaagaaagattgtaggtggcttggggaatgtgggtggcttagaggatctaaaccgattcacttcctggttgagaagcaacgagggcttgctctaaatcgtttagaggataacaggatctagagatgctctctgcttgacaacaaaagtcagggtgcagtcggtccacccttgactgctcttggcttggtctctaccctcactacctcagttctcaataacttagtgaatcactgccctcctcaaagccatttccactcagctctttccagagaattctcagttttatgagacgggaaactttatttcacgagaaagcctcattgtcagaagtatcttcattcaatgggcacaatatgctgtgtatctcaccaggtagctgtcaggggccaccgagagtgtcgttaaaaatgggcatcgttgtaataaaggaggaaagtgcgacttttgaaatgtttggaaggtttatttctcatgcacattccagggaaaagcagagagtaaattagagacgggataggaaggccgtgggagaactcgatcctagcctgtgtcagctggatgtgtttacgtggagaggcgtggccactttttaggtcacctgaagcagtttagcctttggatagaggaacctgcctgaatttatggcattagtggtggcatttttttgtgtacaagatgtgggtgatggaggggctgtttctttttccgtgtgggtggttaataatcgtcagtctcggagggcgatgctcgtaggatatttcaggtgagtcagggttggatggtcatcggctttcagagggagaccacgggaatgttcagggaaacaatgtcagcttctctgaggaccagaattc

SEQ ID NO: 286187 - DNA, 1000 bp, Homo Sapiens
cgccataaacatcacatcggccctagacaggggtggcagggtgccacttcccattaatgacctgaaggagggcgtttatgtcatggttggtgcagatgtcccgttttcttcttgtttacgagaagttgaaaatccacagaatcaattgagatgtagtcaagaaatggagcctgtaataacatgtgataaaaaatttcgtactcaattttacattgactggtgcaaaatttcattggttgataaaacaaagcaagtgtccacctatcaggaagtgattcgtggagaggggattttacctgatggtggagaatacaaacccccttctgattctttgaaaagcagagactattacacggatttcctaattacactggctgtgccctcggcagtggcactggtcctttttctaatacttgcttatatcatgtgctgccgacgggaaggcgtggaaaagagaaacatgcaaacaccagacatccaactggtccatcacagtgctattcagaaatctaccaaggagcttcgagacatgtccaagaatagagagatagcatggcccctgtcaacgcttcctgtgttccaccctgtgactggggaaatcatacctcctttacacacagacaactatgatagcacaaacatgccattgatgcaaacgcagcagaacttgccacatcagactcagattccccaacagcagactacaggtaaatggtatccctgaagaaagaaaactgactgaagcaatgaatttataatcagacaatatagcagttacatcacatttcttttctcttccaataatgcatgagcttttctggcatatgttatgcatgttggcagtattaagtgtataccaaataatacaacataactttcattttactaatgtatttttttgtacttaaagcatttttgacaatttgtaaaacattgatgactttatatttgttacaataaaagttgatctttaaaataaatattattaatgaaaaaaaag

SEQ ID NO: 286188 - DNA, 1000 bp, Homo Sapiens
gagggcagcagcttctttgagtcaaccagaggaggaacagaagctgcagccagagctgcagcctaaagtccctggagagcaaggctctgatgaggagcactgtaaagagcaccgagcacaagccctgagggccctcttgctagcccacaagaagaaagcgggcctggcatccccagaggaggaagacgctgttggtaaagagccgctgaaggcagcacccaagaaacgacaattgctggacagcgacgaggaacaggaagaagatgagggcaggaacagagcaccagagttgggagctccaggaatccaaaagaagaaacgataccagattgaggatgatgaggatgactgaagagctaagaagcctaggggtagagatagacacgtttttagatggtgcattcaagtcagagttggaagggtcatacaggacccagaagctcctcttactggacagagcagtagaatcccaggctctttcacggatttaggctgagaaacttcagcagcagtattggacttctctgctgtcagtctttgtttctcccagtttttatcggtatgccccagcagctctctggagatttagttctcttcttctaggaaccatttcttttggttattggagctccttagcaaataagaggagtgagtgaaatagagaaagcaccccggaccccttttattggtctgttcctttggctttctcttggaggtgggtcgcagcaccagatggggagctttatgacatgacaggcgggagttttgtaccacttttagaagataccagatgcctctgtcctcattttgtttcctatgatcatcctctagataccagatagaggcccattcctgcatttgagatagggttggaatatagtactctagatgatgaatgtgtttgctttgtgtttggtattaaacatgtaagattagaagttctcaaaaaaaaaaaaaaaaaaaaaaaaaaaaaaaaaaaaaaaaaaaaaaaaaaaaaaaa

SEQ ID NO: 286189 - DNA, 1000 bp, Homo Sapiens; identical to SEQ ID NO: 221405

SEQ ID NO: 286190 - DNA, 1000 bp, Homo Sapiens; identical to SEQ ID NO: 221406

SEQ ID NO: 286191 - DNA, 1000 bp, Homo Sapiens; identical to SEQ ID NO: 116104

SEQ ID NO: 286192 - DNA, 1000 bp, Homo Sapiens; identical to SEQ ID NO: 116106

SEQ ID NO: 286193 - DNA, 1000 bp, Homo Sapiens; identical to SEQ ID NO: 116107

SEQ ID NO: 286194 - DNA, 1000 bp, Homo Sapiens; identical to SEQ ID NO: 116108

SEQ ID NO: 286195 - DNA, 1000 bp, Homo Sapiens
gtggagaagcagctgaacctgatcgcccagggcaaggccgactaccgccaggtcctgggccacaccctggacgtgttcaagaggaagttccactactttgtcgactccattgctggcatggatgagttgatggaggtgtctttctcgcccctggcggccacaggcaagcccctctcacgctgtgggaagtgccaccgcttcatgaagtacatccaggccaagccaagccgcctgcactgctcccactgcgatgagacctacacgctcccccagaacggcaccatcaagctctacaaggagctccgctgccctctggatgacttcgagctggtcctgtggtcatcaggctctcggggcaagagctacccgctgtgcccctactgctacaaccacccacccttccgagacatgaagaaaggcatgggctgcaacgagtgtacgcacccctcctgccagcactcgctgagcatgctgggcatcggccagtgcgtggaatgtgagagcggggtgctggtgctggaccccacctcgggccccaagtggaaggtggcctgcaacaagtgcaacgtggtagcgcactgcttcgagaacgcccaccgcgtgcgggtgtccgccgacacctgcagtgtctgtgaggccgccttgcttgatgtggacttcaacaaggccaagtccccactcccgggcgatgagacgcagcacatgggctgcgtcttttgtgaccccgtcttccaggagctggtggagctgaagcatgcggcctcctgccaccccatgcaccgcggtggaccagggagaaggcagggtcgagggcggggccgggccaggaggccccctgggaagcccaaccccagacggcccaaggacaagatgtcagccctggccgcctactttgtatgatgaccctgtcctccctcacccaggctgcagtgccatgcagacacctcatggcacttcaaactattaaaatgcattttatcttaaaaaaaaaaaaaaaaaa

SEQ ID NO: 286196 - DNA, 1000 bp, Homo Sapiens; identical to SEQ ID NO: 116109

SEQ ID NO: 286197 - DNA, 1000 bp, Homo Sapiens
tggggaaacaaaggtgggaggggtggggaatactggaaataatcagggcaatttttttctttcccataattggactagataccttggtactgttgaccttctcagcatctcccttttgccttagatggcaacaccctccagtctgtagcagagcagtccaacccagattagtgcagcccggaggcttagggtgcagcctccctggtcttcctccacacagttgttcaccaacagaccagacctcctttaaccacagtgtcaacatagtatcggaaagagagccatttcttaggggaataaaacagtttcgcttctttagctcatctgtggtgtcagaatccttggagctgaagagagaaatcaaaagagcatgatgatggctgcctggtttcaggtggaacttaatgcattgatctttagaagctccttctgttggaagttgagtacctgtgatctaaaatgtcctggaggcagatgacatctaaaatatgtgctttccaaccagcacagctggcgctcttagctcctgattggttgtgtgttttattaaggatcagtgcagttaagtcgtattttaaagtgttacctcccctcctaacccttccccttcttggacactgaaggaaaaggccaactagggtgttagccctctgggcaccaaggaaactaacagctttctcaaagcggtgaccactcaggccagcccagacaaatctgagggatggccagtgcactccaatgatgggacaggcctaacaacacatgtaagcttccccgagagctttcagctggttcacctctttgttctctagactcttaagtactgactgctttgacttttgtgattatgttatggtgatgtgtagtcagtgtaccaatatgttcacaacctaggatcatgataatggagtgtgttttgggttttttttaactgttcagaaaaaaagtaaattacaaatataagattaaagtgaaaaaaaaaaaaaaaaaaaaaaaaaaa

SEQ ID NO: 286198 - DNA, 1000 bp, Homo Sapiens; identical to SEQ ID NO: 221409

SEQ ID NO: 286199 - DNA, 1000 bp, Homo Sapiens
tgcagtaaaatacttaagttattcaaagaatgttatctttcttgcaagagtaatttaagcacatgggaaagattctagactttttgtttcttgcaacaacagtgccctctgctgctagaaacctttttctacttactatcatttttattgtggcttgagctcagtcaatctggtgcagatgaggctggacaactactaaccaataaaatcaggagtttgtacaaaagttaaatggaacattataattattttaagtaatgttaattgaaaaaattttttctttttgacaatataaaaaacattttaaatttcctagaaatgtcttcagggtaatgccaatttaagatctctcttaacttgtggccaagaaattctagattttccagctgactttggtataatatatatttatcaggaacttctctcagcagagagtacccattcttcgagttcaaagcacaattttaaacatgtaaaatggatatataatttgccaaaggtaattaatttattctttttttcttaaagaagaaaaagacattggttgttgttacaaaaagtctaaattactgttggttgaaacacagcagctgtggagttcagtccaggcatgaagactaaatctgctttaccaagtaaggtgtaaggttgcatgtttcagtcctctaccatcctgcactgtgagcagcactatacctgtgcgttgtctgaaagccttccgtatattctccagctaaatggtcgtctggtagcctttgcatttaacaaactagcatgaggctttttatatctaaatgctacgtgatagacaatttcagctagccacatattgtatgtatgagattcataaagactttcaatcatttcattttcagacaactgaaattttgtttagtatgtgaattctttttttgaaatgtatagtgaataggatgttgcactggtggcaattcatcatggagcataataaaattaatttgacccaaatagaaaaaaaaaa

SEQ ID NO: 286200 - DNA, 1000 bp, Homo Sapiens
tctactgtgcagaaatatatatgtctaatgtgcagaaatatatatgtgtgtatgtgtgtatatatatgcacacacacacagataatgcttccagtgaatgtgaacttcttttccctgtggcactgattgacagacttgtgctgatccattattactttagggcttgattctcttggggagtgacttggctaagcttcaggtgtaaactgtggtcacggagcaaaaacattaaccagctgcccagggttcaagcttgagcctttaggtgatctttaaactatggtagtaaaataagcctcactcaaacatagctgacttcctattggtacagcttgaaaagcactttttactacatacacattttatgcttaaaaagttaacatgatacgaaactgtgattagaaaatatctggtctggatgtgattagtaaggatacaagataatgttctaagactgcctaatgctttttgtttgattttcatctgccaggcgttgttatgtgctatgagggtagcaagtacgtctttgtcttaatgatctaaggctggtgtagaaacaaagggcctaatgagaaccaatcatcatggaagtcagttgcgggggcagcccataaggaaagggaaagtgagtggggttgggcataggctgagtgaggtggcctgaatgacacctcttagaggactgtgaagtacaggcacagcccgactgcagggagggatgcacccatcatttacccatgggagcatctgtaggaccatctctctcccacttcttctcccctcccccaccgcatctggccagatggactgtcctacagcaatcgtttccatctgtcaccctcttccctctcctttcataccagtcactatcttgggtaacaaatttatacaggacagtggtacagaaatacatctttgctctgagaatacagcaaatattaacttaaattattataactgaacaaataataaaacctgaattttaatatcttcaaaaaaa

SEQ ID NO: 286201 - DNA, 1000 bp, Homo Sapiens
acacacttatctctgaagtttttctccaggctgaacatttctattatcagtggcccctaatctggaaaaacccatcattctaatctagcttgtatccccacatcatgagaaagagggaagaagaagaagggatgatgtgtggtagagaagatgagggttaactttagcctttcccaaacactggcaacaaccacttcctcaacaatttttctatttgcttcagcctactcagattttttcaggtttttctagctcctccataacctcactccctcccgaggtctctggttcaaagaccaccctaccagcccctatttgcttcaggttatcctgttgagggtgggtgggaagagtgagaagatataaatgaaaaactggccacatgttgataattgttgaaactagatgatggtacgtggacattcattataccattctccccacttctgtatttgtttgcaatttttcataataaaaaagttttaaaagtcctccagtttccaacacactcaagagagagccccaaccccaaacacagagtttcatggaaaccccacaccaaggcaagaggcagagatgatgattccatttcatatatacactcattttctaactttttttaaaggcccactgctttattttcaatagattaaacctgatttctgagaggtcctgaagttgggcttatttccctggctgggttatgggggagggcagggtaaagggatccttaaaaaagtttacacttctatgtatctcacaatcttattgtgaggatgtgacttgttcagtgttctgaacttttcgaaggaatcgtgctctcaatgcaaagtgtcattctctggaattgcacctggctcaggaaaggactgtctttgtacttgaatttaaatccaatggagaactttaacacgggcatttgcatgactgagaattgctgctgtcttttttccgtatgtcactttcttgaatgtgttctaataaaatgattctaaagcag

SEQ ID NO: 286202 - DNA, 1000 bp, Homo Sapiens; identical to SEQ ID NO: 221410

SEQ ID NO: 286203 - DNA, 1000 bp, Homo Sapiens
tgtgcgtgctgacgttgtagaagcgagtggcctcgaaggctacgggacgagggtggcgggtgaccaagtgcaggcgcgacgggtcagggaccgggccgggccgggggtgcgggcgcgcgggcctaccgggttcgtagtagtcgtacacggagactggcagcgccgacgtcctgcccaccacgcactcccggagagcacggaaccgcacgcacgtcaggcaccggctggggatctgtggggcagcggcgggcgcaggctcgacccgggccaggaggcccggggcgctgagctcaggcccagaactggctgatttcagggatacccaggacgcgtgaaacacagaagaaacgtgatcccattttctttttttcttttacttttctttttttttttttttcctgagacagagtctcgcgctgttgcccaggctggagtgcagtggcgtgatctcggctcactgcaagctcggcctcctgggttcaaatgattctcctgcctcagcctcccaagtagctgggataacaggcgcccaccaccgcaccctgctaattttttgtatttttgatcaagacggagtttcaccatgttggccaggctggtctccaactcctgccctcaagtgatccgcctcggtcccattttttattctttgggtccttccatcccactgggaaaacgtctcaggtggcctctgaaacaccactcctttttgtgtgtgtgcacgcatggctgagcatgtgtgggtgggagtcagcacattcacgatactgtgcaatcatcacctctgtctagttacaggacggtttctttctcccccaaagaaaccccatcgccatcagcactcactccccactcccccagcccctggcaaccacaaatctttccaactctacggatttgcctgttctgggcatttcatgtcaatggaatcatgtactctgtgaaaaaaaaaaaaaaaaaaaaaaaaaaaaaaaaaaaaaaaaaaaaaaaaaaaaaaaaa

SEQ ID NO: 286204 - DNA, 1000 bp, Homo Sapiens
cgtagaacgtttagaagatgaaactcttttaattaatatgatctgtggggtagtgtcaggagtgatatcttccactatagccaatcccaccgatgttctaaagattcgaatgcaggctcaaggaagcttgttccaagggagcatgattggaagctttatcgatatataccaacaagaaggcaccaggggtctgtggaggggtgtggttccaactgctcagcgtgctgccatcgttgtaggagtagagctaccagtctatgatattactaagaagcatttaatattgtcaggaatgatgggcgatacaattttaactcacttcgtttccagctttacatgtggtttggctggggctctggcctccaacccggttgatgtggttcgaactcgcatgatgaaccagagggcaatcgtgggacatgtggatctctataagggcactgttgatggtattttaaagatgtggaaacatgagggcttttttgcactctataaaggattttggccaaactggcttcggcttggaccctggaacatcattttttttattacatacgagcagctaaagaggcttcaaatctaagaactgaattatatgtgagcccagccctgccagcctttctactcctttgcccttttcccgtgttctaatgtattttgacaatgttgtaagtgtttaccaagccgttggtctcctaagggcctcctgatggaagaacagtggggtggttcaaagttatttctatgtttgtgttaccatgttaacttttccccgagagaaagtgttaacattgagactctggccccagattggtatcttctatgaagatggatactgatgggtgacattgaaaacggcctgctttccaaatgtggttaaatgtaattggttagccccagacttgggctagagcagaaggcataggccagggtggttattgctatatgtgttacagacctcggttctcattaaagtatttattggcagaatcacaaaaaa

SEQ ID NO: 286205 - DNA, 1000 bp, Homo Sapiens
ctggcctcacctggccagctcaccccttttgggtgtaggggaaaagaatgcctgaccctgggaaggctccctggtagaatacaccacacttttcaggttgttgcaacacaggtcctgagttgacctctggttcagccaaggaccaaagaaggtgtgtaagtgaagtggttctcagtccccagacatgtgcccctttgctgctggctaccactcttccccagagcagcaggccccgagccccttcaggcccagcactgccccagactcgctggcactcagttccctcatctgtaaaggtgaagggtgatgcaggatatgcctgacaggaacagtctgtggatggacatgatcagtgctaaggaaagcagcagagagagacgtccggcgccccagccccactatcagtgtccagcgtgctggttccccagagcacagctcagcatcacactgacactcaccctgccctgcccctggccagagggtactgccgacggcactttgcactctgatgacctcaaagcactttcatggctgccctctggcagggcagggcagggcagtgacactgtaggagcatagcaagccaggagatggggtgaagggacacagtcttgagctgtccacatgcatgtgactcctcaaacctcttccagatttctctaagaatagcacccccttccccattgccccagcttagcctcttctcccaggggagctactcaggactcacgtagcattaaatcagctgtgaatcgtcagggggtgtctgctagcctcaacctcctggggcaggggacgccgagactccgtgggagaagctcattcccacatcttgccaagacagcctttgtccagctgtccacattgagtcagactgctcccggggagagagccccggcccccagcacataaagaactgcagccttggtactgcagagtctgggttgtagagaactctttgtaagcaataaagtttggggtgatgacaaatgttaaaaaa

SEQ ID NO: 286206 - DNA, 1000 bp, Homo Sapiens; identical to SEQ ID NO: 116112

SEQ ID NO: 286207 - DNA, 1000 bp, Homo Sapiens
cagctcctcgcctcagctccgcacggcccgtgggaggaaggccaggctcgggggagcctcctccagcccggccgacccggactcccggtcacctgacccctcagcaagaacagcctgcctggtggccttctggggccaggacccctggtgggcaacgtagccacaggaacaggccccgtccaccgcctccacgccgcacctggaggcctcctcgcaggcccgtgccccgcctccctggccgcgccgcctccgtgtagtcttggcctcctcaggctgcctcccgtcctctcgtctcacccgcgcctcccttgcctcatctggggcggctgtgggctctggcgctcctctctggctgaggtggaaacagagacaccctgcggcaccagagccttcccagcaggccaggccgctgggctgggatcagtgttatttatttgccgttttaatttatggattctccgcacctctgttcagggaagggcggcggccacatcccctgccgtctgcgtgtctcaggcagtgggggggctggggccagggcgctctctgaggacagagctggtggggcgcgggggggctggcgagctactgtaaactttaaagaattcctgcaagatatttttataaactttttttcttggtggtttttggaaaagggtgtgggggtgggggcgccgctggggcagggccaggttttgtgttttagtcccttgctcctgcttctttctacacacacatctaaagacggtgcggctcgctctgtcatgggttccgtctctctgtggagaagcagctccacctctgggggggctcggggcagaggggcggtgtctcgtagcgggcggcagcgccagcgcccctctgtcaggctggggcaatcttggttttgtgtccaaaggtgagggggtaggaggagggccctcagctggccctccccacacacaggacggcaggggcactgtgaggcttttcttattaaaatgaaaaaaaaaaaaaaaaa

SEQ ID NO: 286208 - DNA, 1000 bp, Homo Sapiens
atctgcagaaggaactttggggtgcagccaggacccggtaggcctgagcctcaactcttcagaaaatagtgtttttaatattcctcttcagaaaatagtgtttttaatattccgagctagagctcttcttcctacgtttgtagtcagcacactgggaaaccgggccagcgtggggctccctgccttctggactcctgaaggtcgtggatggatggaaggcacacagcccgtgccggctgatgggacgagggtcaggcatcctgtctgtggccttctggggcaccgattctaccaggccctccagctgcgtggtctccgcagaccaggctctgtgtgggctagaggaatgtcgcccattactcctcaggcctggccctcgggcctccgtgatgggagccccccaggaggggtcagatgctggaaggggccgctttctggggagtgaggtgagacatagcggcccgggcgctgccttcactcctggagtgagtttccatttccagctggaatctgcagccacccccatttcctgttttccattcccccgttctggccgcgccccactgcccacctgaaggggtggtttccagccctccggagagtgggcttggccctaggccctccagctcagccagaaaaagcccagaaacccaggtgctggaccagggccctcagggaggggaccctgcggctagagtgggctaggccctggctttgcccgtcagatttgaacgaatgtgtgtcccttgagcccaaggagagcggcaggaggggtgggaccaggctgggaggacagagccagcagctgccatgccctcctgctccccccaccccagccctagccctttagcctttcaccctgtgctctggaaaggctaccaaatactggccaaggtcaggaggagcaaaaatgagccagcaccagcgccttggctttgtgttagcatttcctcctgaagtgttctgttggcaataaaatgcactttgactgtttgttgtc

SEQ ID NO: 286209 - DNA, 972 bp, Homo Sapiens
aagccccagacggtatctcctggatgccagtgagcggctgagagctgaagctccctggacactcaaggctcttgtggtgacagtctgacgtaaaggcgtgcagggaggcctagctctgtctcctggacttagagatttcagacacagaagtctgtccatggctccttgtcacatccgcaaataccaggagagcgaccgccagtgggttgtgggcttgctctcccgggggatggccgagcatgccccagccaccttccggcaattgctgaagctgcctcgaaccctcatactcttacttggggggcccctcgccctactcctggtctctggatcctggcttctagccctcgtgttcagcatcagcctcttccctgccctgtggttccttgccaaaaaaccctggacggagtatgtggacatgacattgtgcacagacatgtctgacattaccaaatcctacctgagtgagcgtggctcctgcttctgggtggctgagtctgaagagaaggtggtgggcatggtaggagctctgcctgttgatgatcccaccttgagggagaagcggttgcagctgtttcatctctctgtggacagtgagcaccgtcgtcaggggatagcaaaagccctggtcaggactgtcctccagtttgcccgggaccagggctacagtgaagttatcctggacaccggcaccatccagctctctgctatggccctctaccagagcatgggcttcaagaagacgggccagtccttcttctgtgtgtgggccaggctagtggctcttcatacagttcatttcatctaccacctcccttcttctaaggtagggagtctgtgatctctttctgtgtgtattggtcagaatagaatccattcagctgtagcagcaagcaatccccaacctttcactgcaatgacctttcaatgcaataaaagcttattgtccattcaaaaaaaaaaaaaaaaaaa

SEQ ID NO: 286210 - DNA, 708 bp, Homo Sapiens; identical to SEQ ID NO: 56507

SEQ ID NO: 286211 - DNA, 1000 bp, Homo Sapiens
acgtggtcaggctccaccgcacagaagagccacagtctccagactcatggcgttccctccagaactccccattcccctctgagcatatttctatgctgctgcttcttgtgacttacatgaggcatctcagcttcttcatgtttgtagggatggttccctaagcctgttcaagtaggctctcactagagttaccattcatatttgagaagaaaagaacatttattaaatgtatgtgtggggctgaggttctaaaggaattgaaaagagacgataaacattgaatgagggtgagggcatccctgctggggagaaacctctgtcccctaggaagagtccgttcatgtcatgtggtttgggatgaaccaggggtctgcccccatcgggtcacaggtgatgccaaatagaaaagaagcaaatggaggaaatagtcggataagtaggtgacgtgaaaggcaggacctggtcaccccagcaagtgctatggacagttcccggaaacggttgcccacttcacaggtccatgggtctgacccttggactctgccaggatcaactgcccagagtgccagagttttagccaaaggtgtacttacttccttatttatctccaaaaggatggaaactgtgggagtcaaagcctattttgctgagtgttcccactggatcctctgtagaattagcaggtcatgctgtcaaaatcatggacaaaggctgggtgcagtggctcatgcctataatcccagcactttgggaggccaaggtgggcggatcacctgagctcaggagtttaagaccagcctgggcaacatggggaaactccatctctacaaaatatacaaaatattagccagccatcgtggtgcgtgcctgtggtcccagtttcttgggaggctgaggcgggagtatcatttgagccaggaggttgaggttgcagtgagctgagatcacatcactgcactccatcctgggtgacagagagagaccctgtctcaaaaaaaaa

SEQ ID NO: 286212 - DNA, 1000 bp, Homo Sapiens
aaaggaaaatacacttttgagattttcgatggcaaagacaaccatcaacgctcccttgacctgtccggacaagcttttgatgaagcatttgcagaattccagcaattcaaagctgctgcttttgcagagaagaatcgtggcaggttgatcggcggcttgcctgacgtggtgaccatcatggaagggaagaccttgaatctgacctgcacggtgtttggaaaccctgaccccgaagtgatttggttcaagaacgaccaggacatccagctcagcgagcacttctcggtgaaggtggagcaggccaagtacgtcagcatgaccatcaaaggcgtgacctccgaggactcgggcaagtacagcatcaacatcaagaataagtatggcggggagaagatcgacgtgacggtgagcgtgtacaaacacggggagaagatcccggacatggccccgccccagcaagccaagcccaagctcatccccgcgtctgcctcagcggcaggccagtgaaggcgttttcctagcctggagatgggaaaatatgcttggcagagacaggaatgctgtgtgcttgttccaaatgagcagctggcatccgagtggtgtcctgtgtgggctgatagttgatcacacattgtgcttttgatttttgcatttggtgatgaatattttatacccgtctaagggagaaagctaatgttttccacaagactgaacaacgtgtatttacacgagggtagacggcagatgcctgacagagagtgggttggcagacaacacactagcattttcacgggtgtgggcacatgggtgtggcacctggacgtgtgcagcatgtggcggtctctgtgtgaagccaccgtgcttctctttggggggccgcgagatctagcatctctgaaatcctggctgtcgaggctttgaagcatgtgttacctggttaagcttgttttctcttgctttaggcaaataaaagtttaaaaatcaaaaaaaaaaaaaaaaa

SEQ ID NO: 286213 - DNA, 1000 bp, Homo Sapiens; identical to SEQ ID NO: 116114

SEQ ID NO: 286214 - DNA, 1000 bp, Homo Sapiens; identical to SEQ ID NO: 116115

SEQ ID NO: 286215 - DNA, 1000 bp, Homo Sapiens
gagcccctcgcccgacagactcctgagcctgcaggactttccctgaggaccgaagaatcaaactttggaagcaaaagccaggacccaaacccccagtacagcccaatcatcaaacaggggcaagccccagtcccgatgcagaaagagggggccggggagaaggagccctcccagctgctcaggcccaagcctcccatccccgccaaacctcagctgcccccagaagtctacacaatccctgttccacgacaccgcccggccccacgccccaagccctccaatcctatctacaatgagcctgatgaacccatagctttctatgccatgggccggggcagccctggggaagcccccagcaacatctatgtggaagtggaagatgagggcctacccgccacccttgggcaccctgtcctacggaagagctggtccaggcctgtcccaggaggccagaatacaggtggctcccagctgcattctgagaactctgtgattgggcaaggccctcccctgccccaccagcccccacccgcctggagacacaccctcccccacaatctttctagacaggtgcttcaggacagaggacaggcatggcttccccttgggcctcctcagtaggcggtctggcctgacccccaacaaagaagcctggaggtcagagaagcaaatgcggagcctgctccctcctaagaagatcccaagaatccaatggctcagtccttggtgatctaagacagcaaagaagtgtgcaaggagggccctgttagctcccactgtcctggtttctcctcctggagtctaatttccttggccctctgagccttttgagtctgggccctggtccaatgctgctgttgtctgaggaatggtttggtgagaacagatgttagaacttgtttgttgattcttgtctggctaataaatcatcaccaactgccttctcctacagggaaaaaaaaaaaaaaaaaaaaaaaaaaaaaaaaaaaaaaaaaaaaaa

SEQ ID NO: 286216 - DNA, 1000 bp, Homo Sapiens; identical to SEQ ID NO: 116116

SEQ ID NO: 286217 - DNA, 1000 bp, Homo Sapiens
caggttccatgaccatgggcctaacttaaagatgtgaatgagtgttacagttgaaagcccatcataggtttagtggtcctaggagacttggttttgacttatatacatgaaaagtttatggcaagaagtgcaaattttagcatatggggcctgacttctctaccacataattctacttgctgaagcatgatcaaagcttgttttatttcaccactgtaggaaaatgattgactatgcccatccctgggggtaattttggcatgtatacctgtaactagtaattaacatcttttttgtttaggcatgttcaattaatgctgtagctatcatagctttgctcttacctgaagccttgtccccaccacacaggacagccttcctcctgaagagaatgtctttgtgtgtccgaagttgagatggcctgccctactgccaaagaggtgacaggaaggctgggagcagctttgttaaattgtgttcagttctgttacacagtgcattgccctttgttgggggtatgcatgtatgaacacacatgcttgtcggaacgctttctcggcgtttgtcccttggctctcatctcccccattcctgtgcctactttgcctgagttcttctacccccgcagttgccagccacattgggagtctgtttgttccaatgggttgagctgtctttgtcgtggagatctggaactttgcacatgtcactactggggaggtgttcctgctctagcttccacgatgaggcgccctctttacctatcctctcaatcactactcttcttgaagcactattatttattcttccgctgtctgcctgcagcagtactactgtcaacatagtgtaaatggttctcaaaagcttaccagtgtggacttggtgttagccacgctgtttactcatacagtacgtgtcctgtttttaaaatatacaattattcttaaaaataaattaaaatctgtatacttacatttcaaaaagaaaaaaaaaaaaaaaa

SEQ ID NO: 286218 - DNA, 1000 bp, Homo Sapiens; identical to SEQ ID NO: 116118

SEQ ID NO: 286219 - DNA, 1000 bp, Homo Sapiens
ggcacagcagaagcttactgctaatgaaatgggaacctcccccccccttgtggtttcagcacagaacctgaatgccaggaaaaattcctgggccaagaagctaaagctaaagaaaccttccttttttcaacgtttttttttctttcaaactgtagggtcacttttgattgaggcaaaggggtcctactgtaagtggaaaagactcactcccctaacataagttttcactgtggtgggatggtgccgcccgatatgcttgatatgcttttccttccacatgttaagctaggaaacctaacaggatgtcagcagggcagttaactctggactcagagccctcaagggcatgtggcagaacctcatggacatcacaagaccatcagtctgaatccaggtcgtgggggctgtcatagccgaactccttctgcacatccagagggtacttgctccacatccgctgtctgctgctgcctctttcctcctcactcaggctgttgtagtcagcagagcctagaatgacatcccgggagtggattctaaatgtgattttcctaggctactgcaggagccccttctcttctcagaaaggtctgtttttgttcccgattgtaatgcaaaatccttgctcaataaataaaaaagaatatagaattcttttttttttaaagaaggaatcactttcctatcatctaaaccaagttccttcacactggagtattttgtcacttctcccctccgtggagtattttgtcacttctcccctccgtataggattttttgttgttgtaagagttgtagtcatattgtaaatatttttgtacctttctccttttaacgtgttattgacaaacctccccaaaagaatatgcaattgtttgattcatttctctgttatcagacaccaataaattctttttgttgggaaaaaaaaaaaaaaaaaaaaaaaaaaaaaaaaaaaaaaaaaaaaaaaaaaaaaaaaagaaaaaaaaaaaaaaaaaaa

SEQ ID NO: 286220 - DNA, 1000 bp, Homo Sapiens
atcatcgggaactccacacttctgagaattatctacaagaacaagtgcatgcgaaacggtcccaatatcttgatcgccagcttggctctgggagacctgctgcacatcgtcattgacatccctatcaatgtctacaagctgctggcagaggactggccatttggagctgagatgtgtaagctggtgcctttcatacagaaagcctccgtgggaatcactgtgctgagtctatgtgctctgagtattgacagatatcgagctgttgcttcttggagtagaattaaaggaattggggttccaaaatggacagcagtagaaattgttttgatttgggtggtctctgtggttctggctgtccctgaagccataggttttgatataattacgatggactacaaaggaagttatctgcgaatctgcttgcttcatcccgttcagaagacagctttcatgcagttttacaagacagcaaaagattggtggctgttcagtttctatttctgcttgccattggccatcactgcatttttttatacactaatgacctgtgaaatgttgagaaagaaaagtggcatgcagattgctttaaatgatcacctaaagcagagacgggaagtggccaaaaccgtcttttgcctggtccttgtctttgccctctgctggcttccccttcacctcagcaggattctgaagctcactctttataatcagaatgatcccaatagatgtgaacttttgagctttctgttggtattggactatattggtatcaacatggcttcactgaattcctgcattaacccaattgctctgtatttggtgagcaaaagattcaaaaactgctttaaggctgggccacatgttggaaataagctagtaatgttgttttctgtcaatattgaatgtgatggtacagtaaaccaaaacccaacaatgtggccagaaagaaagagcaataataattaattcacacaccatatggattctatttataaatcac

SEQ ID NO: 286221 - DNA, 1000 bp, Homo Sapiens
ttgagctcctgggcaagaacacctttgagttcctgaaggagaataacttccagccttaccccctaccacatgtccggcacatggcctaccagctctgccacgcccttagatttctgcatgagaatcagctgacccatacagacttgaaacctgagaacatcctgtttgtgaattctgagtttgaaaccctctacaatgagcacaagagctgtgaggagaagtcagtgaagaacaccagcatccgagtggctgactttggcagtgccacatttgaccatgagcaccacaccaccattgtggccacccgtcactatcgcccgcctgaggtgatccttgagctgggctgggcacagccctgtgacgtctggagcattggctgcattctctttgagtactaccggggcttcacactcttccagacccacgaaaaccgagagcacctggtgatgatggagaagatcctagggcccatcccatcacacatgatccaccgtaccaggaagcagaaatatttctacaaagggggcctagtttgggatgagaacagctctgacggccggtatgtgaaggagaactgcaaacctctgaagagttacatgctccaagactccctggagcacgtgcagctgtttgacctgatgaggaggatgttagaatttgaccctgcccagcgcatcacactggccgaggccctgctgcaccccttctttgctggcctgacccctgaggagcggtccttccacaccagccgcaacccaagcagatgacaggcacaggccaccgcatgaggagatggagggcgggactgggccgcccagccccttgactccagcctcgaccgccagccccaggccagagccacccaatgaacagtgcaatgtgaaggaaggcaggagcctgcaggggagcagacttggtgcccagctgccagaaagcacagatttgacccaagctatttatatgttataaagttataataaagtgtttcttactgtttgta

SEQ ID NO: 286222 - DNA, 1000 bp, Homo Sapiens
atattagtcaggatgagaaactataagatgtgtgtaacatttggaaatgcaccaaagtgagcgtttaaatcttctcattttattgaaaactaagagcagaaaatgtaaaatgctcatgaaggttttgaatgccaaaagatattttagaatcaatttataaaggggtaattcattaattacactttaaaattggaaagtgggataagaaatctaaagtaaaccagcttatctttgaaacaatattattttgaaattggctttaaaataaaaccattcagattgaaattctaattagctcatttgtggagtttgatcacacaattcataatgttgctgctttccattaactagtcttgaaatgcctttgtttgtaaaaataaaataatggtactttcattttataacaaggtgtttttttcaagaaataatccatgctaaaatggatatttgtgatcctgaaatgtttactaagcattgtaaatttatttataactgccatctccaactacatccttatgatgtttttaacaataaaattaaaacaactgttaaactaaaaaccacaccgttttccagtacttgatctctgagctacaatactcactaaatataattttccaatcaaaatattctattctatattctaagggttaatatgtgattatagtgtccacttgccaccatttttttaaatcaatggacttgaaaagtattaatttagatggatgcgcagatataccctcagttcagtcatagattggagtttgcatataataatgtaaatgtatgtcgacactattctaaatagttctattatgactgaaatttaattaaataaaaaaggttgtaaaatgtgatgtgtatgtgtatatactgtatgtgtactttttaaaataggtgtatgtcccaacccttttttatacaggtttgaatttaaaattacatgatatatacatatactttattgttctaaataaagaattttatgcactctcataaa

SEQ ID NO: 286223 - DNA, 1000 bp, Homo Sapiens; identical to SEQ ID NO: 116119

SEQ ID NO: 286224 - DNA, 1000 bp, Homo Sapiens; identical to SEQ ID NO: 221417

SEQ ID NO: 286225 - DNA, 1000 bp, Homo Sapiens; identical to SEQ ID NO: 116120

SEQ ID NO: 286226 - DNA, 1000 bp, Homo Sapiens; identical to SEQ ID NO: 284743

SEQ ID NO: 286227 - DNA, 1000 bp, Homo Sapiens; identical to SEQ ID NO: 221418

SEQ ID NO: 286228 - DNA, 1000 bp, Homo Sapiens
acaacacatgtattggtttaaactcgataatgacaggaaaattccaaactagagcagtaaattcaaatggtaagatgaatcctagaaggcctctgattgcagcatgttgacaccaacctcacgttacgaacaattcacagagaatttgcctttgtggcaactgaagatggaagtctggggggcacagacaaccttatcaaacaatataaaagccaatataaattctcataagcactatagaatttgcaaattcagaacattttatacctaaaagtaattctgtctttcctaaagtgtttttaacatgaaaattagtaggaagatgtggttactatttggaaagtgtaatgtaacaaaactctcttttgttaccacaaattttgtgagtttagtactctacagattgccccataagagcagtagcttttgaaactcataattctctgaaataaatgaaagacatttaattcaaggatcaaaaattgtggccatctttgcaaatgactacctatagcctgtgaaaatacatttcaaaaaatgttatgtgcaatgaacactaaatttaagagcagttacagtgtgactcactcatgtttaaaaaaaatcgaagagctaaaaaatacgtctaatttatgtaacccattggaatgtatttctaggttctcttcaggattaattaaataaacatgcaatttatgaaaacatataaacaattatttatcacttttatgacccaaatcacaataaaattgtcatttaggataaactggggagaatagactgaacatatggttatattcacagttatttattaacttaaatgttattccaacattagagctaatgttaaaaagatttaaactgtaacgtctaatatttggaataatatattaaagtattagcactgtggttgattttcttgaattatgttgcatcttgtactactaagcttgtgaaaataaacatttggatgttttaaaaggtaaaaaaaaaaaaaaaa

SEQ ID NO: 286229 - DNA, 1000 bp, Homo Sapiens
aatacagtcaatgtagccagcaggatggagtccacgggggtcatgggcaacattcaggtggtagaagaaacccaagtcatcctccgagagtacggcttccgctttgtgaggcgaggccccatctttgtgaaggggaagggggagctgctgaccttcttcttgaaggggcgggataagctagccaccttccccaatggcccctctgtcacactgccccaccaggtggtggacaactcctgaatggcctcgagcctgaaacagtccaaaccggaagggagaatttattttttgaaactgaaggaagtcccgaccttcctggattgaagtgcacactcatggactttaggtttagaaacctcctcagccttcatttgttcgtggatgtgtgagctctgagggtggccctgctattcctctgcgtgcctgtagtgtccccagcataggggtcttaggcatagggctgaacagtccttccagagccctcgttccaatccctgccgtccttgcccctgaggggccctgaccactgtgagcaggagggtggcagagctgggacaaagctgcctttgccgctgggctttccgggactgtggagggagcacaggcggggaagctccacttcagacagggcttggtggggcaggacatggctcccattttgaagggaggtctccatgtggtccgagtgaggtgagacggccctcgtcctggtgttcctgatcatcttgaaaggttcttctggaactcctgtccccttagtcatgagaacagaaagtgcaatatttcctttcacctggcaggggaggggggatttatttctgaaagaaaaatatataaacagatcttctacatttatatttttaatcttctgttaaatacactttccgatattgccttgccttttgagctcttgctacagtcgcctttgctactgctttaagagaatttacaggtattgataaagaacaagactgttttattaaaagctttattcaacttg

SEQ ID NO: 286230 - DNA, 1000 bp, Homo Sapiens; identical to SEQ ID NO: 116121

SEQ ID NO: 286231 - DNA, 1000 bp, Homo Sapiens; identical to SEQ ID NO: 221421

SEQ ID NO: 286232 - DNA, 1000 bp, Homo Sapiens; identical to SEQ ID NO: 116122

SEQ ID NO: 286233 - DNA, 1000 bp, Homo Sapiens; identical to SEQ ID NO: 116124

SEQ ID NO: 286234 - DNA, 987 bp, Homo Sapiens; identical to SEQ ID NO: 116125

SEQ ID NO: 286235 - DNA, 1000 bp, Homo Sapiens
cctaggggttgcctcaggagtccttggggagatgaagggggtggggagctgagcaggctgggcaatttgccctcaaacagaacagctccccttgtagctgtcttacatattggggttcagggtaagattttatttgcattaaggggtttgctgctgaaaaaaagttggaaaaccactgactagaccatcggctccaaattggagtctgtgcttccttccccaggtatggagcacactcttcaccctaccctctaccacaggacacatatccctgttagcattccccgggacctttagccaagaggagctgcagggaccatggccaggttaccaaaatgccctgctctgaagccttgacacctgggtggaaagagaggctgttttctgaaagggtaaagggcttggtctggattcccagaagcatagcttagatgggaccacagtgggcaattttgacctgtcctgcccttcttagcttgaagggaaaccccagagactcttctgtcagggaaaactagggactctcttctagagccatatagttccttgggattagctcttggccaagaaggctgagtatggttcccaatttttaaatccatttcattttttaaaaaataagggaaataaatgtaattgccatttttcaaagattaagtaggaggagaggggtttcttgctctccagagcccaaagggacaaatagggactttgtttaggccaaggaaggagcggaagtagggcaactcggtcctgcgattattaatcccactccccacttattctagggcacacaaacactattttacttttttaaaatcataaaacggcagaacagatttggttagtttagaagaaaagaaagctctataaatataaatctatattcctgtatttttatttaataatttataaataccaagttcatttgacttttatttttgtgtaatatgtaatgatcgtattaaaaacaataaataaagcccagaagtttaatgag

SEQ ID NO: 286236 - DNA, 1000 bp, Homo Sapiens; identical to SEQ ID NO: 116126

SEQ ID NO: 286237 - DNA, 1000 bp, Homo Sapiens; identical to SEQ ID NO: 116127

SEQ ID NO: 286238 - DNA, 1000 bp, Homo Sapiens
tagcgcttctagcaattccttctacgagtctgagctaccacaaggtttccaggattattacaatttaggccaattcacagatgacgatcaagtgccaacacccctcgtggcaataacgatcactaggctagtggtgggtttcctgctgccctctgttatcatgatagcctgttacagcttcattgtcttccgaatgcaaaggggccgcttcgccaagtctcagagcaaaacctttcgagtggccgtggtggtggtggctgtctttcttgtctgctggactccataccacatttttggagtcctgtcattgcttactgacccagaaactcccttggggaaaactctgatgtcctgggatcatgtatgcattgctctagcatctgccaatagttgctttaatcccttcctttatgccctcttggggaaagattttaggaagaaagcaaggcagtccattcagggaattctggaggcagccttcagtgaggagctcacacgttccacccactgtccctcaaacaatgtcatttcagaaagaaatagtacaactgtgtgaaaatgtggagcagccaacaagcaggggctcttaggcaatcacatagtgaaagtttataagaggatgaagtgatatggtgagcagcggacttcaaaaactgtcaaagaatcaatccagcggttctcaaacggtacacagactattgacatcagcatcacctagaaacttgttagaaatgcaaattctcaagccgcatcccagacttgctgaatcggaatctctgggggttgggacccagcaagggcacttaacaaaccctcgtttctgattaatgctaaatgtaagaatcattgtaaacattagttctatttctatcccaaactaagctatgtgaaataagagaagctactttgtttttaaatgatgttgaatatttgtcgatatttccatcattaaatttttccttagcattgtaaaaaaaaaaaaaaaaaaaaaaaaaaaaaa

SEQ ID NO: 286239 - DNA, 1000 bp, Homo Sapiens
atgatacgtagcctacagtcagtgggcctgaagcccatcatccctcagggcagctacttcctcatcacagacatctcagacttcaagaggaagatgcctgacttgcctggagctgtggatgagccctatgacagacgcttcgtcaagtggatgatcaagaacaagggcttggtggccatccctgtctccatcttctatagtgtgccacatcagaagcactttgaccactatatccgcttctgttttgtgaaggatgaagccacgctccaggccatggacgagaagctgcggaagtggaaggtggaactctagccctgaagtcacgccttggccctgacatccccacatgcccgcagagatcctctttgagtgtctgtctttgtccaggtttcagacatttctaggttggggaagatgctattgggaaacctcttctccgtgacacagaatgttctgggtgggagccgcccttcttcatcttagagaaccaagtgcctcctgtctgaaaggtgagggtggcctgacctgggcctctccctgcccctccataggtgggtttgtagggtcttgtgttgcttctggtctctccaggcttggctgagacggacggtagacttccaccatgtaccgatcacatcccagctctgcatggcccctgctaaggctcaggtataacctcaccttccctggctcatcttggccttggggagttgcctttaggcttgagtcctcaagcctctccttttcgtccataataaaatgtttaagttattaagatccttattgacggcttctctctgcttcacactcatgctgatggctgatctaacttgtgaagaatgcccagaagaacctcagacacccccacaactttgtacaaatggttactgtagtcacatagtggcacaaccaggcctagcacccaaggccctcaaatgaattcctcactattaaaaaaaaaaaaaaaaaaaaaaaaaaaaaaaaaaaaaaaaaaaaaaaa

SEQ ID NO: 286240 - DNA, 1000 bp, Homo Sapiens
actatcagtcttcccacagcttcaatcactgtcattattctaatcctactcctacttaaattttaagttatgaggtttatgtcaaaagcaacatttcacaaatgtacttttaaggcataataagggttaacattctaggcagtataaacacaccccataatgcaagtaataggtaatctagagatgtggactttattgctatatgggaattacatttaaatttgagggcattttatataaagaaaaatacagacctataaagtttggcatattcattaagttatcttttaatatttttttctagaaaacaggtgacatttgtatctacgataaaaatttttatacagaacctactgcctcaaactgaatcccatcaagaaaactagtttctattgtattagtaactcaaaataaattatcacttcgaaaacttgctttcccacactaaggtaagttcagactagattgaacactccagaattttttactacagactgtttttaagttagaagtgatggcaattttataaatagagaatatacttccactgatgcccttactgtgccaaaacaaaaatcttaagaaaagcaagtagacaccttcataactatgaatgaagctgctgaagtagtgtttaggatcctccatggcagttagtgaatgtaagaagtacagtgttaaagtgttgtaaacagttactcagtgcaatgtatagcctgagtctatccatgatggctatatccaatttgacatcacgttatggatcagtacacaatgaaaaaccaaagaaccacagtatatcttattcttaacttttgtaaaccatgttttatgggtaactttttagttttcccaaaaggctgataaatttcaatattttgaatacatcattgttaattttgagttggcagaggtaaactaaccaactaccattatgttttagtactaagggatatacctttcaataaagttaatgaaattcaaaaaaaaaaaaaaaaaa

SEQ ID NO: 286241 - DNA, 1000 bp, Homo Sapiens
taaaaccagactctctctgtttacctcgtcagagaccacccatggaagataacacagacataagggatttcattcatcaaaggctacaggaaaatgacgtggacccaactgccccaccatacgattcactggccacatatgcctacgaagggagtgggtccgtggcagagtccctcagctctatagactctctcaccacagaagccgaccaggactatgactatctgacagactggggaccccgctttaaagtcttggcagacatgtttggcgaagaagagagttataaccctgataaagtcacttaagggagtcgtggaggctaaaatacaaccgagaggggagatttttaaaaaagaaaaagaaacacaaatattaatagaaatctctctcacacacacacacacacacaaacacacacacacacacacactctttctgggacaagattcctttgattacctggtttctagtaagttactaaattaatcatattgtcagttttggtttattctgccaacaagagatacatcctataatgtgtacttgctttgttttgttgttttgttttttcacaatcacactgagacaagctcaggcctattcaatacaatttactgacatgacaacctagaacgaagatagctatgtggcatcacggtggaagagtgttagatttttcttaattccactaaagtgcctattgaaactcttatcatttaaagtggtgtacagtacactctgctgtgatggtattgcgggattcagagataaagacataaaacagacaccgtctttatgtcaagaagcaatagcgacactctgactctcctcattccttttgagaacaaaagaagaacactttctgatctccaccttcttctaattcaaaaggttttctttttcttttttaaactgtatgctaaaacgtatttgtttatcctatcctttcagaaaattgaaataaatatgaaaatatcaagttcaatatgtaagtccc

SEQ ID NO: 286242 - DNA, 1000 bp, Homo Sapiens
acgtgcattataattttttaaacagatattccctcttgtcctttaatatttgctaaatatttcttttttgaggtggagtcttgctctgtcgcccaggctggagtacagtggtgtgatcccagctcactgcaacctccgcctcctgggttcacatgattctcctgcctcagcttcctaagtagctgggtttacaggcacccaccaccatgcccagctaatttttgtatttttaatagagacggggtttcgccatttggccaggctggtcttgaactcctgacgtcaagtgatctgcctgccttggtctcccaatacaggcatgaaccactgcacccacctacttagatatttcatgtgctatagacattagagagatttttcatttttccatgacatttttcctctctgcaaatggcttagctacttgtgtttttcccttttggggcaagacagactcattaaatattctgtacattttttctttatcaaggagatatatcagtgttgtctcatagaactgcctggattccatttatgttttttctgattccatcctgtgtccccttcatccttgactcctttggtatttcactgaatttcaaacatttgtcagagaagaaaaacgtgaggactcaggaaaaataaataaataaaagaacagccttttcccttagtattaacagaaatgtttctgtgtcattaaccatctttaatcaatgtgacatgttgctctttggctgaaattcttcaacttggaaatgacacagacccacagaaggtgttcaaacacaacctactctgcaaaccttggtaaaggaaccagtcagctggccagatttcctcactacctgccatgcatacatgctgcgcatgttttcttcattcgtatgttagtaaagttttggttattatatatttaacatgtggaagaaaacaagacatgaaaagagtggtgacaaatcaagaataaacactggttgtagtcagttttgtttgttaa

SEQ ID NO: 286243 - DNA, 1000 bp, Homo Sapiens; identical to SEQ ID NO: 221422

SEQ ID NO: 286244 - DNA, 1000 bp, Homo Sapiens
cgacgtggacggaagtgggaccatcgacgcgaaggagctgaaggtggccatgagagcgctgggcttcgaacccaggaaggaagagatgaagaaaatgatctccgaggtggacagggaaggcacggggaagatcagcttcaatgacttcctggccgtgatgacgcagaagatgtccgagaaggacaccaaagaagaaatcctgaaggccttcaggctctttgatgacgatgagaccgggaagatctcgttcaaaaacctgaagcgtgtggccaacgagctgggggagaacctcacggatgaggagctgcaggagatgatcgacgaagctgatcgggatggggacggcgaagtgaacgaggaggagttccttcggatcatgaagaagaccagcctttactgaagtcggttcagaagctaaagtgactctctgggttgcctgcttccattttgtgaaaccttagaggacagcggctgcctgtcccttcttcaccccctcacccccataatttgtctagatctatttccatatctctagttcaataatagaatttgaaagatgcttgtaatgtgagttttgggttttaattctcaagagccaacctggagcacatgaggttaaacaaagggccctgaagtttgagtgcgccctccatttgccctgtgctgaacttgctgttcatctgttgatctggaggcaggacagcttctgggacacacaaaaatgtggttccctttgtcacttctttggtggtcttaaattatcttgcttcatatatcattccttaaattccagtcattgttccagcataatgagatggaatctgccagtagatttgcctagcctgtccacttagctgaataccagtttgaaggaaaacagggtggccacttacaaacttacggagctcaggacagatattcttataaagaatagacttgcttgggtggtagtacgttgtgcaattttgactattcactggctttatacctgcaaatgccc

SEQ ID NO: 286245 - DNA, 1000 bp, Homo Sapiens; identical to SEQ ID NO: 221423

SEQ ID NO: 286246 - DNA, 521 bp, Homo Sapiens
ggccagcgcagccattttggcttcctgaccttgggctacggctgaccgttttttgtggtgtactccgtgccatcatgtccgtcctgacgccgctgctgctgcggggcttgacaggctcggcccggcggctcccagtgccgcgcgccaagatccattcgttgccgccggaggggaagcttgggatcatggaattggccgttgggcttacctcctgcttcgtgaccttcctcctgccagcgggctggatcctgtcacacctggagacctacaggaggccagagtgaaggggtccgttctgtccctcacactgtgacctgaccagccccaccggcccatcctggtcatgttactgcatttgtggccggcctcccctggatcatgtcattcaattccagtcacctcttctgcaatcatgacctcttgatgtctccatggtgacctccttgggggtcactgaccctgcttggtggggtcccccttgtaacaataaaatctatttaaactttaaaaaaaaaaaaaaa

SEQ ID NO: 286247 - DNA, 1000 bp, Homo Sapiens; identical to SEQ ID NO: 221424

SEQ ID NO: 286248 - DNA, 1000 bp, Homo Sapiens
tctgccccttctgtttccataggaatcatgttggatagtcagctgtaccaagccccttggccctctcccatgcacacaaacacctcctagcaagacctgttggttagctggacatgctttggcaatttttttatactaccaagtgaccataaaggcatggcatttgttgtgactggcacccaatgtttgattttttttttaaaactatccaattaaaattaaggtctgggagtgttctgtttcccattactttaatactcacctcctcccagactttctacacctgttgcacctcaggcagaggatgttctggacctccccctcttggtccctactagagacctctcaacagatctgtgggcccagtcattgggttttatcagtgcttaatgtgaactaagttttttacttccacagaatacaagccactaccttctgacctccccaccccccaccaacccccatcttttaatatgctgtggggcatagaactccggaatgaccagcatgatattttcagagtcttgtccccggggtattagcacctctttttgaacagggaattgattcaagattggacatggtctcctctgattatcaggtactggggctgagggcattaaaaatagtaagcctccctcctcgtcccctgcctcaagaaattgcctccttatttatcaacatctttttcctccctttccctgagagctcacagtacaatgtttcagaagccccatttgcacaggttttcagcaactcagaatgctctacttctttttctttgagaaaggattaagatacactcctgctgtgcccccatctttcctccaaactcctgcctgtgtttgtgtggatacccagtcccagaaccacactgttgagttggacacactgtaaacccctgggtaactgtcaagtcatgatggagacttcaggttgttctgtataaaatgcaaaataaatgtttttattaacaatgaaaaaaaaaaaaaaaaaaaaa

SEQ ID NO: 286249 - DNA, 1000 bp, Homo Sapiens; identical to SEQ ID NO: 114989

SEQ ID NO: 286250 - DNA, 1000 bp, Homo Sapiens
tatccacaacttttcaagtattgaaagtagaataaaaacatgggttcttagtctttagctatctgttaaagcctatgaatgccttcttaaaatcatgtttttaaatgcataaaatatataggattacaaaggaatctaattatatcgaaatacagttattaaaatgttaaaagataagtttgttatatattaatatgcatgcttctttataaatgcattaaataagagttaatagctatcctaaatttgaaatagtgataagcataatgaaaatagatgcaaaaaactaatgtgatatgaaaatatctgggtttttcttttgatgatgaagtattgctaatattaccgtggtttatgaactatgttcagaattgaagaaaatcctaactttcagttagaggttagtgacggggttcaggacaccctacacaaaatacagcactttgacatattgaatattttaagctgaaggcatttgaggaaattgcagaagcaggaaggtgactctgaccttctgcctgctgttctccccagaagcagccataaaacctgggaaggattttctgaccttcccctgaagtagatcataagactgtcatgtaagaggtgctctcctggcacccagagaaaaggagcatccttacctccaaaagcacagggacacaaagaggaatctaaacaaacaggcctctcagtttcccccagtttattacatttagcttgttcacactttgccctatgacatttctacatcactggctgctcttcatcaaacctactataaaaaacattcaagttcaactgtttctttgggcctttatttccttatggagcccctcgtgtcgtgtaaaacttatattaaataaatgtgcatgcttttctcttgctaatctctcttttgttatagagatctcagccctaaacctaggatggatagaaggaaacatatgttctcccctacattagtaaaaataaaaatggaattttttacccatacaaa

SEQ ID NO: 286251 - DNA, 1000 bp, Homo Sapiens; identical to SEQ ID NO: 117965

SEQ ID NO: 286252 - DNA, 1000 bp, Homo Sapiens
agaagtgcatggacaagcctgggccaaagttggacagtcgggctgaggcctgttttgtgaactgcgttgagcgcttcattgatacaagccagttcatcttgaatcgactggaacagacccagaaatccaagccagttttctcagaaagcctttctgactgatctcagcattacctctttggaaaaggaaggtagttcaagaaatgaagagctgttgatgggatgattgaagaaacagctatgagaggattggctcccatcttttgttactcttgggacatcctgtcatctgagaatgaacaaagaccaattttttgtgtgtgaagcttaagggtcatatgtttgcttgtattttttaatgctaatcttgtgaaaataattgacaggcgaaagaaaactctatttagatgcatattactgtacatgggactatgcttttctcaaagccccattaactgcttcctataattttgatagtgggaccacatacgtaaaaatctctcatttgtgtggagtcatttctgatttcaggggagatccttgtgtttatcagaaagggcagaagtaggggaagaataatttggtatccttatctagtgtttgattgtcaatgctggagaaaaatatctgtaagagtgtttatacagtacacttcagttatcttgatctccctttcctatatgatgatttgcttaaatatccatattaagtaagtctcaaggtagggtaggcagcctgagagtctagaggcctttagttataaaggaatctagccagtgaacataattcttattactagactgccacaaggaagaaattaacttaccctgtatatcagggtacaaaaaattcagtgatgtgcctaaataagttataaagatttaggccaatcagaagctaacagcagtttcaggtagaggtgcatgcctaatgttagttagtgtagattccatttactgcattcttctgatcactgaaataaaagctatataagattcata

SEQ ID NO: 286253 - DNA, 1000 bp, Homo Sapiens
atgatgaatggtggcaagccaggcaggttacaccagatggtgagagcgatgaggtcggagtgattcccagtaaacgcagagttgagaagaaagaacgagcccgattaaaaacagtgaaattcaattctaaaacgagagataaagggcagtcattcaatgacaagcgtaaaaagaacctcttttcccgaaaattccccttctacaagaacaaggaccagagtgagcaggaaacaagtgatgctgaccagcatgtaacttctaatgccagcgatagtgaaagtagttaccgtggtcaagaagaatacgtcttatcttatgaaccagtgaatcaacaagaagttaattatactcgaccagtgatcatattgggacctatgaaagacaggataaatgatgacttgatctcagaatttcctgacaaatttggatcctgtgttcctcatacaactagaccaaaacgagattatgaggtagatggaagagattatcattttgtgacttcaagagagcagatggaaaaagatatccaggaacataaattcattgaagctggccagtataacaatcatctatatggaacaagtgttcagtctgtacgagaagtagcaggaaagggcaaacactgtatccttgatgtgtctggaaatgccataaagagattacagattgcacagctttaccctatctccatttttattaaacccaaatccatggaaaatatcatggaaatgaataagcgtctaacagaagaacaagccagaaaaacatttgagagagccatgaaactggaacaggagtttactgaacatttcacagctattgtacagggggatacgctggaagacatttacaaccaagtgaaacagatcatagaagaacaatctggttcttacatctgggttccggcaaaagaaaagctatgaaaactcatgtttctctgtttctcttttccacaattccattttctttggcatctctttgccctttcctctggaaaaaa

SEQ ID NO: 286254 - DNA, 1000 bp, Homo Sapiens; identical to SEQ ID NO: 116130

SEQ ID NO: 286255 - DNA, 1000 bp, Homo Sapiens; identical to SEQ ID NO: 221425

SEQ ID NO: 286256 - DNA, 1000 bp, Homo Sapiens; identical to SEQ ID NO: 116131

SEQ ID NO: 286257 - DNA, 1000 bp, Homo Sapiens
ttcttgcctttcctgttgtactctgaatttctctccctacctccctcactttcttcctctctccttcctttccttcctttttctctaccaggccatttttcaaatttacatcaaagatacctgaagtgttggtatctgagaatatctgtcactcctcttatctgagaagtgaccttttatttttaagatgactacagacctatttttagatatgttttcagtacaattttgaacagcaactttttaattaaacatcttccagtgttaggaagttgagaaacgttcataggcaagtctgctgttctatgtcaccatcttttgtctcccctagtcccccaggagctctttcctttcccctctagttttgggtgtgcatgtttggagtttgtagtgggtggtttgtaaaactggaccattctgccttgctatgggttgttcaagaaagcctcattcttttctgtgaccctttcgcttttgcattcaccctccttcccacctacctgtcctggggctgttgagcagcataataatcccgggagaatgattcccctcatagaaagacaaaagcatccatcccctcatagttaagtagccactggtgtcctgggaatttctggttggatttggtgccctgaacttttttattaagaaatcagatcccagggtgagagtaacaggccatttggccaagaaagaaacctgtttgtttttcttttgaactatgaaaagaccctgtttgtgaatatattttagaaagagaggaaggatgtctgcagaactttgttctgttttctgccacaaaaatgtgaatagttcagagtgaaaaccttttgtgatggttgatgtctcaggaataagctggatctccaatgttttggggatgctttgagtctcaaaaaaaattgataatcagaaaagtaatttttgtttgtttgtttaatgtatccctgttctgtttttaattaaactccaagtctcattttaaaaaaaaaaaaaaaaa

SEQ ID NO: 286258 - DNA, 1000 bp, Homo Sapiens
gagagagagagagagaaagctgaacgtgcactctgacaaggggagctgtcaatcaaacaccaaaccggggagacaagatgattggcaggtattccgtttatcacagtccacttaaaaaatgatgatgatgataaaaaccacgacccaaccaggcacaggacttttttgttttttgcacttcgctgtgtttcccccccatctttaaaaataattagtaataaaaaacaaaaattccatatctagccccatcccacacctgtttcaaatccttgaaatgcatgtagcagttgttgggcgaatggtgtttaaagaccgaaaatgaattgtaattttcttttccttttaaagacaggttctgtgtgctttttattttgattttttttcccaagaaatgtgcagtctgtaaacactttttgataccttctgatgtcaaagtgattgtgcaagctaaatgaagtaggctcagcgatagtggtcctcttacagagaaacggggagcaggacgacgggggggctgggggtggcgggggagggtgcccacaaaaagaatcaggacttgtactgggaaaaaaacccctaaattaattatatttcttggacattccctttcctaacatcctgaggcttaaaaccctgatgcaaacttctcctttcagtggttggagaaattggccgagttcaaccattcactgcaatgcctattccaaactttaaatctatctattgcaaaacctgaaggactgtagttagcggggatgatgttaagtgtggccaagcgcacggcggcaagttttcaagcactgagtttctattccaagatcatagacttactaaagagagtgacaaatgcttccttaatgtcttctataccagaatgtaaatatttttgtgttttgtgttaatttgttagaattctaacacactatatacttccaagaagtatgtcaatgtcaatattttgtcaataaagatttatcaatatgccaaaaaaaaaaaaaaa

SEQ ID NO: 286259 - DNA, 1000 bp, Homo Sapiens
aaggactaaaatacttttttaagagataacttcaggaaaccattatattttactatctgcatgctgttaactgtggtacactgtgaaatatgttgattacaaacccattcattacatagtataaggaattcacagtatattgactatatagtgtctaatgatcttgggcagatactgtcaaacttacaatatctatatagatgtaggtctttttaaatttacctagtcattcttctatcatgtatattgatgctgaaagaggaactggtcagctcctctggacaacaaattcttagtctataatattaggagacatcttctgttttgcaaatgtctgtgaatctgagcaacctggcattctgcttactggccagaaagctggcgggtgacatttgtaacatttcctctttgagactctgagttcacctagagaagtctaagcataacagctttctttcccagcacgagcctttatagctctctttagctcaaccactctgtccatccagccaatggatgtcccttcccctgtaccccaatttcaagcttattttaggaagccttgaactaccatgtatcctggctcctagctgagtttattagaggtatggagcagtgcaacttaaactcaagttgcacttacattttgaattttaaaatgatggttttatctgttgtgtgaagtggttcacccttgaggaccaggagcctccatatcctgactgaaaaccttttctgagacttagagtaacagtgcttttggttccttgagttctcctgtctccagataccaaatgaccttgacttttctgccttgtgaattcgtagtccaatcagctgaaattaaatcacttgggagggacgcatagaaggagctctaggaacacagtgccagtgcagaagtttctccaggtggcctccctttccaacaatgtacataataaagtgtatgcactttcactaataaaaaaaaaaaaaaaaaaaaaaaaaaaaaaaaaaa

SEQ ID NO: 286260 - DNA, 1000 bp, Homo Sapiens; identical to SEQ ID NO: 221427

SEQ ID NO: 286261 - DNA, 1000 bp, Homo Sapiens; identical to SEQ ID NO: 221428

SEQ ID NO: 286262 - DNA, 1000 bp, Homo Sapiens; identical to SEQ ID NO: 116132

SEQ ID NO: 286263 - DNA, 1000 bp, Homo Sapiens; identical to SEQ ID NO: 221429

SEQ ID NO: 286264 - DNA, 1000 bp, Homo Sapiens; identical to SEQ ID NO: 221430

SEQ ID NO: 286265 - DNA, 1000 bp, Homo Sapiens
cctgctgggctgtgaactgggccctgacaacacctcggtgcccaccgccaagttcgccctgaacggcgaggagttcatgaatttcgacctcaagcagggcacctggggtggggactggcccgaggccctggctatcagtcagcggtggcagcagcaggacaaggcggccaacaaggagctcaccttcctgctattctcctgcccgcaccgcctgcgggagcacctggagaggggccgcggaaacctggagtggaaggagcccccctccatgcgcctgaaggcccgacccagcagccctggcttttccgtgcttacctgcagcgccttctccttctaccctccggagctgcaacttcggttcctgcggaatgggctggccgctggcaccggccagggtgacttcggccccaacagtgacggatccttccacgcctcgtcgtcactaacagtcaaaagtggcgatgagcaccactactgctgcattgtgcagcacgcggggctggcgcagcccctcagggtggagctggaatctccagccaagtcctccgtgctcgtggtgggaatcgtcatcggtgtcttgctactcacggcagcggctgtaggaggagctctgttgtggagaaggatgaggagtgggctgccagccccttggatctcccttcgtggagacgacaccggggtcctcctgcccaccccaggggaggcccaggatgctgatttgaaggatgtaaatgtgattccagccaccgcctgaccatccgccattccgactgctaaaagcgaatgtagtcaggcccctttcatgctgtgagacctcctggaacactggcatctctgagcctccagaaggggttctgggcctagttgtcctccctctggagccccgtcctgtggtctgcctcagtttcccctcctaatacatatggctgttttccacctcgataatataacacgagtttgggcccgaaaaaaaaaaaaaaaaaaaaaaaaaaaaaaaaaa

SEQ ID NO: 286266 - DNA, 1000 bp, Homo Sapiens; identical to SEQ ID NO: 221431

SEQ ID NO: 286267 - DNA, 1000 bp, Homo Sapiens; identical to SEQ ID NO: 221432

SEQ ID NO: 286268 - DNA, 1000 bp, Homo Sapiens
cttatattgttttttaaactctgccatgaaatttggagacatgactgtgaaattcctaacttactatcttacaaagccagtagctaatttgttgctctatgtatgatcctgttacaagtccagtttgcaattcatttgtttcctagaacacagaagggtaccagtaatacactaaatgttcaaggtgtgtagagaaataatatggaattagcagctatgactccaacagacaggattgtgtgagcagctgaaaggagcaaaaaagaactcagtgtaagagaaggcacatacatagttaagaatactaaagtatttttaaaaatcaaggaagaaataaatgttacacaatttgcattggaataaatagatctatttagtcctacaaatcaggagtggtgtagagacatccaaatttaaagaaaaaaaaacacaaaacagaatgttaaaaatgtatgcagatttatggatattatcaatgagaagacatagcatgtaacttctcctatatctctactgtccagcatgtattgttccaaatatgactccctaaaatatatacactttgcagaagctctaggccctcacctcaaaccttgccattggttgccgtatttcaaggtcaatatagtttccctcactttacacaatcattattcttcaatagtggaccatatccttcaccaggtatcctatttctgttatctagaggttagcagaaaatgaaatgaaggaatttccctaagcagttgggaagaacaaattgtatgcatgtaggcaaagattttgaagatacatttgcaagagatatttgtttaaccaaaatatttggaaagtaacaaataaagacatttaaattttctaaaaatggacttgctcttctaggaaaagaatacccctggggcaaaaatataactctagctgtatttcttcttgtcactcttgattcaacttgattataaatacacctgtcactaccagaaccaaaaaaaaaaaaaaaaaa

SEQ ID NO: 286269 - DNA, 1000 bp, Homo Sapiens
gctggaccctgactgccacgacatgtttgagcacggcagcttcctacgccgccgccgccgcttcacccggcagacaggtgctgagggcacccggggccccgccaaggcacgccgtggacccctcagggcgaccagccaggacccaggagtccccaacgccacgaccggcaggcagtgctcattcccaccagagctgccagatcccaagggcctaagctttgggggtctggtgggggccatgccagccagtatgtgcccagcaaccactgatggcaggcctcggccacccatggagcccaaagagatttccacgcccaagcctgcatgcccaggggagctccccgtggccacctcatcttcctcatgcccagcgtttggctttcctgccggcttctcagaggctgagagttttaataaggcccctacgcccgtcttgtccccggaatcaggcatcgggagcagctaccagtgtcggctgcaggcactgaatttttgcatgggggctgacccaggccttgagcacctcttggcctcagcagccccctcccctgcaccacccacccctccaggctcactccgggccccactgcccctgccaactgaccacaaggaaccctgggttgcaggtggcttccctgtccagggaggctccggctacccattggggctgaccccctgcctataccggacgccaggaatgttcttctttgagtaaaggcagcctcacctcgggcagtccctgcaggtccctcaccctccgggctgagcctggctctaggacctgaagaactctcgaaggacccagccctggtgagccaaggacaaccacacagaaagccaggattgaagcggtgctcagccaggcccctggggcctccggacaaacttgggggtgaggggaagcagggcctcttgggatttactctgtggctctcagggccaataaagccatgtgatgatgagggaaaaaaaaaaaaaaaaaaaaaaaaaaaaaaaaaaa

SEQ ID NO: 286270 - DNA, 1000 bp, Homo Sapiens; identical to SEQ ID NO: 221434

SEQ ID NO: 286271 - DNA, 1000 bp, Homo Sapiens; identical to SEQ ID NO: 116135

SEQ ID NO: 286272 - DNA, 1000 bp, Homo Sapiens
gtgctttactctgaagactcgagagaagtttgctgaggaatgccttcaagcacaaagtgatgaatgactgccttcaagtctcaagaaaacacttttccctaacttttagagatatttcagccctttcctgtggcctggtcctatagccaaaatcacagatattcatgagtttctacttgagtgagaaaactgggtgaaggaatagaattttaaatagtaataactgcttgttttttttgtgcaagtacttttatacataagataaacaaaaaccttaccaccaaacataccaaaatgcacctctttcataagtgagttactaagatttctatacctggaatatcatgtatgtttcatttactggatgtttacattttaggaaggaaaatagttttgtttatttaaacaactgaatacttataaactgttgttcctggaagttatttattccataaaaaatttgttcttttgtcatgaatttataattcctaaatgaagaccagaaagtacaaattgctgggaggaagaataggctttattaatcaactgatgtcttgatttttctaaatgggaagattgctttatttttaacactaattatgggagcagattcttagcaaacttctttggaaaagttaatgttatgatgtgcattaggctgccccatcgtgtatataaatgaagcagatttgatttttgtattcttacgtttctctgctttgtagttgtggctgtacttaaagaaatacagaatttcatatatttaaaaatgtttaaaatgtgacccacagaacattgtaaatgattaaaaactaacatgaaaatattacaacctaaaagaattcttaacttcacaagtgttttacttcgacgatgtgcctttgatttaatttgggacacttttttagaaggatacattattcgtgtttgcaacggtctttgaagagcttggaaataaaatttctgcttaattaatcaaaaaaaaaaaaaaaaaaaaaaa

SEQ ID NO: 286273 - DNA, 884 bp, Homo Sapiens; identical to SEQ ID NO: 25705

SEQ ID NO: 286274 - DNA, 1000 bp, Homo Sapiens
cagcctacagagccttgaaaaatcaagggtttaaaatcattgagaggggtgaaattgaagtgaaaggtaaagggagaatgaccacatactttttgatccagaacttgaatgccacagaggatgagatcatggggagatctaaaaccccagttgatcacaaggggtcaacacagaaagcatccttgcccaccaccaagctccagggctcagttcaaccatcttgccctgaacactcttctcttgcatcctggttattatgacgttctttgagctgggccgatagatccagctgaagagttctacatacattagtcttcaaggttcttctctgggcgtttcccatgcagctctctggtagctggggaatgatttgtaatgagtacatgaaacacgttaaatgtccttcagcctccctaccacgacatccaacagctggaacttccatccagtccttcacatgatgggcacctgtgggaaacctgccaggggcagccgatgttcagaggcatccaaaaaaagtctcccacttcggcagccatgaagcccactcatgcaaccgtcctcacttttccttcctctcacggttttttgcagaagcaagtgctcagggaaatgaagacaggagaactgctgccgtcatgagctatgccgacagtcagcagctgatccccgacagaaacgcagcagatgcagacgctcctgatgaaatcatccctgtggggagtgcagggccagatggggactccatggagacagccgaccggcgacagccttcagctccgacaaagacacatcaccttgcaaatgacactttgccgtctggtttctgtgttttgttgtaacaggttaaatgaacccctgggcttaattttccccctacttagttctgtggcagcaaagaaaagtgacttcttttcatttctcagctcaaaacttcttaagccgtgtctcttcctcatcatccctttgagaataaaagtctagaaatgaaacacaaaaa

SEQ ID NO: 286275 - DNA, 1000 bp, Homo Sapiens
aaaatatatcatatggggggagctttttaactcttattttttgaaaatttactgtagcttctatttcgtgaataagaatgttttgattttgatcatacaaataacttttgtagatttttgtttacttttgggggggttcccttagaagacattaaaaaaaaatactgccttggtctgtgcaggctgctgtaatgaaatactatgaacttggcagcttataaacaacagaaatttatttctcgctgttctcaatggtgggaagtccaagattaagggatcaacaaattaggcctctggatcatacatggcattttctagctgtgtccttatacataaaaggaaaaaggtagctctctcgagtctctttaataaagatactaattctcatgactgaatcaccctccaaaggccccacctcctaataccatcactctggggactaggtgtcagcatgtgaattttggaaaacacaaaaattcagaacatagcaaatacctttgaagtataaaagataaaattcatttttagtgaaccctgtaatttattcgtgtatatttactaaacagctgtatctttgaaattgttagtaatgattctgcttcaataactatggtcagggaatttataatattatatttttatatactgaactgccatagatgctggaaaaaaggaactgatgttttcagcatattttcaaaatattgataagggaagttattacttttatatagtattcaacctttttcaggtaatagaagtgaataatttattgtgaaataattcattttataaatgtataattatttttataaattttattgttggaaatcaaaaattagtagattttttaccatgttaaattatagtgagattaaagtattactaaactgtgatgctatgtttgtttcactaaactttctaaataaaaactgagaaaaaaaaaaaaaaaaaaaaaaaaaaaaaaaaaaaaaaaaagaaaaaaaaaaaaaaaaaaaca

SEQ ID NO: 286276 - DNA, 1000 bp, Homo Sapiens; identical to SEQ ID NO: 116139

SEQ ID NO: 286277 - DNA, 1000 bp, Homo Sapiens
tgctgcagtcatgagccttcctgaggaacacaacaaaatggtctactttgccatctcggattatgtcttcaacacggccagcctggtttatcatgaggaaggatatctgaacttctccatcacagatgacatgataccgcctgactctaatatccgactgaccaccaagtccttccgacccttcgtcccacggttagccaggctctaccccaacatgaacctggaactccagggatcagtgccctctgctccgctcctgaacttcagccctgggaatctgtctgtggacccctatatggagatagatgcctttgtgctcctgcccagctccagcaaggagcctgtcttccggctcagtgtggccactaatgtgtccgccaccttgaccttcaataccagcaagatcactgggttcctgaagccaggaaaggtaaaagtggaactgaaagaatccaaagttggactattcaatgcagagctgttggaagcgctcctcaactattacatccttaacaccttctaccccaagttcaatgataagttggccgaaggcttcccccttcctctgctgaagcgtgttcagctctacgaccttgggctgcagatccataaggacttcctgttcttgggtgccaatgtccaatacatgagagtttgaggacaagaaagatgaagcttggaggtcacagctggatctgcttgttgcatttccagctgtgcagcacgtctcagagattcttgaagaatgaagacatttctgctctcagctccgggggtgaggtgtgcctggcctctgcctccaccctcctcctcttcaccaggtgcatgcatgccctctctgagtctggactttgcttcccctccaggagggaccaccctccctgactggcctgggatatctttacaagcaggcactgtatttttttattcgccatctgatccccatgcctagcagagtgctggcacttagtaggtcctcaataaatatttattaaatgat

SEQ ID NO: 286278 - DNA, 1000 bp, Homo Sapiens; identical to SEQ ID NO: 221436

SEQ ID NO: 286279 - DNA, 1000 bp, Homo Sapiens
aagagaatggcacgcaccttgtaggctcctgccctcaccccaccgccctcttaagtttcttttattttctttttctttttttttctttttactttttttgagacggggccttattctgtcctccaggctggagtgcaatgacatggtcatgcgtcactgcagcctccacctcccgggctccagcgattctcctgcctccctgcctcagcctgggacctgagtagctgggaccacaggcatgcgccaccactcctggccaatttttaaaatttttttgtagagatggggatctccttatgttgtccaggccagtcttgaactcttgggctcaagcgatcctcccacctgggactccaaaagtgctgggtttacaggcatgagccaccacacccagctcctccccctcaaacttctgtgcacaaagtgctcccttcccagaggaggggccccatcggtgtgtaaggtggcctattcctctgtgtgttctctggatcttttcagccctgtggtccagtgtccatcacagccatgctgactgagtgactggagacagggatgatggagagttcatgaagggctgggcagagagctggggccacctctggaggtgtcctgctgttcctgttggccccagctgcactcgcagggccttcctgtggcccctttccccaagcaggggcggccgcagctctcacccactttctcctgcagacggcgaggggaccgacctgtttgccgtggctgtccatgagtttggccacgccctgggcctgggccactcctcagcccccaactccattatgaggcccttctaccagggtccggtgggcgaccctgacaagtaccgcctgtctcaggatgaccgcgatggcctgcagcaactctatggtagggggagagggacctgccgcgaaaccatcattgccccatccagtgtcctctgcagcaaggccaggggacgcacacctgcctgactctttcctcacagggaaggcgcccc

SEQ ID NO: 286280 - DNA, 1000 bp, Homo Sapiens; identical to SEQ ID NO: 221437

SEQ ID NO: 286281 - DNA, 570 bp, Homo Sapiens
actgaggggtcagtggttccgggtaggagctaggtgaccctcggctgctgcagggatctgcagcgactgcagccatgggggcccacctggtccggcgctacctgggcgatgcctcggtggagcccgaccccctgcagatgccaaccttcccgccagactacggcttccccgaacgcaaggagcgcgagatggtggccacacagcaggagatgatggacgcgcagctgaggctccagctgcgggactactgcgcccaccacctcatccggctgctcaagtgcaagcgtgacagcttccccaacttcctggcctgcaagcaggagcggcacgactgggactactgcgagcaccgcgactatgtgatgcgcatgaaggagtttgagcgggagcggaggctgctccagcggaagaagcggcgggagaagaaggcggcagagttggccaaaggccagggacccggggaagtggaccccaaggtggccctgtagggggtgcaccccccaccctatggaccagtcaaataaaagccttcaggcccctcaaaaaaaaaaaaaaaaaaaaaaaaaaaaa

SEQ ID NO: 286282 - DNA, 1000 bp, Homo Sapiens
tggtggtcctcatctccatctcccttgtgctgcagatcggcgtgggggtgctgctcatcttccttgtcaagtacgaccttaacaacccggacaagcacgccaagctggacttcctcaacaacctggccacgggcctggtgttcatcatcgtggtagtcaacatcttcatcacggccttcggggtccagaagcccttgatggacatggcaccccagcagtaggacacccaggaccctggatgctgcctgccctgcaactcagctgcccgaccccaggagtcgccatacctgtgaggtgtccacctccctgcacatggcactacccagactgccagagcccaggctggcctcatctgcaccatgtccccggaccagcccttgctctgactgcggccaagcaccacgcaggaggccactcttgtctctcagcagctgttcccaggaggcagctccctcctggcacatgggggctggccacaatagcccagagggtcagaactggacagctgcagagacctgtgcccagagaagggtctcgacccactcaaggacacacagcaggtccgtggatgggctggatgagtgaccagggccagcctctgtctcaggacattccagaaggacaaggagatgtctctccctctcccaaagcaccagcgtccctgcctcccgtgggccctgtccgggttgccctggtgaccccagcctctgtccacttcctaacccagggaccctgcacagccagaactgcctttggccctacggatggccactggctctggtctaaagtgcctgggcttggtggccatcaagagggagccagtcaggcctgtgagggccgtagaccttgtatataccctgcaccagcagtgaccgggcagagcccaaccccctccacgggggtcccagcacccacttttctaatcatgaatgaacaataaagcccacgctctttgtcaggctcaaaaaaaaaaaaaaaaaaaaaaaaaaaaaaaaaaaaa

SEQ ID NO: 286283 - DNA, 1000 bp, Homo Sapiens; identical to SEQ ID NO: 221438

SEQ ID NO: 286284 - DNA, 1000 bp, Homo Sapiens; identical to SEQ ID NO: 116143

SEQ ID NO: 286285 - DNA, 1000 bp, Homo Sapiens
aacatctcacactatgaggaacagctggtgaagatgtttggctccagcgtggatctgggcaacctcgggcagtaggtgtgccacaccccagagccttcttagtgtgacaccaaaaccttctggtcagccacagaacacatacagaaaacagacatgacagaactgttcctgccgttgccgccactgctgccattgctgtggttatgggcatttagaaaacttgaaagtcagcactaaaggatgggcagaggttcaacccacacctccactttgcttctgaaggcccattcattagaccacttgtaaagattactccaacccagtttttatatctttggttcaaaacggcatgtctctccaacaatttaagtgcctgatacaaagtccaaagtataaacatgctcctttcctctcttgctgctactcttgcttttggaagttaccacagggtctgcagaaacctgttgtataactgtagacactctctaatggttctcaaaggaggaaatgtagccttcagtctcctcatttgtcctttgaggaagtccacatttgttcacagttgcagcctttggttttacagtgggaaatggtggtggatgatatggacatatgtagcccagtggcattgtactttctgctgacagctgcacacattacagctgtctccaaacccacagtgatgcttagggaaagaccctgctcaggacccagcaggtcagcaccccagagcagactgataggtccgtgggacccatgttagagcagaaaatttgggctcagcacattttactgttagtagagagccaggaaacgttttctgggttggggattttgtgggattttttaatttttttagtaggttttgtttaacctctgtgcagtttgtatgaatgaattgctatacatttataaggagccagggtctggagggttgctatcactttgtccagcccaaataccttcctgggcaactcctaccatttgtttgcagttgcct

SEQ ID NO: 286286 - DNA, 1000 bp, Homo Sapiens; identical to SEQ ID NO: 221441

SEQ ID NO: 286287 - DNA, 1000 bp, Homo Sapiens
ttgccgactaactaactgcaaatgcatctgcaggtgaaaccctacgaaagcacagttctggctataaacttcagagttctctgtaaaaaacttagagcactagaagcacaggaatagtgagtgtacagcttatgcggttgtagaggggcaactgatgaacacaggtcccacatatatgagggagtatgacgttctctacctaatatgttctgtgtgcatgttttgaatgattgaagatgggattaactaatgcaagtttacagttgcctcctaaaacacacattctgtataattatcgctaatacaatgctgtgaggtctatagttcctgtaacccctttctcctccccaaggacagagaagaactagccatgtgctatagggaaccctgagtgccctactcttttcccaagaagggtaaagcctacaatatcatcagggggcatgaagcacattaatttgcagtggctgcttcatatgaggagatatggtggacaggctaatttttccttgaaaatgtggcttcttcaactcctttcaaatttaggatggaatacttcctgaaataaaactgggctttatgcaggattctctttgaaaattcttgtatgtccagaacaaaagataaaactaattgtattcctcacattcacaatccccattggtctgaagtcacgtagcacagagcatctatagcacatagtgtttaaagactaatgaatgcaaaaagataaaatcttcaactaatttttgaattgtttctcatatatgctactagaaaatgccttgttgatgaagcacattttgggtagttgaggtcttttgttttcgcctttagctttctaagctttcttacaatgtggactgattactgtaacatttcacgtgtaaaataactggatattctttatatactggaaataacctgtgaatccaatatttcactaagtgttttaacttttgtgtatatatctctcatcaataaatgtggatttcaattt

SEQ ID NO: 286288 - DNA, 1000 bp, Homo Sapiens; identical to SEQ ID NO: 221442

SEQ ID NO: 286289 - DNA, 1000 bp, Homo Sapiens
gcagctgctaccccagttccatctgtagtcctaaccaggagcccccccatggaactgcagccccctgtctcccctcagcagtctgagtgcaaccccgttggtgctctgcaggagctggtggtgcagaaaggctggcggttgccggagtacacagtgacccaggagtctgggccagcccaccgcaaagaattcaccatgacctgtcgagtggagcgtttcattgagattgggagtggcacttccaaaaaattggcaaagcggaatgcggcggccaaaatgctgcttcgagtgcacacggtgcctctggatgcccgggatggcaatgaggtggagcctgatgatgaccacttctccattggtgtgggctcccgcctggatggtcttcgaaaccggggcccaggttgcacctgggattctctacgaaattcagtaggagagaagatcctgtccctccgcagttgctccctgggctccctgggtgccctgggccctgcctgctgccgtgtcctcagtgagctctctgaggagcaggcctttcacgtcagctacctggatattgaggagctgagcctgagtggactctgccagtgcctggtggaactgtccacccagccggccactgtgtgtcatggctctgcaaccaccagggaggcagcccgtggtgaggctgcccgccgtgccctgcagtacctcaagatcatggcaggcagcaagtgaagccccagctggactcatggatgtgcaccctttgctccctgctctttctgcctctgggctcatgtatctgcgcagctctggtaccctctgtgggtgccatctctacctctgacacagactgcctgccttgaagctgagaaggcacagggcaaggagccaaggaccacagagcctcagccagcccaggatccgtcctcattttattggtgatgatgaatgggaatgaaatcagggggctgtctactagagcctggaataaatatgctgctttgtggatttttaa

SEQ ID NO: 286290 - DNA, 1000 bp, Homo Sapiens
cctcaaatctcgtaaacacttgtatcaggacaactctggatagagctgcgtgtttgccacctggagaccataatgcattatatgtaaatagcttcccacttctggacccatctgatgcaccttttccctcactcgattccccgggaaaagcaatccgaggaccacagcagcccatttggaagccctttcctaatcaagacagtgactcggtggtactaagtggcacagactcagaactgcatatacctcgagtatgtgaattctgtcaagcagttttcccaccatccattacatccaggggggatttccttcggcatcttaattcacacttcaatggagagacttaagacacatttgaaaacagacatatcaagttctatgtgatgattttgggtttttaatactataaatacttgattgtaaactaaattcaagatcatttataggaaaatctagtttcacagctatttgaatttttttctggatttactatataactcttattttttaaaagatcattctgttctttcaaggagaaataagcctaaaagaagaaaaacaaaaaaaattctgtataaaactgtaatcctttgtattcatgtttacagtgctattactataattcaaaattatgtatgtgacttagagttatataatcataatttatgtttatttcaaatatctaagtttattgcttggatttctagtgagagctgttgaatttggtgatgtcaaatgtttctagggtttttttagtttgtttttattgaaaaatttaattatttatgctataggtgatattctctttgaataaacctataatagaaaatagcagacaacataaacatctttgtaaatatcaaacctaatacatttcttgtccagtgataaaacaactggtagaattatttaaacactttagatttttaaataatatacatggctttaatttttactgtgtgtatagctacatgatgaaattaattaaatattaagaggt

SEQ ID NO: 286291 - DNA, 1000 bp, Homo Sapiens
gtgctgtcccggctgggggtcgccggccagtggcgcttcgtggacgtgctggggctggaagaggagtctctgggctcggtgccagcgcctgcctgcgcgctgctgctgctgtttcccctcacggcccagcatgagaacttcaggaaaaagcagattgaagagctgaagggacaagaagttagtcctaaagtgtacttcatgaagcagaccattgggaattcctgtggcacaatcggacttattcacgcagtggccaataatcaagacaaactgggatttgaggatggatcagttctgaaacagtttctttctgaaacagagaaaatgtcccctgaagacagagcaaaatgctttgaaaagaatgaggccatacaggcagcccatgatgccgtggcacaggaaggccaatgtcgggtagatgacaaggtgaatttccattttattctgtttaacaacgtggatggccacctctatgaacttgatggacgaatgccttttccggtgaaccatggcgccagttcagaggacaccctgctgaaggacgctgccaaggtctgcagagaattcaccgagcgtgagcaaggagaagtccgcttctctgccgtggctctctgcaaggcagcctaatgctctgtgggagggactttgctgatttcccctcttcccttcaacatgaaaatatatacccccccatgcagtctaaaatgcttcagtacttgtgaaacacagctgttcttctgttctgcagacacgccttcccctcagccacacccaggcacttaagcacaagcagagtgcacagctgtccactgggccattgtggtgtgagcttcagatggtgaagcattctccccagtgtatgtcttgtatccgatatctaacgctttaaatggctactttggtttctgtctgtaagttaagaccttggatgtggtttaattgtttgtcctcaaaaggaataaaacttttctgctgataagataaaaaaaaaaaaaaaaaa

SEQ ID NO: 286292 - DNA, 1000 bp, Homo Sapiens
ccctccggacacatgaggccagctgcctgtgcctgccatgggccagcctagcccttgtcccttttaatataaaagatatatatatatatatatatatatatataaaatatctatattctatacacaccctgcccctgcaaagacagtatttattggtgggttgaatatagcctgcctcagtggcagcatcctccaaaacttagacccatgctggtcagagacggcagaaaacagagcctgcctaaccaggcccagccagttggtggggccaggccaggaccacacagtccccagactcagctggaagtctacctgctggacagcctccgccaagatctacaggacaaagggagggagcaagccctactcggatggggcacggactgtccaccttttctgatgtgtgttgtcagcctgtgctgtggcatagacatggatgcgaggaccactttggagactggggtggcctcaagagcacacagagaagggaagaaggggccatcacaggatgccagcccctgcctgggttgggggcactcagccacgaccagccccttcctgggtatttattctctatttattggggataggagaagaggcatcctgcctgggtgggacagccccttcagccccttctcccctccccgcctggccagggcagggccaccccactctacctccttagctttccctgtgccactttgactcagaggctgggagcatagcagaggggccaggcccaggcagagctgacgggaggccccagctctgaggggagggggtccgtggtagaggcctggggccggtagaggctccccagggctcccttatgtccaccacttcaggggatgggtgtggatgtaattagctctggggggcagttgggtagatgggtgggggctcctggtggccttctgctgcccaggccacagccgcctttgggttccatcttgctaataaacactggctctgggactagaaaaaaaaaaaaaaaaaaaaa

SEQ ID NO: 286293 - DNA, 1000 bp, Homo Sapiens; identical to SEQ ID NO: 221443

SEQ ID NO: 286294 - DNA, 1000 bp, Homo Sapiens
cgcatgtgcggcaaggccttcaagcgctcgtccacgctgtccacccacctgctcatccactcagacacgcggccctacccctgccagttctgcggcaagcgtttccaccagaagtccgacatgaagaagcacacctacatccacacaggtgagaagccgcacaagtgccaggtgtgcggaaaggccttcagccagagctccaacctcatcacccacagccgcaagcacacaggcttcaagcccttcagctgtgagctgtgcaccaaaggcttccagcgcaaggtggacctgcggcggcaccgcgagagtcaacacaatctcaagtgaggctgcgccggctcccagctcctggccagcctgccctgcggtcctgtcacctggaggccagcctcacatgcccaaatctccagtctcctggaggtgggactggacaggagtctaccagcttgttttgagactcatgaaattgctgtgtgaccttgggcaagtcacttaccctgtctggatcaacatttctcctgctgccaagtgtgggagcctggctgggtctttctcagcagaagttgtttccaggtgtgctcaagtgccttcctctagcagagcacagaaagctagaatacccccagggagacagggatgccaagagtagaccagagctgggacccacagacagaacctccacctgcctgctgcccactgagctgggacctggtcaccttggattttagccggcctctttctggctataacaggcagagtcggagctgcctcccaccccagtcagaagcctggcaccccctctgcttcggccagatgtgctggctgactctgacttccgaccagcactcagctggcctctggggattctagctccacaaccaggccgtgaggctggagaaactggcagttattgctgtcaaaagcctgttctctcaactgctgtcaataaaattaaagatacagatttgctgctaaaaaaaaaaaaaaaaaaaaaaaaaaa

SEQ ID NO: 286295 - DNA, 1000 bp, Homo Sapiens; identical to SEQ ID NO: 116149

SEQ ID NO: 286296 - DNA, 1000 bp, Homo Sapiens; identical to SEQ ID NO: 221444

SEQ ID NO: 286297 - DNA, 1000 bp, Homo Sapiens
tcgggaaatccgaatgctcaagcaactcaagcatcccaaccttgttaacctcctggaagtcttcaggaggaaacggaggcttcacctggtgtttgaatattgtgaccacacagttctccatgagttggacagataccaaagaggggtaccagaacatctcgtgaagagcataacttggcagacactgcaagctgtaaatttttgccataaacacaattgcatacatagagacgtgaagccagaaaatatcctcatcacgaaacattccgtgattaagctttgtgactttggatttgctcggcttttgactggaccgagtgactactatacagactacgtggctaccaggtggtaccgctcccctgagctgctggtgggggacacgcagtacggccccccggtggatgtttgggcaattggctgtgtctttgctgagctgctgtcaggagtgcctctgtggccaggaaaatcggatgtggatcagctgtatctgattaggaagaccttgggggatctcattcctaggcaccagcaagtgtttagcacgaatcagtacttcagtggagtgaaaattccagaccctgaagatatggaaccacttgaattaaaattcccaaacatctcttatcctgccctggggctcctaaagggctgtctccacatggaccctactcaaaggctgacatgtgaacagctgttgcatcacccatattttgaaaacatcagagaaatagaggatttggcaaaagaacacaacaaaccaacaaggaagaccctaagaaagagccgaaagcaccactgctttacagaaacatccaagttgcagtacctaccccagctaactggcagcagcatccttccagctttggataataagaagtactactgtgataccaagaaacttaactaccgttttccaaacatttaaaggagctaggagacatgattttaaaaaaggaatcaatagatgctttgaagaaaataaaacttatacagttga

SEQ ID NO: 286298 - DNA, 1000 bp, Homo Sapiens
gcggcaagcggtgggccgagggccgggtaggctagcacgggaggtaagggtggtatgggatggggcgggggcggtctagggcaataggagagcagagaatgggggaacttgagggtggggggagggcaccggagccttgccaccatcccaggactttgggcaagtcacccgcactccctgggcctcggtttccccatctgtaaaatgatggtaataatacttcacctacctcataggggaggttgtgaggccaccatcacctgacctgggggtcaaggcaggaggactccgaaggtgctacccgtgagcaaagtgtaattaccgaatcctgactgcaaggcccacctgcccctcccccacagagcctccagagctagctgaggccaacgcaggcccatccgtctcttcactctgtcgcaggccctttcatgggcttcgtctgccatctttgtgggtgccctagacttagtccttatcttgtcctggtttcctttcttgtgaccatctccccatgaaagtgctgtacaaattccacccgccccaggacccccgcacctgccctctggcaccagatgccagggaagggacagaggaaaacagccacaaacaagccaggggggctccccggagccccaggggtggggattggtggccactgtttgtatgttcttgagtgcaagtgttttataaaaaataaaacaaaaacccaccatcacaaaaaaaaaaattttgcagcgaagagaaatgaagaaaaactgaagaaaaaaaaaaaacaggaaaaaaagaaccatacaaaatttttccaccacacataccctctaagccagcaagatttcctctttgcaaaatcatatttttgtgggaatgggccctgctttttgtggcaaggcctgttctgattaataaaggatcgtgaaaaagtaaaaaaaaaaaaaaaaaaaaaaaaaaaaaaaaaaaaaaaaaaaaaaaaaaaaaaaaaaaaaaaaaaaaaaaaaaaaaa

SEQ ID NO: 286299 - DNA, 1000 bp, Homo Sapiens; identical to SEQ ID NO: 221445

SEQ ID NO: 286300 - DNA, 1000 bp, Homo Sapiens; identical to SEQ ID NO: 221446

SEQ ID NO: 286301 - DNA, 1000 bp, Homo Sapiens
atacctcagcaactggaccatggaaaaagtcagacgagagggggttaaggtgatgcccaatgctattgtgcaatccgttggagtcagcagtggcaagttacttatcaagctgaaagacggcaggaaggtagaaactgaccacatagtggcagctgtgggcctggagcccaatgttgagttggccaagactggtggcctggaaatagactcagattttggtggcttccgggtaaatgcagagctacaagcacgctctaacatctgggtggcaggagatgctgcatgcttctacgatataaagttgggaaggaggcgggtagagcaccatgatcacgctgttgtgagtggaagattggctggagaaaatatgactggagctgctaagccgtactggcatcagtcaatgttctggagtgatttgggccccgatgttggctatgaagctattggtcttgtggacagtagtttgcccacagttggtgtttttgcaaaagcaactgcacaagacaaccccaaatctgccacagagcagtcaggaactggtatccgatcagagagtgagacagagtccgaggcctcagaaattactattcctcccagcaccccggcagttccacaggctcccgtccagggggaggactacggcaaaggtgtcatcttctacctcagggacaaagtggtcgtggggattgtgctatggaacatctttaaccgaatgccaatagcaaggaagatcattaaggacggtgagcagcatgaagatctcaatgaagtagccaaactattcaacattcatgaagactgaagccccacagtggaattggcaaacccactgcagcccctgagaggaggtcgaatgggtaaaggagcatttttttattcagcagactttctctgtgtatgagtgtgaatgatcaagtcctttgtgaatattttcaactatgtaggtaaattcttaatgttcacatagtgaaataaattctgattcttctaaattaaa

SEQ ID NO: 286302 - DNA, 1000 bp, Homo Sapiens; identical to SEQ ID NO: 116152

SEQ ID NO: 286303 - DNA, 1000 bp, Homo Sapiens; identical to SEQ ID NO: 221448

SEQ ID NO: 286304 - DNA, 1000 bp, Homo Sapiens
gagtgggtcggcgacaggaagcagtggatctccgtcagagctgaagtcctcacgacgtttgccctctgtggatttgccaatttcagctccattgggatcatgctgggaggcttgacctccatggtcccccaacggaagagcgacttctcccagatagtgctccgggcgctcttcacgggagcctgtgtgtccctggtgaacgcctgtatggcagggatcctctacatgcccaggggggctgaagttgactgcatgtccctcttgaacacgaccctcagcagcagtagctttgagatttaccagtgctgccgtgaggccttccagagcgtcaatccagagttcagcccagaggccctggacaactgctgtcggttttacaaccacacgatctgtgcacagtgaggacagaacatgcttgtgcttctgcgcttctgagggctgttctcccccgggaaccatctgtccccaccttccctttcccagagccctcttcagggaagccacaggacttagacccagctcaatcccacaattgggaaggggtcatggagtgagtgtgcagagagtgagtgaggacataaggaaggacatgtcccactccatcccccttcctgctcccccatttcctaactcccccagtgtgaattctcagggtcacttctgcctcctcccgtttcccctccacatccaaacagcaccctggtcctctctatcccccctctcctggggtccctcacatgccccttcccttctgttgtgggctgcacaccaaagcctcctcccctccccacttcctaggcactaggatctctctgtggcttcccctgctgggtggtgtcacctctttctctgctttcagagaaacccttcccgcctttcctcagagtgcttcccaaactgaggtcccatggcacactgtcctgggaggcgttcagagggttccatgatggactaggtttggaaccactgggttaaataaacttagagagggctgtttaaa

SEQ ID NO: 286305 - DNA, 1000 bp, Homo Sapiens; identical to SEQ ID NO: 221449

SEQ ID NO: 286306 - DNA, 1000 bp, Homo Sapiens
ctacatcagaataacattgtacaccttgatttaaagccacagaatatattactgagcagcatataccctctcggggacattaaaatagtagattttggaatgtctcgaaaaatagggcatgcgtgtgaacttcgggaaatcatgggaacaccagaatatttagctccagaaatcctgaactatgatcccattaccacagcaacagatatgtggaatattggtataatagcatatatgttgttaactcacacatcaccatttgtgggagaagataatcaagaaacatacctcaatatctctcaagttaatgtagattattcggaagaaactttttcatcagtttcacagctggccacagactttattcagagccttttagtaaaaaatccagagaaaagaccaacagcagagatatgcctttctcattcttggctacagcagtgggactttgaaaacttgtttcaccctgaagaaacttccagttcctctcaaactcaggatcattctgtaaggtcctctgaagacaagacttctaaatcctcctgtaatggaacctgtggtgatagagaagacaaagagaatatcccagaggatagcagcatggtttccaaaagatttcgtttcgatgactcattacccaatccccatgaacttgtttcagatttgctctgttagcacttttttctttgactcatttggactgaatttgaaattttatatccactccagtgagattatgatttgtagcttcatatatgacatgtttatattgtaaatgcacttttccatggaataatttagggaagtgttttaatgttaaattactagttgctagcatgttatgatttcatatcctgagatagctctgcagataagaaaatatttaaatatatgacaaaaagtaaaattgtacatgtgagtttacatgttaatgaaataattcaacttcaaatgaacttaccagaatgttttgcatatcaacaaaaaaaaaaaaaaaaaa

SEQ ID NO: 286307 - DNA, 1000 bp, Homo Sapiens
cgccagatgatcaagctccccctttgctgtcatctgtgaatgagcttcgccaggtggtgggcacctgggagccatgcagaggctgtggtgctgagttagactccaggtactttgtggtcaaaggaaatcgcctagctccaggctgtgttaggacagtattagcatgaaggctgtgcgaccatcatgcctgctgatccttgaggcaggcctggtccagaaaactctgggtcagtgactgcgcagggccagccgctaccaggacggccctgaaacaggacacatctgttttttgtccctcaccctgggcaggccgcgtcacaatcacagtcctcctcctccccaccctgacgtctgagcgcagggcttgaattgttagtcccaactctggccaaagatacttttttccagagacagaggccaggaggcagtgaggggagccccgcggggaggcggcggcgactgccacagcccttccagcctgtcttgctggccgccctggttcatatttgagtttaattgtactgaccctggacccagataagcagcaactttgtgtctttggggtcacagaacattttggggcagtttaatgtggtaccaaactgaaaataggagctatttatagatggagcagcacttagtgcttcatagaaagcaatgcctatttttaaagttacaaacgcagatatctacatagatatgctttgctgagaagttaggtctgtggtagaccagaaaccacaaattgactttttttcttagaaaatatttctatttgcggtaaatatagtaatatgtaaataatgtacatctgttgatttctggagtgtctgttattcaatgatgtatatactcccacagctcgcatgaaggaacagcctctattgatacttggttgtaaagtgaagtaagattggagggtggatggctgtcagagctcttgcagatactgtgttcactaaataaaaatcacatgtattgttaaaaaaaaaaaaaaaaa

SEQ ID NO: 286308 - DNA, 1000 bp, Homo Sapiens; identical to SEQ ID NO: 221451

SEQ ID NO: 286309 - DNA, 1000 bp, Homo Sapiens; identical to SEQ ID NO: 221452

SEQ ID NO: 286310 - DNA, 1000 bp, Homo Sapiens
aattcagttggagtgctggtctcagtgcccatcagagggtccacacaggagagaaaccctatacgtgtcagcagtgtgggaagggcttcagtcaggcctcacattttcacacacaccagagagtccacactggagagaggccttacatatgtgatgtctgttgtaagggcttcagtcagaggtcacatctcatctaccatcagagagtccacactggagggaatctgtagaaatgagaggtgtggttcagccttcagttagagctcacatctttgtctccgttgggaagtccatgctgatgattgtgaaaagttcctttaaaactagagcttcaaagaatcttgacaggaaagaagtctctcaaatgctgtgttttagacttggttaggacatgaattctttacaaacgtcatatttcacagatgcgagaaaactttgttctgtaaatatgatcagtgtttatatcagagtaccaggtgtcccggttctcaagatgtaacacagcagaaaagtcttgtcggagtctgcacaggagagaggccttcctttaacaaaagtatgattgacagaaaaaatggatgtcaactaaaatgtaacctctatgtaaggaggtgtttttcaccactctatctctaccatgtagaattgtgcttggctcataatagggcccagcaattactgaagaaagtgaagaaaatacctataattaggacaaatacttgaaaattctagtctgttttctactctaaatttatattaatttatattcaaaaggaatcctgcaagtagccttaataacgttagtttcagtaagtactgaaaagtatataatactgccatccatactaacacaaatttggaaaaaagacatgaatggctcccatccttcagccttagttctttgtacagtgtatcatcagttgtgtacagtatgatttttagtgtcagtttatagactgaacaatactgtttttatctaatgtgaccctgcaatttacat

SEQ ID NO: 286311 - DNA, 1000 bp, Homo Sapiens
ctaccgtaaacacacggggcaccgcccgttccagtgccaaaaatgcgaccgagcattttccaggtcggaccacctcgccttacacatgaagaggcatttttaaatcccagacagtggatatgacccacactgccagaagagaattcagtattttttacttttcacactgtcttcccgatgagggaaggagcccagccagaaagcactacaatcatggtcaagttcccaactgagtcatcttgtgagtggataatcaggaaaaatgaggaatccaaaagacaaaaatcaaagaacagatggggtctgtgactggatcttctatcattccaattctaaatccgacttgaatattcctggacttacaaaatgccaagggggtgactggaagttgtggatatcagggtataaattatatccgtgagttgggggagggaagaccagaattcccttgaattgtgtattgatgcaatataagcataaaagatcaccttgtattctctttaccttctaaaagccattattatgatgttagaagaagaggaagaaattcaggtacagaaaacatgtttaaatagcctaaatgatggtgcttggtgagtcttggttctaaaggtaccaaacaaggaagccaaagttttcaaactgctgcatactttgacaaggaaaatctatatttgtcttccgatcaacatttatgacctaagtcaggtaatatacctggtttacttctttagcatttttatgcagacagtctgttatgcactgtggtttcagatgtgcaataatttgtacaatggtttattcccaagtatgccttaagcagaacaaatgtgtttttctatatagttccttgccttaataaatatgtaatataaatttaagcaaacgtctattttgtatatttgtaaactacaaagtaaaatgaacattttgtggagtttgtattttgcatactcaaggtgagaattaagttttaaataaacctataatattttatctg

SEQ ID NO: 286312 - DNA, 1000 bp, Homo Sapiens
aatttagtaagtgcctatcagaataatgacatcactgaatttgaaaagattctaaaaacaaatcacagcaacatcatggatgatcctttcataagagaacacattgaagagcttttgcgaaacatcagaacacaagtgcttataaaattaattaagccttacacaagaatacatattccttttatttctaaggagttaaacatagatgtagctgatgtggagagcttgctggtgcagtgcatattggataacactattcatggccgaattgatcaagtcaaccaactccttgaactggatcatcagaagaggggtggtgcacgatatactgcactagataaatggaccaaccaactaaattctctcaaccaggctgtagtcagtaaactggcttaacagagaacaagcttttacagacgtccttaaggcaacagtgcagagatgtaatccttaaaagaactgggaatggcaaaactactgtcggttgatgtgtcctgaaaattattggagttatggcagaagtgcttttttgatcaactggtttgtgttttgctgctgcatttatcccaagaaaaacagctttaatctccagaagaaaaccaaaataccatgggatttatgctgtattgacatcttgccctaaacgtacaacatcatagtaatttgtcatgggcaacatgaccagagagaagatttttgtcatgattttaaatacactgacacgctactgttggttaaatttaaacatgttttacctgcagaaattctctcacaaataacctgcaataacttgaaatgcatacccttttgaacattccttttctcatgtataaattaaaatgtttgctgcattttgcaaaatgtcaattctctaaaaatgtgtccgtatatttctgtacctgcagtgtagtaaaggtttagacgaaaccccataattatagtggcatactgtcacttaggtttcaagccggcaaataaacagtgcagctcagaaattgta

SEQ ID NO: 286313 - DNA, 1000 bp, Homo Sapiens
cagtatgcattagaaaccttgactatgaatggctgctcagttgaagatctaggactggatttcactctgccagggtttcccaatatcgaactgaagaaaggagggaaggatataccagtcactatccacaatttagaggagtatctaagactggttatattctgggcactaaatgaaggcgtttctaggcaatttgattcgttcagagatggatttgaatcagtcttcccactcagtcatcttcagtacttctacccggaggaactggatcagctcctttgtggcagtaaagcagacacttgggatgcaaagacactgatggaatgctgtaggcctgatcatggttatactcatgacagtcgggctgtgaagtttttgtttgagattctcagtagttttgataatgagcagcagaggttatttctccagtttgtgactggtagcccaagattgcctgttggaggattccggagtttgaatccacctttgacaattgtccgaaagacgtttgaatcaacagaaaacccagatgacttcttgccctctgtaatgacttgtgtgaactatcttaagttgccggactattcaagcattgagataatgcgtgaaaaactgttgatagcagcaagagaagggcagcagtcgttccatctttcctgattatagcaagaaatgcagtgtctgcctgttacagcaaaagaaacaaatcatgatttcttttctaatgttatcacctgagtcaaggaaacatgttacgccttcttgttgtaggaaaaacggcttgcagattataaagagacatttggttgatattcattaatggccccatggacttaaagtgatcaggccctaaaacgttgttgtgatgaggtttctttagcaagttcttgtttaaattatcatttatttgatgagtgaagtttttaacatgctttgctgtgtgaaatttaaaaaagggatgtttttccaggctggaacaataaatgtggctgtgcagttt

SEQ ID NO: 286314 - DNA, 1000 bp, Homo Sapiens
acagcttatagctgaatggaagaaaaacgcagaaaatctggaaggaaaagtgatatcattacaggaatgtttggatgaagcaaatgctgcattggattcagcatcaagacttacagaacagttagatgtaaaagaagaacaaattgaagaacttaaaagacaaaatgagctccgacaagaaatgctggatgatgtacaaaagaaattgatgagcttagcaaacagctcagaaggaaaagtagacaaagtcctaatgagaaacctcttcattggtcatttccacacaccgaaaaatcagcgtcatgaagtgttacggttaatggggagcatcctgggcgtcagaagggaggagatggagcagttgtttcatgacgatcagggcagtgttaccaggtggatgactgggtggcttggaggaggatcaaaaagtgttcccaacacacctttgagaccaaatcagcaatctgtggttaatagttctttttcagaactttttgttaaatttctagaaacagaatctcatccatccattccaccaccaaagctttctgttcatgatatgaaacctctggattcaccaggaagaagaaaaagagatacaaatgcaccagaaagttttaaagatacagcagaatccaggtctggtagaagaacagatgtaaatccgtttttggctcctcgctcggcagctgtacctcttattaacccagctggacttggacctggtgggcccgggcatcttcttctgaaacccatctcagatgttttgcccacatttacacctttgccagcgttacctgacaacagtgctggggttgtgctgaaagaccttttaaagcaatagatgattctcaagccagagacaatctagcactttaaagaaaccatgaacactatatgtatgtactttatcacaaagtggcctttggggagaaagtcatgtatttgttcgcaattatgctttctctgaatttaataaaaatattcctaatgcttttag

SEQ ID NO: 286315 - DNA, 1000 bp, Homo Sapiens; identical to SEQ ID NO: 116155

SEQ ID NO: 286316 - DNA, 1000 bp, Homo Sapiens
gatacagaaggagaacagtcgtgaagccctggcagaggcagccttggagagccccaggccagccctggtgagatccgcctccagtgacaccagcgaggagctgaattcccaagacagccccccaaaacaggactccacagcgccctcgtctacctcctcctccgaccccatcctagacttcaacatctccctggccatggccaaagagagggcccaccagaaacgcagcagcaaacgggccccgcagatggactggagcaagaaaaacgaactcttcagcaacctctgagcgccctgctgccacccagtgactggcagggccgagccagcattccaccccacctttttccttctccccaattactcccctgaatcaatgtacaaatcagcacccacatcccctttcttgacaaatgatttttctagagaactatgttcttccctgactttagggaaggtgaatgtgttcccgtcctcccgcagtcagaaaggagactctgcctccctcctcctcactgagtgcctcatcctaccgggtgtccctttgccaccctgcctgggacatcgctggaacctgcaccatgccaggatcatgggaccaggcgagagggcaccctcccttcctcccccatgtgataaatgggtccagggctgatcaaagaactctgactgcagaactgccgctctcagtggacagggcatctgttatcctgaaccttggcagacacgtcttgttttcatttgattttgttaagagtgcagtattgcagagtctagaggaatttttgtttccttgattaacatgattttcctggttgttaatccagggcatggcagtggcctcagccttaaacttttgttcctactcccaccctcagcgaactgggcagcacggggagggtttggctacccctgcccatccctgagccaggtaccaccattgtaaggaaacactttcagaaattcagctggttcctccaaaccaaaaaaaaaaaaaaaa

SEQ ID NO: 286317 - DNA, 1000 bp, Homo Sapiens
tgtagcagtggggaagagggacggatatttttaattgattagtgtttttttcctcacatttgacatgactgataacagataattaaaaaaagagaatacggtggattaagtaaaattttacatcttgtaaagtggtggggaggggaaacagaaataaaatttttgcactgctgaactgtgagattttcctgtgtaatttgggtagattttcaagagtgtgaacacaaatttaaaataagctataatcagcaacaacacaatgacaatgacatcttccccttaccttagccactaagaagacaagggctgttactcatataacttgcttttcttacttaatgtacaccaaactgttgttgtcaattatcttttatttaacttctccaccttcattgctagatccttcgaacagcactgatacatttcaaggtcttgttttaggataactactttaaaattttttaaattatattaaatttataaaataatttataaattcatatattaaaacaatataagataatttcttgatttgtcatttataaatccctaaagtatatttgtttaatggcctatttttggatgaagaaaaagccagttggtaagctgtgttagtcatgtatcagttcagacagacggaggtctcaatttaactccaggcttagatcccagtttccttttgcccttcactatttgaggtaacttcatttttcattctagttttgatatttggctgtttatttttgtcattttccattatttcaaagggaatttggaacatgttgaattttatcaggtggttacataagcaagagtacatcaaactgtattatttgaaagtctagaacctgtcatgtgaaattactatttttgagccctctatgtggtccaggcagaatagtagacacactgatatttaatccttaaaacccctttaaatgagggccagtattatctctgctttcagaagtagacataataggatgaatcatataacaga

SEQ ID NO: 286318 - DNA, 1000 bp, Homo Sapiens
agaggccaccgagacgcaggccaagctgcggcggctgctccagaaatctgatttataccgagtccactttcttctcgagaggctgcagggagctggcctgcccatggagagcgccatcctgcacgggaagctgggcgagcatgagaaggcgctgcatatcctggtgcacgagctgcaggactttgcagcggccgaggactactgcctgtggtgctccgagggccgagacccaccccaccgccagcaactctttcacacgctgctggccatctacctgcatgctggccccactgcccacgagctggccgtggctgccgtggacctgctgaaccgccacgccaccgaatttgatgcagcccaggtgctgcagatgctgcctgacacctggtcagtgcagctcctctgcccattcctgatgggggccatgagggacagcatccatgccaggaggaccatgcaggtggctctcggcctggccaggtccgaaaacttaatctacacctacgataagatgaagttgaaaggaagctcaatccaactctcagacaaaaagctttgtcagatatgccaaaatcccttttgtgagcctgtgtttgttagatacccaaatggtggtcttgtgcacacccactgtgccgccagcagacacacaaaccccagctcatccagtcctggcactcggacttgaaaagcttggcccaagggtgcgaggggaactccgagttctttctgagcctgctggacatgaagagcagatgaccaccatgctctgtgtcagccaggacgaagggagacatctgggtgccagggagccttccgtccatacgcaacaaggactcctcgctgctgaccaggctctatgaatgtacatggaatgaccaggctctatgaatgtacatggaaaacccctaaaaatccccaaaacagaaacatacaagagttcacctgtccaggtacatagtaatccaagacagaggtctactttgaaaaaaaaaaaaaa

SEQ ID NO: 286319 - DNA, 1000 bp, Homo Sapiens
ggcaagcggcctcgatcccagcaggagaacccagagagccagcctcagaagaggccacgcccctcagccaagccctccgtcgtagctgaggtcaagggcagcgtctcggccagcgaacagggcaccttgaatcccacggctcaagaccccttccagctctccgctcctggcgtctccttgaaggaggctgcaaatgttgtggtcaagtgcctcacccctttctacaaggagggcaagtttgcttccaaggagttgtttaaaggctttgcccgccacctctcacacttgctgactcagaagacctctcctggaaggagcgtgaaagaagaggcccagaacctcatcaggcacttcttccatggccgggcccggtgcgagagcgaagctgactggcatggcctgtgtggcccccagagatgaccaactgctggctgggcagggcccgcgtcctcccccagattctagcatgggtcatcctgggcctcacctgctgatgccagggccatcgtcttttctcagtccttctcctttccaaccatacttggctttggggatgaccccagacaccccctgaatccaggtcagaggtcagcccacctttctttctgcttgcaaagcctatagacccttctcagagcggtcctcatggctgggttttctgggacacatgtcgaggacagaaggtggagggtggtggagctgctgctggaagaaggggaaggaagagtggcccctccccgagttctaagtcaggatgaggcccacctgtccaaggtatcggaacctacccaggggaccctcagatcctccacccactcccccatccattacgatgccagcttccagccttgcccaggtcagagctgtggcagaggagaggcagccaggccctgttcctgctcagctcctgctcaggaaggccaggcctgacagatgtttgggagaggaataaagttgtgttgttgtggggcatgcaggcgtgcacacagcccttttcaaa

SEQ ID NO: 286320 - DNA, 1000 bp, Homo Sapiens; identical to SEQ ID NO: 221457

SEQ ID NO: 286321 - DNA, 1000 bp, Homo Sapiens
tttctctggctggagtgtaggctgtaccccatttccttggctcccattaaaaatcaacaacattctaatgattagggaacaacagaaggggaacagtcataggatatacgagcagtataaagatacgtttgcaatcagtgactactcagggtgacacccttgccctaaagcaggagtcccccctacctggggtccatggactccctgaaattgtatgcaaaatgttgtttgtacatgtgtgtctgtatgtctctgtggggaggttttatggcttttgtcagattttcaaggccttaacaaagttaaaggaccactgccctgaggttactgcactgaggccaagttaggatggcatcactctgtggcagctctccctggacttgccctgcctggaacagggtgatttgctggaatggagttaccactgagatgccaaaggttgctgggtctggaagactgttgtggcctctcagttctctttgagtctgactgactgtggccagtccctggactggtagctgctggaggccttcttgtttctccagtccctggaagctgagctctatgtgtatttgatgacattgtcagctcttaccaaacgtcaagacctcttcctgcttgaccactcgcacatggctctaggcttctcctgctgagtcctggtcttggcctgtgaatgtgcctcgttcatccctggtgcttgagcccctcaagctccagtcaatgatccagtccttcccctttgaagttttctgctctactttccttggcagcagcctgtgaactactcaaaagagtccccttgggtttggaattatcagtggctttgccactagtaaatgtgtgatcttcggcaagtaacctaacctagggacatcagtttactcatctgcgaagtggggataataaaacctacctcagggttgcttcaaggattaaatgagaaaatatgtcaacaataaagacctgtctgtaccaatgaaaaaaaaaaaaaaaaaaa

SEQ ID NO: 286322 - DNA, 1000 bp, Homo Sapiens
gtattggccagtacttttacaaatcaaaacatctctcaagccaaaggagaagacagtaagaacagacataagggacattttagtttaggctagtgtcctgcctcttagaggtggcattgtgtaaatctgagctttgagcaagaaagttttggaaattgtgttgcttttaagaaatagagttagtgtggctggataagaaagtcacatttatgcaaatgtttcttctgctagaacctcatacctgttctagttcatctccacgtttattttaccaagagatcctctgtcaagagaatttcctggctgttgtgaaagaatttttctacatcctgaactatttttcctatttcttttcaccttgctttttttcatccttaatttgcttgtcatcacaatgaagtatgttttttgaatcatcaattctttctcattctccatttatctgaaggttcttttgcccttattaacctctcaacttttattgctgtattctagtcagaccagaacatacttccactacatcagttacttggcatcatttcacctcagtttattattgccaaataataatttgtgtcagcattttcaactatggttattcatccaacccttggatctctttgagtctactgataatctccactggaaaggtggaattgaaatgtggtccacattttaactagctatttcctggggctgtatttttcagaatatgctgagctacatttgctgcaatctgttgctattcagagtttaagtttcaggagaaaacaggaacaatagaacactctgcctgttatttttgttgtaatcaagcttttccacagttcttgaaaagtactatgtttcaaatttcaggaacaccagcgttagctgtaaaagttgcagcaatttattggctagtcatagaaaatttttgaacttttaactgtattttaattgatgtttattaaaaacactttgctatcaggaaaaaaaaaaaaaaaaaaaaaaaaaaaaa

SEQ ID NO: 286323 - DNA, 1000 bp, Homo Sapiens; identical to SEQ ID NO: 116157

SEQ ID NO: 286324 - DNA, 1000 bp, Homo Sapiens
cgcagactaccacgctctgggcgctatggaggtcatctgcaatagtatggctaagacgctgcagacagccctgcagccccctgactggctgcagggccactacctggtggtgcggtacgaggacctggtgggagaccccgtcaagacactacggagagtgtacgattttgtgggactgttggtgagccccgaaatggagcagtttgccctgaacatgaccagtggctcgggctcctcctccaagcctttcgtggtatctgcacgcaatgccacgcaggccgccaatgcctggcggaccgccctcaccttccagcagatcaaacaggtggaggagttttgctaccagcccatggccgtcctgggctatgagcgggtcaacagccctgaggaggtcaaagacctcagcaagaccctgcttcggaagccccgtctctaaaaggggttcccaggagacctgattccctgtggtgatacctataaagaggatcgtagtgtgtttaaataaacacagtccagactcaaacggaggaagcccacatattctattatagatatataaataatcacacacacacttgctgtcaatgttttgagtcagtgcatttcaaggaacagccacaaaatacacacccctaagaaaaggcaagacttgaacgttctgaccaggtgcccctcttcttctttgccttctcttgtcctctttctcctatttcttaccctgtcctccacctgccttccattttgaagtgggatgttaatgaaatcaagttccagtaacccaaatcttgtttacaaaatattcgtggtatctgtgaacatgttaagagtaatttggatgtgggggtgggggtggagaaaggggaagtggtccagaaacaaaaagccccattgggcatgataagccgaggaggcattcttctaaagcagacttttgtgtaaaaagcaaaggttacatgtgagtattaataaagaagataataaataatattctttttaaaaa

SEQ ID NO: 286325 - DNA, 1000 bp, Homo Sapiens
taaatcagcagtcattgaagcgttccgctaatcagatgggagtatctgccaaacgtagaccaaaggctcagcccacaactcttgtcctaccacctcaatatgttgatgatgtgatcagccgcattgacaggatgtttcctgaaatgtccatccacttatccagacccaatggaacatcagcaatgcttctggtgaccttgggaaaggtgttgaaagtgatcgtcgtcatgcggagcctgttcattgatcgaacaatagtaaagggatataacgagaatgtctacacagaagatggcaagcttgatatatggtccaaatccaactatcaagtattccagaaggtgacagaccatgccaccactgccctgctccactatcagctgccccagatgccggatgtcgtggtccgatccttcatgacctggttaagaagttacataaagctgttccaggccccgtgccagcgctgcgggaagtttctgcaggacggccttcccccgacatggagggatttccgaaccctcgaagccttccatgacacctgccggcagtagcccccacgctggccccagcctcagaccccacccagcaccttcccagacacgcaggaagcccacagaaggctcagctggttcctcactgcccagatgtgtacagctgctcctccctttcataaagcagcgccatgtgtgcagaggccactcttgaagagcagactccctctgtggctgatgggactaattattcccactagccagcggactgaaggcaaagaagacctttctagaacctggtagaaggaagctgtgcagcatgctcctcgtccatgtgtgtcggcagtgctggtgtctgtcgtctccgcgagctgttactggaatgagcccttgtgttcatgggtatcgtcatgcggggttcttgtgttttgtggggcttgggttttggtaacttatttttataagcaataaaccttttgtatcctgaaaaaaaaaaaaaaaaaaaa

SEQ ID NO: 286326 - DNA, 1000 bp, Homo Sapiens
tggcagatagagatggagtcatgtactctatctggctctacacatcaatcacatcttgattcaaacctcacaaggcaatattctgaattgttaactaggtatttcaaaacaggaattaaattcaataggctcttctcagtgaacaggttttaatgttgttttgatgtaattttaaaagacttttagcaaacatgcatttctttatatgatatatttcttttacgaagctattttaaaagtaagccaagtgctgtctagtctgcttataaagtaggaattgcatcagagtacatatattcttgctgtacaatgcctgtgatgttgaggagggttcttttttaaagtgtatgcttgagtaactgactctatggagtctataaatgcactgacttcttgtttgtaccccaaaatgatcgaattgttaagtacaaaattaagctaattaaccaatttgtaaccattttttcactcataaacagctactcaatactagacaattttgttttttatgtatgtgtatgtacgtaaatacatacatattaatttacattagagtgaaaaataaatggtttgtttctgaagttagtttcttaagtgagttttcaggtgtctctgaaaaatttataacaatcatgtattatatgtgctgtaacatcatgtacgttacctccatctattttaggatattttcctcacctatatattatagggagaataatttagatacacatgctcagagctgagatatttctctgataaatcaggtaacaaaatgtatttgattgatggaattttgaagtaaatgtgtttttatccatcagtttctgagtaacaaagagcaccaagttttaatttaaataggagatttaacactagggatcagggagtttagtatgaagagttaaaaaaatttaaaaaacagtgtaagctgttgaaatggcaagtgaattattttaatgatgtaataaaatatttttaaattttgaaaaaaaaaaaaaaa

SEQ ID NO: 286327 - DNA, 1000 bp, Homo Sapiens; identical to SEQ ID NO: 116160

SEQ ID NO: 286328 - DNA, 1000 bp, Homo Sapiens
ggcttcttaataggtagtaatttgttcaaaagcggttttagccagacatctagttgcagtgttcaagaggattatgggggaaagagattagagataattgtctagttagggggcagctggagaaaataagctaagtttgcaataacagagtacacaagtatagtggcccaggatgtagtgaaagaacaaatcctagagtctttgaaatttctaagggcattctagacctctgttgggatatggtattattttacatactgacacaacctaaattttctttgggtagtaactaatgtcaagtctacatcgactggtaaaacattcaaagaacaaactgacaatgatgttctacctacttgttacatgctcatggaagaccgtgcagtattgaaagtatttgttaattatctgcttagtattaacactaaatttgtagaatgactttcaggtttgttgaacaatgccttttcaggttggaagaagaaaaatagcctcaatctcccaccccatgtaggcactacctccccaattacccttagaaaatgatcacaccaactctgcctacacacttccagtgatagtggctcattgtctgttaaggcaaactgttccactgttgggcatatctctttgttagaaagttctttcttaggttgctaaaatctgcctagtaccccgctaccctgttctgtcttatggagcagcccagattatctttactccctctttctcatggcaaccctgaagataatcaaggccagttactcatcatctcccaaccactgtttcctcaactgcccttcatatgtcatggttttcagatccattccaacctgactgaatgttaacagacagaattcttcacattaaggaactgtcttcatcatcatacatgtagaaaagaatctgaacatttaagtgcgaagttttctctagaaatatattcaagatatgtttattctattattgtaaatttcaaacaataaataaataagaatcc

SEQ ID NO: 286329 - DNA, 1000 bp, Homo Sapiens; identical to SEQ ID NO: 116161

SEQ ID NO: 286330 - DNA, 1000 bp, Homo Sapiens; identical to SEQ ID NO: 116162

SEQ ID NO: 286331 - DNA, 1000 bp, Homo Sapiens
cccccaaccccccacccacccctctcctgcctcggcagggactgtgatcgaggcgtgagccacagtggttatctccaagctcagggcaatcccttccctcctgtcaactgctccccgactcctgcatggctcattccttcacaatgtcgccgtggctgccaggttcctcaggcagccccggtgggaggctgcggaccatggggactcagctctgcatggcaggcagaggcccagggacactgacgtgcatgagcttgctgctttccagggtgtgttgagggtggccatgggtgacacgtcccactctttctgatggaggggcatccgtggtgccttctagcttagaaccattttccaggtctcttctgggttgggcaggactgatattcccaagctggtggaagatggttcatcttcctcgcacagtgtgggttcttggagttcatccagggaaggcggcgcctctttctcaggtcctgcaggctggtctctgagcctgcccccacgaactttctggattccaaggtgggatggtgatccctttgacccctgcagaccctctacttgcgaaaagcagcattgaagcagccttttcccattgtagaagggacagggagtcagatcccctcaaccccccggcttcagggaccccagaagtgccttccaagcttcccccaagatccacatcacccacgaccctgccactgtttttgctgtgttcaccacatctctgatcctgaagtgaattctggaactatggaccacattagactgggcagagattcgcccaacccctagcactccggctctgggctttcggccagaagttaattaacctcagagccaggagcctggggctggggcctccctcccaggccctgtttagctgtttagctggttgtgttttaagcaagttcttgcccaatcatgcatcctgctagaaaaggaaatgaagcaacgttcccagccaccgcaaaaaaaaaaaaaaaaaaaaaaaaaa

SEQ ID NO: 286332 - DNA, 1000 bp, Homo Sapiens; identical to SEQ ID NO: 116163

SEQ ID NO: 286333 - DNA, 1000 bp, Homo Sapiens
gggcttctgggatttggtgtctgctgctgccagagcaggaacccccagtctaggacttgggcattttaacagggagaaagtagtggcttcccttttctctctctcctcctttttccctttaagcccacagattcaggtcatgccaaaagctctctggttgtaacctggagacatgtggaggggaatggcgatgggattataggactctccccatctcgggccctgaccctgacccttgccaccaacccaaagacagctggtgggtttccccttggagacaatcctgcgtttgcctgggccggccctggctgccctcagctttcgctgatctgcccggcctggagcctcccatcaccccgcttcttgttgggcctcaggcactggttaccagaagggggtctgggtctgctcaggatcatgttttgtagcacctcctgttggaggggtggagggatgttcccctgagccaggctgagactagaaccccatcttccctgagccaggctgagactagaaccccatcttccccaccacgccacccctgtggctgctacaggagcacagtagtgaaggcctgagctccaggtttgaaagacccaactggagcgtggggcgggcaggcaggggttagtgaaaggacacttccagggttaggacagagcatttagccttctggaagaacccctgcctggggtgggactgtgcaggccagagaaggtggcatgggcctgaacccacctggactgacttctgcactgaagccacagatggagggtaggctggtgggtgggggtggttcgttctctagccggggcagacacccagctggctgggtccttcctcagccttgcctcctcctgtccccaaccctttcctttcctcctgcttgcggactgctggtcccctctccttccctccttccagctgtttctagttaccacctacccctggccgtggactgatcagaccagcattcaaaataaaagtttgttccaagttg

SEQ ID NO: 286334 - DNA, 1000 bp, Homo Sapiens; identical to SEQ ID NO: 116164

SEQ ID NO: 286335 - DNA, 1000 bp, Homo Sapiens; identical to SEQ ID NO: 221463

SEQ ID NO: 286336 - DNA, 1000 bp, Homo Sapiens; identical to SEQ ID NO: 116165

SEQ ID NO: 286337 - DNA, 1000 bp, Homo Sapiens
ccccattggcaactgcagctgagatcttagagaggaaatataaccggtgtgagatctagcaatgcattttgaatcttcactccctaccaggctcttcctatttttaatctcttcacctcagaactagacatatggagagctttaaaggcaagctggaaggcacattgtatcaattctaccttgtgctatacgtaggagagatccaaaatttggatgcttctggagactcttagacatcttttcattgttgtccatttttaaagttgatgattgctggaaacattcacacgcttaaaagcaatggtgtgagttattaatgggtaaactaagaagtgttataggcaatgacttgaaatggtttttaaattgtatggattgttaagaattgttgaaaaaaaattttttttttttggacagcttcaaggagatgttagcaatttcagatatactagccagtttaggtatgactttggaagtgcagaaacagaaggatactgttagaaaatcctaacattggtctccgtgcatgtgttcacacctggtctcactgcctttccttcccacagacctgagtgtgaaagactgagagttgaggagttactttgtggatcttgtccaaatttagtgaaatgtggaagtcaaccagaccaatgatggaattaaatgtaaattccaagagggctttcacagtccacagggttcaaatgacttgggtaacagaagttattcttagcttacctgttatgtgacagtgatttacctgtccatttccaacccaaaagcctgtcagaaagcattctttagagaaaaccactttacatttgttgttaaactcctgatcgctactcttaagaatatacatgtatgtattcataggaacattttttctcaatatttgtatgattcgcttactgttattgtgctgagtgagctcctgtgtgcttcagacaaaaataaatgagactttgtgtttacgttaaaaaaaaaaaaaaaaaaaaaa

SEQ ID NO: 286338 - DNA, 1000 bp, Homo Sapiens; identical to SEQ ID NO: 221464

SEQ ID NO: 286339 - DNA, 1000 bp, Homo Sapiens
ttactctggcggtattacgagaagaacagaagtttcagtaatgctgctcgtgtactgtccagactggctgacatgcatagcacagaaatttcacttcagcagcgactagagtacattgctcgagccattcttagtgccaaaagttccactgccatttcatcaatagctgccgatggtgaatttcttcatgaattagaagaaaaaatggaggttgctaggatccaacttcagatacaggagacactacaaaggcagtattcccatcattcttctgtacaggatgcagtttctcagctggattctgagctgatggacataactaagctttatggggaatttgctgacccatttaaacttgcagagtgcaaacttgcaataattcattgtgccggttattcagaccctatattggtgcagacactttggcaagatatcatagagaaagaattgagtgacagtgtgacattgagctcctcggatagaatgcatgctcttagtctcaagattgttctccttggcaaaatttatgctggcacaccacgcttctttcctttagattttattgtacagtttttagaacagcaggtttgtactttgaactgggatgtgggcttcgtaatacagacaatgaatgaaattggagtaccattacctagactactagaagtttatgatcagttgttcaaatcacgggatccattctggaacagaatgaagaagccactgcaccttttggattgtatacatgtattattgataagatatgttgagaatcccagccaagttttaaattgtgaaaggagaagatttacaaatctctgcctggatgctgtttgtggttaccttgttgagctccagtctatgagctcgtcagtagcagtacaagccatcactgggaattttaaatctcttcaagctaaattagaacggcttcattaattactgtgatatactttcatccgttttatgatctgtaaaataaaaactcagctgggtccag

SEQ ID NO: 286340 - DNA, 1000 bp, Homo Sapiens; identical to SEQ ID NO: 118866

SEQ ID NO: 286341 - DNA, 1000 bp, Homo Sapiens
tgttcttatataagatcactgaagaaagaggaacccccacaaccccctccacaaagagaccaggggcgggtgatgagacctggggtttagaaccccaggtgagacctcaaatcactgcattcattctgagcccccttcctgtccccaggggaggtgtattgtgtatgtagccttagagcatctctgcctccaacccagcagttctctgccaaagcttgtggaggagggagagccctgtccctgccctcaggctccccagtgctcctggcccttctatttatttgactgattattgcttctttccttgcattaaaggagatcttcccctaacctttgggccaatttactggccactaatttcgtttaaataccattgtgtcattggggggaccgtctttacccctgctgacctcccacctatccgccctgcagcagaaccttggcggtttataggtaatgatggaacttagactcctcttcccagagtcacaagtagcctctgggatctgccaacacacgtccactcccaagccactagcccactccccagttggcccttctgcccttaccccacacacagtccaactcttccacctctggggaagatggagcaggtctttgggaagctcccacacccacctctgccactcttaacactaagtgagagttggggagaaactgaagccgtgtttttggccccccgaggctaaccctgatccatagtgctacctgcacctctggattctggattcacagaccaagtccaagcccgttcttacgtcgccataaaggcccccgaacggcattctcggtacttctgtttgtttttgtacattttattagaaaggactgtaaaatagccacttagacactttacctcttcagtatgcaaatgtaaataaattgtaatataggaaatcttttgttttaatataagaatgagcctgtccaatttctgctgtacattattaaaagttttattcacaaaaaaaaaaaaaaa

SEQ ID NO: 286342 - DNA, 1000 bp, Homo Sapiens
ctgccccaccacctctgcctaccacctcctctggcaaggctgcaaagaaacccacagctgcagagatctctgttcgagtccctagagggccggccgtggaagggggacacgtgaatatggcattctctcagtccaaccctccttcggagttgcacaaggtccacggatccagaaacaagcccaccagcttgtggaacccaacgtacggctcctggtttacagagaaacccaccaaaaagaataatcctatagcaaagaaggagccacacgacaggggtaacctggggctggagggaagctgtactgtcccacctaacgttgcaactgggagacttccgggggcctcactgctcctagagccctcttcgctgactgccaatatgaaggaggtacctctgttcaggctacgtcacttcccttgtgggaatgtcaattacggctaccagcaacagggcttgcccttagaagccgctactgcccctggagctggtcattacgaggataccattctgaaaagcaagaatagcatgaaccagcctgggccctgagctcggtcgcacactcacttctcttccttgggatccctaagaccgtggaggagagagaggcaatggctccttcacaaaccagagaccaaatgtcacgttttgttttgtgccaacctattttgaagtaccaccaaaaaagctgtattttgaaaatgctttagaaaggttttgagcatgggttcatcctattctttcgaaagaagaaaatatcataaaaatgagtgataaatacaaggcccagatgtggttgcataaggtttttatgcatgtttgttgtatacttccttatgcttctttcaaattgtgtgtgctctgcttcaatgtagtcagaattagctgcttctatgtttcatagttggggtcatagatgtttccttgccttgttgatgtggacatgagccatttgaggggagagggaacggaaataaaggagttatttgtaatgactaaaa

SEQ ID NO: 286343 - DNA, 1000 bp, Homo Sapiens; identical to SEQ ID NO: 116167

SEQ ID NO: 286344 - DNA, 1000 bp, Homo Sapiens; identical to SEQ ID NO: 116169

SEQ ID NO: 286345 - DNA, 1000 bp, Homo Sapiens
atggctttcagaaaacgggaagcgctcagaacagtatctttgcactccaatcattcacggagatatgaagagcaactgggacctgagtcaatgcgcaaaatgcagcttgtgtgcaaaagcagtgggctcctggcagaagggagcagcacacgcgttatagtaactcccatcacctctaacacgcacagctgaaagttcttgctcgggtcccttcacctccccgccctttcttaaagtgcagttcttagccctctagaaacgagttggtgtctttcgtctcagtagcccccaccccaataagctgtagacattggtttacagtgaaactatgctattctcagccctttgaaactctgcttctcctccagggcccgattcccaaaccccatggcttccctcacactgtcttttctaccattttcattatagaatgcttccaatcttttgtgaattttttattataaaaaatctatttgtatctatcctaaccagttcggggatatattaagatatttttgtacataagagagaaagagagagaaaaatttatagaagttttgtacaaatggtttaaaatgtgtatatcttgatactttaacatgtaatgctattacctctgcatattttagatgtgtagttcaccttacaactgcaattttccctatgtggttttgtaaagaactctcctcataggtgagatcaagaggccaccagttgtacttcagcaccaatgtgtcttactttatagaaatgttgttaatgtattaatgatgttattaaatactgttcaagaagaacaaagtttatgcagctactgtccaaactcaaagtggcagccagttggttttgataggttgccttttggagatttctattactgccttttttttcttactgttttattacaaacttacaaaaatatgtataaccctgttttatacaaactagtttcgtaataaaactttttcctttttttaaaatgaaaaaaaaaaaaaaaaaa

SEQ ID NO: 286346 - DNA, 1000 bp, Homo Sapiens; identical to SEQ ID NO: 221468

SEQ ID NO: 286347 - DNA, 1000 bp, Homo Sapiens; identical to SEQ ID NO: 116170

SEQ ID NO: 286348 - DNA, 1000 bp, Homo Sapiens
cacctacttttgggaatctgtagctgtgctttgagaattgccatcggtcatgtgttgcaccgttctctgtatgtttacgtcctttggactggcttctcccaggattcttttctgtttttgtttttttgatttgggctttatttttttctgtgtactgtactatattgtaaaagggattttagcagagactttagtctttggggcaagaggagaacaggaatgctgggctgtttactttaggtggagaatccatcttcagacctttggactattttctttcaactgcagtgtatagaaaaaccaaactacgacctcagagcagagtattaatgaaaagcacaaaaaaaggaactaagttcagcgaggggtggggggaggggggagatttttcttttgaaaaataatgactcttaggacatttgtttttcagttcaagtgctcttcagcactgtcttgtctcccaatataccaacccactggcacatttttctcttgttttctctctccgattttgctctgtctcctcagttaagtgtttccttcctttgtgccccccgctggtgaccctctgcttccctctctctttccctttggcagctgcaatacacagtgttattctggggaaataaatctagcaaagcctcgccttccatgccgagcgtcctcttggctctgagagggaaaggtctgtccttgggatgctctctggtcttttttccccctaagtctttctctttcccatcatacccttccctgcccaccttgttttctgttctccttttattaggaattcccaagtgaattttattaatgtgggagtggaacagatgctaaaagctatccaggattttgtttctgtttgttttaaattttgtggttccttccctttcctccccctcccatgcgtaagacgttctgtgtaacctccattaaatttggtacaaaaccactcgccagagctgtggtgtcagaaaaataaaatatattgtttcttacaaaa

SEQ ID NO: 286349 - DNA, 1000 bp, Homo Sapiens
attcgggtagaacgaagtcgagagatgcagatgatagacttgcagacggggactccttgggaatctgtcaccttcacggccctgggcactgaccgaaaggttttcttcaacatcctggaggaagctcgagagctagccttgcagcaggaggaagggaagaccgtgatgtacacagctgtgggctctgaatggcgtccctttggctatccacgccgccggcgaccactgaattctgtggttctacaacagggtctggctgaccgaattgtcagagacgtccaggaattcatcgataaccccaagtggtacactgacagaggcattccttacagacgtggctacctgctttatgggccccctggttgcggaaagagcagttttatcacagccctggctggggaactggagcacagcatctgcctgctgagcctcacggactccagcctctctgatgaccgactcaaccacctgctgagcgtggccccgcagcagagcctggtactcctggaggatgtggatgctgcttttctcagtcgagacttggctgtggagaacccagtaaagtaccaaggcctaggtcgcctcaccttcagtggactgctcaatgccttggatggtgtggcttccaccgaggcccgcatcgtgttcatgaccaccaaccacgttgacaggctggaccctgccctgatacgcccggggcgagtggacctgaaggagtacgtgggctactgctcacactggcagctgacccagatgttccagaggttctatccagggcaggcaccttccttagctgagaactttgcagaacatgtccttcgagctacaaaccagatcagtcctgcccaggtgcagggctacttcatgctgtataaaaatgaccctgtaggggcaattcacaatgctgagtctctgaggaggtgatcaggctgggctcagctcagctctcctcctctagctcaataaacatctgccacactaaaaaaaaaaaaaaaaaaaa

SEQ ID NO: 286350 - DNA, 1000 bp, Homo Sapiens; identical to SEQ ID NO: 221469

SEQ ID NO: 286351 - DNA, 1000 bp, Homo Sapiens; identical to SEQ ID NO: 116171

SEQ ID NO: 286352 - DNA, 1000 bp, Homo Sapiens
gctgttgatttgatgaaggcgctgaagtttaagaaggtttctctgctggggtggagtgatgggggcataaccgcactcattgctgctgcaaaatatccatcttacatccacaagatggtgatctggggcgccaacgcctacgtcactgacgaagacagcatgatatatgagggcatccgagatgtttccaaatggagtgagagaacaagaaagcctctagaagccctctatgggtatgactactttgccagaacctgtgaaaagtgggtggatggcataagacagtttaaacatctcccagatggtaacatctgccggcacctgctgccccgggtccagtgccccgccttgattgtgcacggtgagaaggatcctctggtcccacggtttcatgccgacttcattcataagcacgtgaaaggctcacggctgcatttgatgccagaaggcaaacacaacctgcatttgcgttttgcagatgaattcaacaagttagcagaagacttcctacaatgagaatgcacactccagtcttggtggttccttcgtgtggggcttgatcgtgttgctgcctgttaacatgatgcctttgaaactctccgcctttgaaactttctacccctcccttcaatcttatcctaaccaaatgagaataatgacatattgaaaacagcctctagcttcaggctgggcacggtggctcacagctataatctcagcactttgggaggctgaggtgggagaattgcctgagcccaggagttcaagaccagcttgtgcaatatagggagactccggctctacaaaaaagagtttttcaaaattagccaggcgaagtggcacacatctgtggtcccaggtgctcaggaagctgaggtgggaggatcacttgagcccaattcaaagctgcagtgagctgtaattgcatcactgcactccaacctgggcaacagagtaagaccttgtcttaaaaaaaaataaaaacataaaaaaaaaaaaa

SEQ ID NO: 286353 - DNA, 1000 bp, Homo Sapiens; identical to SEQ ID NO: 116173

SEQ ID NO: 286354 - DNA, 1000 bp, Homo Sapiens
cttgtccaggcactctattcccagagataagtccctgttctgggaaaatagccacctccttgttaacagctttgcagacaacacccgtcgttttatgcccctgagcgatgttctgtatggcagggttgcagatttcttgagctggtgtcgacagaaaaatgactctggactcgattaccaatcctgccctacatcagaagactgtgaaaataatcctgtggattccttttggaaaagggcatccatccagtattccaaggatagttctggggtgatccacgtcatgctgaatggttcagagccaacaggagcctatcccatcaaaggtttttttgcagattatgaaattccaaacctccagaaggaaaaaattacacgaatcgagatctgggttatgcatgaaattgggggacccaatgtggaatcctgcggggaaggcagcatgaaagtcctggaaaagaggctgaaggacatggggttccagtacagctgtattaatgattaccgaccagtgaagctcttacagtgcgtggaccacagcacccatcctgactgtgccttaaagtcggcagcagccgctactcaaagaaaagccccaagtctttatacagaacaaagggcgggtcttatcattcccctctttctggtgctggcttcccggactcaactgtaactggaaactgtgttgctctaaccctcctccagccctgcagcctccccttgcagtcatcattcgtgttctgtgtataccaaatgattctgttatctaaagaagctttttgctgggaaaacgatgtcctgaaaatggtatttcaatgaggcatatgttcaggatttcagaaacaagaagttagttctatttagcaggttaaaaaatgctgcattagaattaaagcaagttattttcttatttgtataatgacacaaagcattgggagtcagactgcttgtatattatcaaacattttaagagaattctaataaagctgtattttacatc

SEQ ID NO: 286355 - DNA, 1000 bp, Homo Sapiens; identical to SEQ ID NO: 221470

SEQ ID NO: 286356 - DNA, 1000 bp, Homo Sapiens; identical to SEQ ID NO: 221471

SEQ ID NO: 286357 - DNA, 1000 bp, Homo Sapiens; identical to SEQ ID NO: 116175

SEQ ID NO: 286358 - DNA, 1000 bp, Homo Sapiens
actcatgatttttacacacacaatccagaacttattatatagcctctaagtctttattcttcacagtagataatgaaagagtcctccagtgtcttggcaaaatgttctagtatagctggatacatacagtggagttctataaactcatacctcagtggacttaaccaaaattgtgttagtctcaattcctaccacactgagggagcctcccaaataactattttcttatctgcagtattcctccagaagagctaaccagggcagggctggcatgagaagtgacatctgcgttacaaagtctatcttcctcataagtctgtaaagagcaattgaatcttctagctttagcaaacctaagccaaaggaaggaaagccacgaagaatgcagaagtcaaaccctcatgacaaagtaggcacaagtctacaataagctaaatcagaatttacaaatacaagtgtcccaggtagcattgactcccgtcattggagtgaaatggatcaaagtttgaattaaggcctatggtaaggtaacattgctttgttgtacttttgaacaagagctcctcctgatcactattacatatttttctagaaaatctaaagttcagaagagaatgtatcactgctgacttttattccaatatttggatggagtaagttttagggtagaattttgttcagtttggatttaatcttttgaaaagtaaattccttgtttactggtttgactataattctctgttatctttacgaggtaaaactgcaagctgactagcatgttctgtgaatctgccattcctaaaaattttataaacacttgatacttttcactgataatggatcgctccaataaacatatattgtgaaaatgcatccacaataaatggaattccttcctgcaaaatgtctttttctcacttatttttatgtacaatattgatagtgagaggtatgtctattataataaagattatggcacagtaaaaaaaaaaaaaaaaaa

SEQ ID NO: 286359 - DNA, 1000 bp, Homo Sapiens; identical to SEQ ID NO: 221472

SEQ ID NO: 286360 - DNA, 1000 bp, Homo Sapiens
agtgaggactcttgtgaagatatgagttgtggagaggagagtctcagcagctctcctcccagtgatcaagagtgcaccttctttttcaacttcaaagtggcacaaacactgtgctttccatcttagaaatctgattgttctgtcagaatttatatttacagggtttcaaagcaataaatgggggaataggtagtttcctggtttagcccccatctagtcaggaattaatatactggaatacctaccttctatttgttattcagatcagatctggcctattttcatatttatcctaagccatcaaatggggtagtgcctcttaaaccattaacagtactttagacattggcactttatttttctcgtagatctttagctactttggggaggagggaaggtgctgataccttcaatttgttacttttcaagatttttaaaaataactagtgtagcttatcttaaacattttataaaaccttcagatgtctttaagcagattggaagtatgcaagtgcttccttagcagggacagtggataatccttaatggtttatcatagatttcaccctccccccttctcagaagagtgagtatgctcttaaatgtcaaacacatttttgttgttttgttttttaaatgatcagtgtctatttgatgtgatgcagatcttataaatttgggaattataatattgacatttctgtgatttttatatatgtaatgtcttaattgagatttgtgttaaggcagaaataattaggctagggctcttagttttcattcctattgccccaagtattgtcaaactatggtattattttaatgttactttaaaaatccataatctgctagttttgcatgtacttatatgaaaacagtgcagtaagttgaaaactcagtatctatggaattgataaatgttgatctggtgtagtatattttatccgcattttcttatattaaaaaatgttctgcatgattacattttatttgcctttgt

SEQ ID NO: 286361 - DNA, 1000 bp, Homo Sapiens
tgcctgctggggacgttcttcacctgcctggtcatcctgtttgcctgtgaggtggccgccggcatctggggctttgtcaacaaggaccagatcgccaaggatgtgaagcagttctatgaccaggccctacagcaggccgtggtggatgatgacgccaacaacgccaaggctgtggtgaagaccttccacgagacgcttgactgctgtggctccagcacactgactgctttgaccacctcagtgctcaagaacaatttgtgtccctcgggcagcaacatcatcagcaacctcttcaaggaggactgccaccagaagatcgatgacctcttctccgggaagctgtacctcatcggcattgctgccatcgtggtcgctgtgatcatgatcttcgagatgatcctgagcatggtgctgtgctgtggcatccggaacagctccgtgtactgaggccccgcagctctggccacagggacctctgcagtgccccctaagtgacccggacacttccgagggggccatcaccgcctgtgtatataacgtttccggtattactctgctacacgtagcctttttacttttggggttttgtttttgttctgaactttcctgttaccttttcagggctgacgtcacatgtaggtggcgtgtatgagtggagacgggcctgggtcttggggactggagggcaggggtccttctgccctggggtcccagggtgctctgcctgctcagccaggcctctcctgggagccactcgcccagagactcagcttggccaacttggggggctgtgtccacccagcccgcccgtcctgtgggctgcacagctcaccttgttccctcctgccccggttcgagagccgagtctgtgggcactctctgccttcatgcacctgtcctttctaacacgtcgccttcaactgtaatcacaacatcctgactccgtcatttaataaagaaggaacatcaggcatgctaccaggcctgtgcagtccctcag

SEQ ID NO: 286362 - DNA, 1000 bp, Homo Sapiens
gacgggggacgtgtgtatctccatcctccacccgccggtggacgacccccagagcggggagctgccctcagagaggtggaaccccacgcagaacgtcaggaccattctcctgagtgtgatctccctcctgaacgagcccaacaccttctcgcccgcaaacgtggacgcctccgtgatgtacaggaagtggaaagagagcaaggggaaggatcgggagtacacagacatcatccggaagcaggtcctggggaccaaggtggacgcggagcgtgacggcgtgaaggtgcccaccacgctggccgagtactgcgtgaagaccaaggcgccggcgcccgacgagggctcagacctcttctacgacgactactacgaggacggcgaggtggaggaggaggccgacagctgcttcggggacgatgaggatgactctggcacggaggagtcctgacaccaccagaataaacttgccgagtttacctcactagggccggacccgtggctccttagacgacagactacctcacggaggttttgtgctggtccccgtctcctctggttgtttcgttttggctttttctccctccccatgtctgttctgggttttcacgtgcttcagagaagaggggctgccccaccgccactcacgtcactcggggctcggtggacgggcccagggtgggagcggccggcccacctgtcccctcgggaggggagctgagcccgacttctaccggggtcccccagcttccggactggccgcaccccggaggagccacgggggcgctgctgggaacgtgggcggggggccgtttcctgacactaccagcctgggaggcccaggtgtagcggtccgaggggcccggtcctgcctgtcagctccaggtcctggagccacgtccagcacagagtggacggattcaccgtggccgactcttttccctgctttggtttgtttgaaatctaaataaaactactttatgagaaaaaaaaaaaaaaaaaa

SEQ ID NO: 286363 - DNA, 1000 bp, Homo Sapiens; identical to SEQ ID NO: 116177

SEQ ID NO: 286364 - DNA, 1000 bp, Homo Sapiens
tggccatcactatacttgacatcaatgataacgcccctgaatttgccatggactatgagaccaccgtctgtgaaaatgcccagccggggcaggttatccagaaaatcagtgctgtggataaagatgagccatccaatggacaccagttttacttcagcttaacaacggatgcaacaaataaccacaacttttcattgaaagataacaaagacaacacagcctcaatactgaccaggagaaacggcttccggagacaggaacaatcagtttactatctgccaattttcattgtggacagtggatctccctcacttagcagcaccaacaccctcaccatccgcgtgtgtgactgtgatgctgacggcgtagcccagacctgcaatgcagaggcctatgtcctacctgctggcctcagtacaggagccctgatagccatactcgcctgtgtcttgacattattggtgttgatcctccttatcgtcactatgagaagacggaaaaaagagccccttatttttgacgaagaaagagacatcagagaaaatattgtgagatacgatgacgagggcgggggagaggaggacacggaagcgtttgacatggctgcactgagaaacctcaacgtcatccgagacaccaagacccggagggatgtgactccagaaattcaattcctgagtcgaccagcttttaaaagcatcccagataatgtcatctttagggaatttatttgggaaagattaaaagaagccgatgttgatcctggtgctcctccttatgactccctgcagacatatgcttttgaaggaaatggctcagttgctgaatcactcagctctttagattccatcagctcaaactctgatcagaactatgactacctaagtgactggggacctcgctttaaacgactcgcggacatgtatgggactggccaagagagtttgtactcatagccttggaaccttaattcgaaatgtactgaagaaaaagtaacagc

SEQ ID NO: 286365 - DNA, 1000 bp, Homo Sapiens; identical to SEQ ID NO: 116178

SEQ ID NO: 286366 - DNA, 1000 bp, Homo Sapiens; identical to SEQ ID NO: 116179

SEQ ID NO: 286367 - DNA, 1000 bp, Homo Sapiens; identical to SEQ ID NO: 116180

SEQ ID NO: 286368 - DNA, 1000 bp, Homo Sapiens
caggatctagaataatcttgctcacagctgtgctctgagtgcctagcggagttccagcaaacaaaatggactcaagagagatttgattaatgaatcgtaatgaagttggggtttattgtacagtttaaaatgttagatgtttttaattttttaaataaatggaatactttttttttttttttaaagaaagcaactttactgagacaatgtagaaagaagttttgttccgtttctttaatgtggttgaagagcaatgtgtggctgaagacttttgttatgaggagctgcagattagctaggggacagctggaattatgctggcttctgataattattttaaaggggtctgaaatttgtgatggaatcagattttaacagctctcttcaatgacatagaaagttcatggaactcatgtttttaaagggctatgtaaatatatgaacattagaaaaatagcaacttgtgttacaaaaatacaaacacatgttaggaaggtactgtcatgggctaggcatggtggctcacacctgtaatcccagcattttgggaagctaagatgggtggatcacttgaggtcaggagtttgagaccagcctggccaacatggcgaaacccctctctactaaaaatacaaaaatttgccaggcgtggtggcgggtgcctgtaatcccagctacttgggaggctgaggcaagagaatcgcttgaacccaggaggcagaggttgcagtgagccgagatcgtgccattgcactccagcctgggtgacaaagcgagactccatctcaaaaaaaaaaaaaaaaaaaaaggaaagaactgtcatgtaaacataccgacatgtttaaacctgacaatggtgttatttgaaactttatattgttcttgtaagctttaactatatctctctttaaaatgcaaaataatgtcttaagattcaaagtctgtatttttaaagcatggctttggctttgcaaaataaaaaatgtgttttgtacatgaa

SEQ ID NO: 286369 - DNA, 1000 bp, Homo Sapiens; identical to SEQ ID NO: 116183

SEQ ID NO: 286370 - DNA, 1000 bp, Homo Sapiens; identical to SEQ ID NO: 118455

SEQ ID NO: 286371 - DNA, 1000 bp, Homo Sapiens; identical to SEQ ID NO: 116184

SEQ ID NO: 286372 - DNA, 1000 bp, Homo Sapiens; identical to SEQ ID NO: 116186

SEQ ID NO: 286373 - DNA, 735 bp, Homo Sapiens
gagtctgcccttgcgagctcagagtgtgcccgtgcgccgccgccgtcgtacctgccgccgccgccaccgccaccatgcccaacttcgccggcacctggaagatgcgcagcagcgagaatttcgacgagctgctgaaggcactgggtgtgaacgccatgctgaggaaagtggccgtagcggctgcgtccaagccgcacgtggagatccgccaggacggggatcagttctacatcaagacatccaccaccgtgcgcaccactgagatcaacttcaaggtcggagaaggctttgaggaggagaccgtggacggacgcaagtgcaggagtttagccacttgggagaatgagaacaagatccactgcacccaaactcttcttgaaggggacggccccaaaacctactggacccgtgagctggccaacgatgaacttatcctgacgtttggcgccgatgacgtggtctgcaccagaatttatgtccgggaatgaaggcagctggcttgctcctactttcaggaagggatgcaggtccccgaggaatatgtcatagttctgagctgccagtggaccgcccttttcccctaccaatattaggtgatcccgttttccccatgacaatgttgtagtgtcccccacccccacccccctggccttggtgcctcttgtatccctagtgctgcatagcccggcatttgcacggtttcgaagtcattaaactggttagacgtgtctcaaa

SEQ ID NO: 286374 - DNA, 1000 bp, Homo Sapiens; identical to SEQ ID NO: 116187

SEQ ID NO: 286375 - DNA, 1000 bp, Homo Sapiens
accagttgatttaaatatctggtctctctctttggtttttttttggcgggggggtggggggggttcttttttttccgttttgtttttgtttggggggaggggggttttgtttggattctttttgtcgtcattgctggtgactcatgcctttttttaacgggaaaaacaagttcattatattcatattttttatttgtattttcaagactttaaacatttatgtttaaaagtaagaagaaaaataatattcagaactgattcctgaaataatgcaagcttataatgtatcccgataactttgtgatgtttcgggaagatttttttctatagtgaactctgtgggcgtctcccagtattaccctggatgataggaattgactccggcgtgcacacacgtacacacccacacacatctatctatacataatggctgaagccaaacttgtcttgcagatgtagaaattgttgctttgtttctctgataaaactggttttagacaaaaaatagggatgatcactcttagaccatgctaatgttactagagaagaagccttcttttctttcttctatgtgaaacttgaaatgaggaaaagcaattctagtgtaaatcatgcaagcgctctaattcctataaatacgaaactcgagaagattcaatcactgtatagaatggtaaaataccaactcatttcttatatcatattgttaaataaactgtgtgcaacagacaaaaagggtggtccttcttgaattcatgtacatggtattaacacttagtgttcggggttttttgttatgaaaatgctgttttcaacattgtatttggactatgcatgtgttttttccccattgtatataaagtaccgcttaaaattgatataaattactgaggtttttaacatgtattctgttctttaagatcccctgtaagaatgtttaaggtttttatttatttatatatattttttggtctgttctttgtaaaaaaaaaaaaaaaaa

SEQ ID NO: 286376 - DNA, 1000 bp, Homo Sapiens
ccctcagagggcccaggagagacagaagtctcagccacggaagaagtcacctccagttaaggcagtccccatccaaccccctggacccccagaaagggattctgtgggccagctgcaactatatcgccacccagaccgttcgcagccagcattcttggatgcaattgaccgacgggaagacacattttatgttgtctctttccgaagggaccacctgctgctcccagccatcagccacaacaagacctcccggcccaagatgtccctggtgatgcctgccatggcccccaatgagaccctgtcaggccgtggggccccgggggactatgaggagatgatgcagatcgagtgtgaggtcatggacaccagggtgattcacatcaagacctccacagtgcccccctcgctccgaaaacagccatccccaaccccaggcaatgccacaggtggccccttgccagtctctgcagccagccaggcccaccaggcctcccaccagcccctctacctcaatcatccctgacctctgccattcacactgacttagaacggggggagggggtaccaggtggccaggtgggactgtttcaaatttccctgatccccaggcttggggcaattggtaaaggaaagagcaggtgtgggggttaagcacttatttgaggtgggggtgttcacctctcttctcatcccttttcagaatatagggctcctctcattcctgtgaacccccagtcctggcttctttgtttgaggggattgtgtgaggttcagttgtggggtgggtggtgagctgctgcatattttttattttgtttctctagtgttatggcagtggaggtgggaatttagtccccaggtgggacaagggaagttttttcattttggagctagttactgggagtaagggagggtggggtgggggggagttcaggtttatgtgtgtgcatttcttttttattattattaaataaacaacttggagggagttgaaaaaaaa

SEQ ID NO: 286377 - DNA, 1000 bp, Homo Sapiens; identical to SEQ ID NO: 116189

SEQ ID NO: 286378 - DNA, 1000 bp, Homo Sapiens; identical to SEQ ID NO: 116190

SEQ ID NO: 286379 - DNA, 1000 bp, Homo Sapiens
ggggttcagtaaagaaagaaatgtgttaactgagcctgaatcccttctgggaagtaataatgaccattgacaactaagaagtagacaccatgctaaagacttacatacaatctccttgaatcttctcaatagcccattgacttagaaactgttactttcccattttacacacagtgaaactgaggctcagatataaaggaaaggtactggcttgaagtcacaaccacgacaggagtaaggatttggaataaggatttggtcctgttttctggaccaaatccttactctggctctgcttacactttctctccatcaccaaatccttactccaaatccagaagtcagagccaactcccatcttggttctgacccaaatcctgctctggactctggagaggagattgaaatataattgcaccctcatacacatttaggaaatggttaagaagtgtaaactgaacccttatccttgtcttcaatcttcctccctgtagacatctatcttattatggttattattcagaaaacccagggatacaggtttgtcttcttactttgataactcttcttagtttaaaataataataataacacatctttggtcatctatgtcacacaaaaattttcctttgtttgcggggggctggggatgcagtgttttttggggggtcttggtttatgctccctgcccttgagcccctcagccgtttgccctgcccccacctcggctccatggtgggagggggctctggtcttttctaaagtgggcggtttgtcttttgatctttcccttttggatgtgcgtgtgtgtctgcgtgtgccatgtgcgtggcacgcatatgagtgtgtgtgcgtgtgaacggctttgggtcctgctggttttgctgtgagctgcagtgttctgtgggtctgtggtatctgacactgtggacattaatgtacttcttggacattttaataaattttttaacagttcaaaaaaaaaaaaaaaaaaaaaaaa

SEQ ID NO: 286380 - DNA, 1000 bp, Homo Sapiens
ggcggaggaagccgcgcgtgctcttctcgcaggcgcaggtctatgagctggagcggcgcttcaagcagcagcggtacctgtcggcccccgaacgcgaccagctggccagcgtgctgaaactcacgtccacgcaggtcaagatctggttccagaaccggcgctacaagtgcaagcggcagcggcaggaccagactctggagctggtggggctgcccccgccgccgccgccgcctgcccgcaggatcgcggtgccagtgctggtgcgcgatggcaagccatgcctaggggactcggcgccctacgcgcctgcctacggcgtgggcctcaatccctacggttataacgcctaccccgcctatccgggttacggcggcgcggcctgcagccctggctacagctgcactgccgcttaccccgccgggccttccccagcgcagccggccactgccgccgccaacaacaacttcgtgaacttcggcgtcggggacttgaatgcggttcagagccccgggattccgcagagcaactcgggagtgtccacgctgcatggtatccgagcctggtagggaagggacccgcgtggcgcgaccctgaccgatcccacctcaacagctccctgactctcggggggagaaggggctcccaacatgaccctgagtcccctggattttgcattcactcctgcggagacctaggaactttttctgtcccacgcgcgtttgttcttgcgcacgggagagtttgtggcggcgattatgcagcgtgcaatgagtgatcctgcagcctggtgtcttagctgtccccccaggagtgccctccgagagtccatgggcacccccggttggaactgggactgagctcgggcacgcagggcctgagatctggccgcccattccgcgagccagggccgggcgcccgggcctttgctatctcgccgtcgcccgcccacgcacccacccgtatttatgtttttacctattgctgtaagaaatgacgatcc

SEQ ID NO: 286381 - DNA, 1000 bp, Homo Sapiens
tttttagtagagacggcgtttcaccattttggccggcctcctcggcctcccaaagttctgggattacaggcatgagccactgtgcccagtcaggatgtctttaatgtaggaatcattcaagatccctcctcagtgcccatgtctcccccacctcagggtgctgtcaaccctcccttggtttccatgatcattgctgaactcagagctttcttctatccccagacccacatgggagtctcccagcacctctgactcagcttggccaatgcagaacttggcatctgaacccctgcctcttccctgaaccactcctcctcctgatttccctgctctctctgctcagaacactaccattcaccccatctcccagagacactctccctcctcctctttcaccttcatacaagcaggcccccgtcctatcagtacacccccctgtgatgcctctgaaatatgtaccctcctcccctctcctactgtcattcttatacctgtgatctctgcgtttctcttctacactgctgccagaggcctttttgccaaaagcactgctgattgtcactcttttactttcctggttcccctttgacttcacacacttgacgtttacattttgtcacagttggtcccccttgccttcacatacctgatgtttaaattttgtcacggttggtctccaaacttctcaactttgccagctttctccaatgaaaccatcagtagagacattgctgttcctgcccatcccagtgccagctactccttcctggaagccttcctggatttcacgcatcccatcctctggccagaaatggcctccgaactgtgcagctcctgcggcaccatttgtatcatagcatatctgttatgtgtcgttgctttctgtgtcttggtttctgcctgctgcccacttccctagactggagcctactggggcatggtattttattcatttctgacctccaattccctaagtggagattaaatgttagaaacctga

SEQ ID NO: 286382 - DNA, 1000 bp, Homo Sapiens
tacttttcctaatggtttaaattctggaattacactggggttcttttgccttttttagcagaacatccgtccgtccatctgcatctctgtcccatgactcaggggcgcccactctgcttcgattctcctcctgtggaagaaaccattttgagcatgacttttcttgatgtctgaagcgttattttgggtactttttagggaggaatgcctttcgcaataatgtatccattcccctgattgagggtgggtgggtggacccaggctccctttgcacacagagcagctacttctaagccatatcgactgttttgcagaggatttgtgtgtcctccctcaggaggggaggcctggtaggagggggggagagttctctgtcctactgctctcaagagggcatttccccttgcgccttctcccacagggcccagcccctctcccctgcccaagtccccagggggtactctggagtgagcagtccccctgtgggggagcctgtaaatgcgggctcagtggaccactggtgactgggctcatgcctccaagtcagagtttcccctggtgccccagagacaggagcacaagtgggatctgacctggtgagattatttctgatgacctcatcaaaaaataaacaattcccaatgttccaggtgagggctttgaaaggccttccaaacagctccgtcgcccctagcaactccaccattgggcactgccatgcagagacgtggctggcccagaatggcctgttgccatagcaactggaggcgatggggcagtgaacagaataacaacagcaacaatgcctttgcaggcagcctgctcccctgagcgctgggctggtgatggccgttggactctgtgagatggagagccaatctcacattcaagtgttcaccaaccactgatgtgtttttatttccttctatatgattttaagatgtgttttctgcattctgtaaagaaacatatcaaactaaataaaagcagtgtctttatt

SEQ ID NO: 286383 - DNA, 1000 bp, Homo Sapiens
cacttcagagttctggaagtgaccacggaccagggtggaggaatagacttctagttcattctgggacacttgagccagagagttgaaagcttggaaagaccagataagaaacctgccctttgtctccctagggacatgagacaccacattccatttgtgctagaaaaacctatccactgatgagtctaactgttccaaacgcctcccacctggtgtgcacagctgcctgggtccattgtcacttgggtgcatcaggttgtcctccgatttttagatgagtttcctgtctagagatgtcctagtctgctcactggctggtggcagtagggtaccctgcgtcctcgaaaagccagagggttcacctagtcagacgaaactccagaacagtgcttgtggagggcctgactgtcctgctcacccacagccgatctgctgcaggtcagcaactgtgtcgtgagcagctgccaaccaccagcctttctggtgctgttctccagttcacgtctgccagctggtgagggcagaggcagacctggtcagacccagcgcccctcctccctgagggagcatggcacagcctcacacttgaaagacggtgtttggtttcccatctaatcaacttaagggaagccggcatgtacccttcaaggccctgtcaccacctattttcctgatcagttggtataaactgagggtggcttttagagacccagacttggttggcagcgctgccatggaacaccccagcaagcacctcccagcctgcctttcggagcagcacccaggaggggatgccgcgctccagcaacaccaggtcaggcctgtgcagacccctgccctgccgctgcagaaatccagaagcatccttaatgcttctcagtcttcagccagagggagggctgttatttccagaggtgcgctttttatgtacttttagctagatgtggcatgcatctgtgagctttagatcattaaatccaaaatgtttgcctaaatgagg

SEQ ID NO: 286384 - DNA, 1000 bp, Homo Sapiens; identical to SEQ ID NO: 116191

SEQ ID NO: 286385 - DNA, 1000 bp, Homo Sapiens; identical to SEQ ID NO: 116192

SEQ ID NO: 286386 - DNA, 1000 bp, Homo Sapiens; identical to SEQ ID NO: 221481

SEQ ID NO: 286387 - DNA, 1000 bp, Homo Sapiens; identical to SEQ ID NO: 221482

SEQ ID NO: 286388 - DNA, 1000 bp, Homo Sapiens; identical to SEQ ID NO: 221483

SEQ ID NO: 286389 - DNA, 1000 bp, Homo Sapiens
tagggacttgaaaatgtatcatgataactataatttattgatgttttgatcaaaagaataaccagatgccatatttttcctgaaaggaattgctggacattacacttgtttttagggtgtcatcatttcacagaggtttaaatactgtggagtgacaccagtaacacagccaaagaggctagtaagcaagaaaggatctgcatgataactttgcagctgagatagttcctaattcatcaacgtaacaaacaaagctattgggtgtccatgtatataccaggcactatgctaggtgttgagaatgtaaagcaggttaagacttgtttcttgctcctgaggagcgtatagaggggacccacgtagctaacagagttaacagaggggtatgtataagagaaacgtgaatagttacaacccagtatgctgagtgccaaggccagtgaggctatgaacacgatatcaatctggggacactgagaaggataaccaatgcgttggagaacgagggaggacttcatagcagaagaattggagttggaaggttgcatagggtttcctcattggagaccggggaattctattcttgggataaataatagtaaattctataggattcaatacttagtttgcaaaagcactttgaaattatggcacagtgagttgttttggataagaaaatctttttctcccaattaatttaccaattcatcattttttttttttgtagaactcccataaacatcaccttactaatcactggtgatgataagaaggattgggtcaggaagagtgggagaaagaaattcctctttacgtagatactttttagctttattttttctaaaatcagtttgcgtgcaatgctagaaaaaaactgttctctgagtcctttacagagcaaaattctgtatgtaagattcaattgatttttgacaaataccatttgaaatattacctcaacataaaatacttgttttgtaataaagattataatacccag

SEQ ID NO: 286390 - DNA, 1000 bp, Homo Sapiens; identical to SEQ ID NO: 221485

SEQ ID NO: 286391 - DNA, 1000 bp, Homo Sapiens; identical to SEQ ID NO: 221486

SEQ ID NO: 286392 - DNA, 1000 bp, Homo Sapiens
attctcggattctcgactctttgcaacagcacttgcttgcggaactcttcctggaatgcattcactcagcatccccaaccgtgcaacgtgtaacttgtgcttttgcaaaagaagttgatctgaaattcctctgtagaatttagcttatacaattcagagaatagcagtttcactgccaacttttagtgggtgagaaattttagtttaggtgtttgggatcggacctcagtttctgttgtttcttttatgtggtggtttctatacatgaatcatagccaaaaacttttttggaaactgttggttgagatagttggttcttttaccccacgaagacatcaagatacacttgtaaataaagctgatagcatatattcatacctgttgtacacttgggtgaaaagtatggcagtgggagactaagatgtattaacctacctgtgaatcatatgttgtaggaaaagctgttcccatgtctaacaggacttgaattcaaagcatgtcaagtggatagtagatctgtggcgatatgagagggatgcagtgcctttccccattcattcctgatggaattgttatactaggttaacatttgtaatttttttctagttgtaatgtgtatgtctggtaaataggtattatattttggccttacaataccgtaacaatgtttgtcattttgaaatacttaatgccaagtaacaatgcatgctttggaaatttggaagatggttttattctttgagaagcaaatatgtttgcattaaatgctttgattgttcatatcaagaaattgattgaacgttctcaaaccctgtttacggtacttggtaagagggagccggtttgggagagaccattgcatcgctgtccaagtgtttcttgttaagtgcttttaaactggagaggctaacctcaaaatattttttttaactgcattctataataaatgggcacagtatgctccttacagaaaaaaaaaaaaaaaaaaaaaaaaaaaaaa

SEQ ID NO: 286393 - DNA, 1000 bp, Homo Sapiens; identical to SEQ ID NO: 115344

SEQ ID NO: 286394 - DNA, 1000 bp, Homo Sapiens; identical to SEQ ID NO: 221487

SEQ ID NO: 286395 - DNA, 1000 bp, Homo Sapiens; identical to SEQ ID NO: 221488

SEQ ID NO: 286396 - DNA, 1000 bp, Homo Sapiens; identical to SEQ ID NO: 116196

SEQ ID NO: 286397 - DNA, 1000 bp, Homo Sapiens; identical to SEQ ID NO: 116197

SEQ ID NO: 286398 - DNA, 1000 bp, Homo Sapiens; identical to SEQ ID NO: 116198

SEQ ID NO: 286399 - DNA, 1000 bp, Homo Sapiens
accggcgcgtccactcagacgagcggccctacccttgtcccaagtgtggcaagcgctacaagactaagaacgcacagcaggtgcacttcaggacacacctggaggagaagccgcacgtgtgccagttctgcagccgtggcttccgagagaagggctcactggtgcggcacgtgcgacaccacacaggcgagaagccgttcaagtgctacaagtgcggccgtggcttcgccgagcacggcacgctgaaccggcacctgcgcaccaaagggggctgcctgctggaggtggaggagttgctggtgtctgaggacagccccgcggcagccaccaccgtcctcacggaagacccgcacacagtgttggtggagttctcgtccgtggtagctgacacccaggagtatatcatcgaggccactgcggacgatgcggagaccagtgaggccacggagatcatcgagggcacccagacagaggtggacagccacatcatgaaggtggtgcagcagatcgtgcaccaggctagcgccggccaccagatcatcgtgcagaacgtcaccatggacgaggagacggcgctgggcccagaggcggctgccgccgacaccatcaccatcgccacccccgagagcctgacagagcaggtggccatgacgctggcctcggccatcagcgagggcactgtgcttgccgcccgggcagggacaagtggcactgaacaggccactgtgaccatggtgtcatcagaggacatcgagatcctggagcatgcaggcgagctggtcatcgcctcgccggagggccagctggaggtgcagacggtcatcgtctagcatgaggtctgcggggtcctggccgggcagggacagggcagaggactctgagcgccccacccatgcctgcctggcctggtagagaagatggcacaggatggaggcgccccaagacggacagtgtacataagagtttcttgttgctttacaataaaacatgagaacctgca

SEQ ID NO: 286400 - DNA, 1000 bp, Homo Sapiens; identical to SEQ ID NO: 221490

SEQ ID NO: 286401 - DNA, 1000 bp, Homo Sapiens; identical to SEQ ID NO: 221491

SEQ ID NO: 286402 - DNA, 1000 bp, Homo Sapiens
aaagtcactttatgcgttttccacttttttcttttttaagaaaaagaagtaccatttttgttttgttttgttttgatttttggtggtggataaataatactaaaaggactctagtggaaaggggggatatcgaagagcagggggttgtgaatttccaggtacttggactttttgtagaaggagagagaagaagatgaagtttgccaggagggcccatattttttcagctgaagggtaaaatctttctttgcagagacagtattttgctgaatactttttataatgtgatgattattaaaaaagcaaaaattttggtcacttccaagctagaaggaggaatcagataccctttaatattttttcctcgctccttctggtatatgcatgtcactgcatgataattgagttttcctttgttttaataaaactgttctcagacattaagctaaactaagagaaaaataactttgttgccaaaaggttgtgctatccagattttttatatgtctgcatgtttaaaaaaaaaaagcaacaaaagaaaatgcactctaacttatgtgaactgagagaaaaaaatcaggttttaaacaggaaaacctatggggaatgatattttttgaaagacttttgtataaagttgagtacttagaaaaaagacaaaccagatgtaatatattttgtggatgtttttatttcttggatttatagtaccttatactaaggttaaaaaaatatgcttgatattgtgaaaaggtgaaattcttcaccaacatttcatttgctcctttgtcatattgtaatgccaatataatatagttaatgaaaacagcatttttaaaaaccgaaatattgaaatggtgtaatgttgtaccatttgcactgtgagcaaatgctaatacagtaaatatattgtgtttgctgacaatcagccggcctataaatctccttattttatttcttgtttttatagcataaagctttagtttggcctgaaaaaaaa

SEQ ID NO: 286403 - DNA, 1000 bp, Homo Sapiens
agctgtaccagtctccaaacagaaggtatccaggaccgctagctcagcaggcacagcgttttaggttggacaatctgctcaatatggcttatggagtaaagaggttttctccaatgaccattgacggaatgaccagtttggctggaattaatatccctgggcaccctggaacagggtggtgtatatttgtgtacaacctggctcctgacgcagatgagagtatcctgtggcaaatgtttgggccttttggagctgtcaccaatgtgaaggtcatccgtgactttaacaccaataaatgcaaaggttttggatttgtgactatgacaaactatgatgaggctgccatggcgatacgtagcctcaatggataccgtctgggagacagagtactgcaggtctcctttaagacaaacaaaacgcacaaagcctaatgagctcttgtcctcagtccatttatatatgaaaactatacaacaaaggcaagttaagagaaactttatacattagtaaatgtctttgtaagtcagtgttgagatggggataaaatgactacttagcatcctaagaaatatgtgagattttttattgctagtatttgaattaaaacttcttaaatatcttttatgttgaatatggacaagaggtacagggttttacctgtcacattgcattctattgccttctttgaagaaggtggaccttttaaagtgtttcagctaagggaagacatttcttttctttttacataactgccttgaacctgtgagtaaatattgaggctttgtgttgtaattcttcagttggttgtgtcttttttttcccccctttttcctttttctgattagctttgtgtttggtttacatttaaagcattgctgttatgtctgtttaagaaaagtattttgaagtttacatttttatttatgaagtttaaaacagtatttattttgtaattatgatttgggttggggaagggggggctacattataaacgcttagg

SEQ ID NO: 286404 - DNA, 1000 bp, Homo Sapiens; identical to SEQ ID NO: 116201

SEQ ID NO: 286405 - DNA, 1000 bp, Homo Sapiens
ctgttgaatgcagtccaaacatgaaaggaaataattgttttatattataactctgaagcatgataaaggggcagttcacaattttcaccatttaaacacaaatttgctgcacagaatatcaccattgcagttcaaaacaaaacaaaacaaaaagtcttttgtttgtgaacactgatgcaagaaacttgttaaatgaaaggactctttaccctagaaggaagaggtgaaggatctggcttgtttttaaagctttatttattaaaccatattatttgattactgtgttagaatttcataagcaataattaaatgtgtctttatagatattgcaggaatgtatacatattgtgattaatgctttcaaaacttatgaaaatcatgaactaccccagaattgaactgttgtacttccaaagagaattgggctgtttataatgattttaatagagaaagatcccagggatcggtcataattggtcttgtttgataatgtgggcatccacaaacaaacaaacaaataacagaaacaaaatctgtaaatgttcctttgtaaaacttgtaaattttatttatactgtcttgttttgtacacacatttctctgtagtgggctctgaatacattgaaaatgcactatatttttctattttacttgcagagcatcacaaaagaacaggtattttcagtgctacataatgtgttttcccacatttaggaccaaagacggctatagaaaaactcaaatggattgcttcccaaacccctccccaccctttttttttggttttaaatcactgtacagtgttatttgatattttaatttattttttgattgactagaaaaatcattttaatttcactaaaatgttttttgtccctaaggaaaagtaatctgtaaaaataattttaattagcataatacagtcacctagacacttccatttgtaatctttgtaatagactgtaaatatatttttggaactataaaaaaaaaaaaaaaa

SEQ ID NO: 286406 - DNA, 1000 bp, Homo Sapiens; identical to SEQ ID NO: 116202

SEQ ID NO: 286407 - DNA, 1000 bp, Homo Sapiens; identical to SEQ ID NO: 116203

SEQ ID NO: 286408 - DNA, 1000 bp, Homo Sapiens; identical to SEQ ID NO: 116204

SEQ ID NO: 286409 - DNA, 1000 bp, Homo Sapiens; identical to SEQ ID NO: 221494

SEQ ID NO: 286410 - DNA, 1000 bp, Homo Sapiens; identical to SEQ ID NO: 221495

SEQ ID NO: 286411 - DNA, 1000 bp, Homo Sapiens; identical to SEQ ID NO: 221497

SEQ ID NO: 286412 - DNA, 1000 bp, Homo Sapiens
ggtaagcaacagtgctagcattctagattcctgcctttttttaaaaagaaattattctcattgctgtattatattggaaaagttttaaacaaccaagctaaagctatgtgaaagttgagctcaaagtagaggaaaagttactggtggtaccttgctgcctgctctgctggtagaattctgtgctccccgtgacacttagtacattaagaatgactacactgttcctcgtatgtgaaggaggcagtgctgactccgtgagtgtgagacacgtgctttgaactgcttttctattcatggagcactccatagtctcaaactgtcccccttatgaccaacagcacatttgtgaagaggttcgcagggataaggggtgcactttatagctatggaaacatgagattctcctctattggaagctaattagcccacaaaggtggtaaacctgtagattgggccttaattagcattgtactctaatcaaaggactctttctaaaccatatttatagctttcttaacctacacatagtctatacatagatgcatattttacccccagctggctagagatttatttgttgtaaatgctgtatagatttggttttcctttctttacttaccctggtttggattttttttttttttttttttgaatggatttatgctgtcttagcaatatgacaataatcctctgtagcttgagctacccctcccctgctgtaacttacgtgacctgtgctgtcactgggcataggacagcggcatcacggttgcattcccattggactcatgcacctcccggatggtttttgtttttttcgggggttctttggggtttgtttgtttgcttcttttccagagtgtggaaagtctacagtgcagaaaggcttgaacctgccagctgatttgaaatactttcaccctgcgcagggccgtatgcatcctgccaagctgcgttatattctgtactgtgtacaataaagaagtttgcttttcgttta

SEQ ID NO: 286413 - DNA, 1000 bp, Homo Sapiens; identical to SEQ ID NO: 221498

SEQ ID NO: 286414 - DNA, 1000 bp, Homo Sapiens
taccattattatcaagtagactactgttcagcttttattccttccctggttgtttatcccttaggaatgagtttcttagactttcccaatatgtgattttttttcccatttagaatggtgattttaaatgtgtgagtgcatgtactatcttatctcagatatttgcacccccaatctgcccccaactcccaaaagctagaacactgccaactgatctgttataggtcctttagaaacacataattaacacttaaggttgggtgctgctaattctttgcaaaaatccaaatattgttaagggaccagggagatgccactaccccttgattttccatctaaaaatatacatgtttatgtaaacaaatctttccatatccatagtgacttttcaagtatttaagcctaaagattttgatctcacatttttatacctgtttaaattgctcacagttattacatacacatcagccatcaactaaagttgtactttaaaaatttactacaatatgtacatttctaagtcaaacacttgtgacttttgctttaattccatgaatgttcctgcctccttgatatttgtatttattctttttttctctagagtagaggtataattgtgtgatatttcagaaatacagataaatgattcaaaaagtcacagttaaggagaatcatgtttctttgatcatgaataactgattagtaagtcttgcctatattttcctgatagcatatgacaaatgtttctaaggtaacaagatgagaacagataaagattgtgtggtgttttggatttggagagaaatattttaatttttaaatgcagttacaaattataatgtattcatatttgtactttctgttaaaatgcatgattgcagaattgtttagattttgtgtttattcttgatgaaaagctttgtttgttcttgtttttaagtttgcactcaaatcttaagaaataaatccacccatgttatcaaaaaaaaaaaaaaaaaaa

SEQ ID NO: 286415 - DNA, 1000 bp, Homo Sapiens
atttgacagatcaaagaagtatcccttgctaattcaagtgtatggtggtccctgcagtcagagtgtaaggtctgtatttgctgttaattggatatcttatcttgcaagtaaggaagggatggtcattgccttggtggatggtcgaggaacagctttccaaggtgacaaactcctctatgcagtgtatcgaaagctgggtgtttatgaagttgaagaccagattacagctgtcagaaaattcatagaaatgggtttcattgatgaaaaaagaatagccatatggggctggtcctatggaggatacgtttcatcactggcccttgcatctggaactggtcttttcaaatgtggtatagcagtggctccagtctccagctgggaatattacgcgtctgtctacacagagagattcatgggtctcccaacaaaggatgataatcttgagcactataagaattcaactgtgatggcaagagcagaatatttcagaaatgtagactatcttctcatccacggaacagcagatgataatgtgcactttcaaaactcagcacagattgctaaagctctggttaatgcacaagtggatttccaggcaatgtggtactctgaccagaaccacggcttatccggcctgtccacgaaccacttatacacccacatgacccacttcctaaagcagtgtttctctttgtcagactaaaaacgatgcagatgcaagcctgtatcagaatctgaaaaccttatataaacccctcagacagtttgcttattttattttttatgttgtaaaatgctagtataaacaaacaaattaatgttgttctaaaggctgttaaaaaaaagatgaggactcagaagttcaagctaaatattgtttacattttctggtactctgtgaaagaagagaaaagggagtcatgcattttgctttggacacagtgttttatcacctgttcatttgaagaaaaataataaagtcagaagttcaaaaaaaaaa

SEQ ID NO: 286416 - DNA, 1000 bp, Homo Sapiens
gtgaccctgatgatggatgccaccaatatgccagctgtcaaagccatcatatatcagtatatggaagagatttatcatagaatccccgactcagacccatcttctagcaaaacaaggcagatcatctccaccatccggacgcagaatcttcccaactgtcagctgatttcccgaagccactactcccccatctacctgtcgtttgtcatgcttttggctgccctgagctggcagtacctgaccactctctcccaggtaacagaagactatgttcagactggagaacactgatcccaaatttgtccatagctgaagtccaccataaagtggatttactttttttctttaaggatggatgttgtgttctctttatttttttcctactactttaatccctaaaagaacgctgtgtggctgggacctttaggaaagtgaaatgcaggtgagaagaacctaaacatgaaaggaaagggtgcctcatcccagcaacctgtccttgtgggtgatgatcactgtgctgcttgtggctcatggcagagcattcagtgccacggtttaggtgaagtcgctgcatatgtgactgtcatgagatcctacttagtatgatcctggctagaatgataattaaaagtatttaatttgaagcaccatttgaatgttcgtaatagtagaaaatgatgtgaattttctttctgttcggctcctatttttctcatcattttgttttctttaattgggttgaatggagtagatagaaatatttatggtttaggtaacagttagatgtttcctaagaatgcaaactgccttttccacacaaaggctgggaataaaattctgggtattctcgtattctcatttaaaggagtttagctttcagagagaaacagcaggattgcttttgaccttttagaagattggtctccagtaaaggtggacatttttgagatttttataataaagaatttaattgctctgcatttgtcaagtaaaaaaaaaa

SEQ ID NO: 286417 - DNA, 1000 bp, Homo Sapiens
tgtatatctacggagcccctcaggatgtgaaagcccagcgcagcctgcccctcattggcttcgaggtgggaccgcccgaggcaggggagcggcctgacagaaggcatgtcttcaagatcacccagagccacctcagctggtacttcagccctgagacagaggaactacagcgacgctggatggctgtgcttggccgggcgggccgaggggacacgttctgcccggggcccacactgtctgaggacagggagatggaggaggcaccggtggctgctttaggagccactgctgaaccccccgaatccccccagacccgagacaagacctagagggtttgggacaaactgggagcccccaccccacactctagttgcccatgtctgattgggggctctagccccttccctcccagctcagtcaatacttgaactcccatcacgggcactttcaatcccgaatgctgggtcttgggttttttaattcatcttttcacaaaacgtgggcttttaaaaaatatattcctacagtgatgtcaatttttattaatccctgtccccagggagggtgggagccgttgccagtcctacctgaattaggtcgtttttctccctcatccctcaataccctaccacagatcctgcctccacccagttccccacaaagcaccagaggtaggagacctggattcaagtgccagctctgccactgaccctggggccccgacccagccctgcctcctcagccagtgtcttcacacgtacaactccacgtggggtggcaactagacctctcctgcctctcccatggcttacagcttctacccggccccaaggctacccagtattttatcgtccagacccatggcagggccagcgggcaggacagggaaacaggggggaggacaatggatactcagttttttgtgtttttttgtgtgtttttttttttttaagaaaaatacagtttatttcaggcttacagtaaaaaaaaaaaaaaaaaa

SEQ ID NO: 286418 - DNA, 1000 bp, Homo Sapiens; identical to SEQ ID NO: 118360

SEQ ID NO: 286419 - DNA, 1000 bp, Homo Sapiens
actgaagatcacagactggatgccagatgatatgaacttcagtgatgtaaagcaaatccatcaaacagacactggcagtactttagacacaacaggagcaggatgtgcagtggcgactgaatctatgacattcactctgataagtgtggtgatgttacttcccgggatttggtaactgaactcttctgtcctgacataccttactgaagtctcgatttcttctctctctgcatatgcctggaataagagatcctttttcaatgtaacaattatatttatgaaaagatatgttacactaacttctcagaagccaagctgaaatattcataaagtccctaaaactcaacgtttaaatgacacactttaaaaatatgtcttttttcaatctaactgaaaaccttcttaacttctaatatattaaatctgaagatgtgaagggcacagaagtgactttgaataagaagaatttagtgtatctgtaattttattatcaattccaagccccttcctttctaaattaaaaatgttttcatttgaaagtgtatttgccagacaatgaaaacagtatgcagtatttcttaaagtattgaaattagaatatcatgaaataaatcaaaacatacaatggcaagtagtatgcatgcatattcaagagactcttccatttttgcaagctgtagaaggaaatgtctgaatgtctataagttatggggtagattcttgagaagcatttcatataatttcactgaagaaccttgataattttgacccactgtaacttagccactgatgaaccttaaagctgagtattttattaacacctgatttgtattccattatattcaaaatgcatctttggtattgtgcctctgctcccatctctctctttgcctcatagatttagctatgttgggaagcacatgcttgctctaggaatatctccaataaagctgttaactatttggtggaaaaaaaaaaaaaaaaaaaaaaaaaaaaaaaa

SEQ ID NO: 286420 - DNA, 1000 bp, Homo Sapiens
agtccagttccttgataaaggagatgagaatactgtcattgatcttggaagcaagaggcagtatgcagattgttcagagattttcaatgatgggtataagctcagtggattttacaaaatcaaacctctccagagcccagcagaattttctgtttattgtgacatgtccgatggaggaggatggactgtaattcagagacgatctgatggcagtgaaaactttaacagaggatggaaagactatgaaaatggctttggaaattttgtccaaaaacatggtgaatattggctgggcaataaaaatcttcacttcttgaccactcaagaagactacactttaaaaatcgaccttgcagattttgaaaaaaatagccgttatgcacaatataagaatttcaaagttggagatgaaaagaatttctacgagttgaatattggggaatattctggaacagctggagattcccttgcggggaattttcatcctgaggtgcagtggtgggctagtcaccaaagaatgaaattcagcacgtgggacagagatcatgacaactatgaagggaactgcgcagaagaagatcagtctggctggtggtttaacaggtgtcactctgcaaacctgaatggtgtatactacagcggcccctacacggctaaaacagacaatgggattgtctggtacacctggcatgggtggtggtattctctgaaatctgtggttatgaaaattaggccaaatgattttattccaaatgtaatttaattgctgctgttgggctttcgtttctgcaattcagctttgtttaaagtgatttgaaaaatactcattctgaacatatccatgcgcaatcatgataactgttgtgagtagtgcttttcattcttctcacttgcctttgttacttaatgtgctttcagtacagcagatatgcaatattcaccaaataaatgtagactgtgttaaaaaaaaaaaaaaaaaaaaaaaaaaaaaaaaaaaaaa

SEQ ID NO: 286421 - DNA, 808 bp, Homo Sapiens
gccggaagtgacgcagggcagcggcgtcgcgggggcggggctcgggaaagacccgtgccagcgggcgtgtggccgcgggtttcgcacggtccaataagggagggcggcgtggcccggcctggtagcgacgaggacgcgcctgcgcagaggcggcagcaccaccggggttgactccgggggcgcggcgaggagagacatgaggctgagctggttccgggtcctgacagtactgtccatctgcctgagcgccgtggccacggccacgggggccgagggcaaaaggaagctgcagatcggggtcaagaagcgggtggaccactgtcccatcaaatcgcgcaaaggggatgtcctgcacatgcactacacggggaagctggaagatgggacagagtttgacagcagcctgccccagaaccagccctttgtcttctcccttggcacaggccaggtcatcaagggctgggaccaggggctgctggggatgtgtgagggggaaaagcgcaagctggtgatcccatccgagctagggtatggagagcggggagctcccccaaagattccaggcggtgcaaccctggtgttcgaggtggagctgctcaaaatagagcgacgaactgagctgtaaccagactggggaggggcagggggagaggcccccatcagggaccagactgttccaaaaaaaaaacaaaaaacaaaaacaaacaaaaaaacacttaaaagcccaaggagtaagcctgtgtgtttgtgggccctgagagactcagagacctcagctccagcataccccaccaccttctcctttccc

SEQ ID NO: 286422 - DNA, 1000 bp, Homo Sapiens
tcagggccccatcatcttggatgctgccctgcgtatttggcagcaatggtgggccacccagggcctctgagtagccacccaaagcctagccgctgttctagggaacggaaaagagttcatggccaagcgtctaacctaaagtcccaggattggctccaggcagcaattatatcataacttattgaacttttgagcaggacgtgctggtaatttcatggctgttactgcccagtcataaatctgcttttccattataaggcagagagaagtacattcgttcatttgtccactgtttcttgtcatcacgcagccctggacccaaagggtgaactaaagtttaaggagatgagaggattcaaggagcccgttggtgacgcctttcagtagctggggagggctcttccatccccagcaccccctgctacacctcagcagcctcccccatgcaaaaaggaaagagaaaaattaagttagggcagtcagtaaagtgagctttagaaagaaactggaattttaacttcattttgtatcttgcttaagtagcaggctcactaaaattagagaaagtccaataactctccccctttcccttgagaaatctttaagtttcgattctggagcaaaaactttcagcattaaatatttcagaggctccattcacagctttcagataaactggagtgttcagatggactgttttaataaaaatctttgagcaagtgagttatggcaagagaaactcagcctctttctgtataaacttaacagggaagggctggggtgtgaaaaagaagattgtatgaaaaccattggtaatttttattttttatttttgggactgcactatcctgttcacgaagacatgtgaacttggttcagtccaaatggggatttgtataaaccagtgctctccattagaaatatggtgcaagccacatatgtaattttaaatattctagtagccacattaataaagtaaaaagaaacaaaaaaaaaaaaa

SEQ ID NO: 286423 - DNA, 1000 bp, Homo Sapiens; identical to SEQ ID NO: 116205

SEQ ID NO: 286424 - DNA, 1000 bp, Homo Sapiens; identical to SEQ ID NO: 116207

SEQ ID NO: 286425 - DNA, 1000 bp, Homo Sapiens; identical to SEQ ID NO: 116208

SEQ ID NO: 286426 - DNA, 1000 bp, Homo Sapiens; identical to SEQ ID NO: 116209

SEQ ID NO: 286427 - DNA, 1000 bp, Homo Sapiens; identical to SEQ ID NO: 221505

SEQ ID NO: 286428 - DNA, 1000 bp, Homo Sapiens
cagtggctcacgcctgtaatcccagcacttttgggaggctgaggttgggagttcaagaccagcctggtcaacatggtgaaactgtgtctctactaaaaatacaaaaattagccaggcatggtggcacgtgcctgtaatcccagctactcgggaggctgaggcaggagaatcgcttgaacctgggaggtggaggttgcagtgggctgagatcacgccattgcactccagcctgggcgacagagtgagactctgtctcaaaaaaaaaaaaaattatgaaaaaagttatgggattaaagaaagtcaggataaaaattttaaaaagcaggccactgtcagcaaagcctggagaagtggggccggaggctccgcccccatcatgtgcctgccaccccttcccagtcatccctttactcttacagtagcaaataagacccctgtctaatggggggagacaaatgtgtagacccttagccaccttggccagggctgactccttaaatttctggatgatgatgattgttatttaatagccagaggctcatataattggcctctttggaagaggcctcatggcctccttactctcaccaaagcaatttttccctcaggggggctcccatcttcttacacagagaggcagctgaggcaggacagtggggctaactgtagaccaggcgagggcacgggctgctggggtggccctgcttccccagtgtacatattgtatctgtgtaacattttgtatattccaggggtagggccgccccctgtatcatacctagcagaggttggagctggcacatggggaggaggttctaataattatttggggctgggaaacttatttattgatagcataggacagaggaaggaggcggggatggggtcgtggcgccctggtgatgcgactcctgtttattttgctttttatttcggaataaatggatttagccataaaaaaaaaaaaaaaaaaaaaaaaaaaaaaaaaaaaaaaaaaaaa

SEQ ID NO: 286429 - DNA, 1000 bp, Homo Sapiens; identical to SEQ ID NO: 116210

SEQ ID NO: 286430 - DNA, 1000 bp, Homo Sapiens
atttatgtgtcactggcaggcaaaaaaaaacatggagcaccgactaactatggattctgctttaagcctaacaaagcgggagggccccgagacctgaaaatgctctgtgcagaagaagagcagagtaggacgtgctgggtgaccgcgattagattgcttaagtatggcatgcagctgtaccagaattatatgcatccatatcaaggtagaagtggctgcagttcacagagcatatcacctatgagaagtatatcagagaattccctggtagcaatggacttctcaggccagaaaagcagagttatagaaaatcccactgaagccctttcagttgcggttgaagaaggactcgcttggaggaaaaaaggatgtttacgcctgggcactcacggtagccccactgcctcttcacagagctctgccacaaacatggctatccaccggtcccagccatggtttcaccacaaaatttctagagatgaggctcagcgattgattattcagcaaggacttgtggatggagttttcttggtacgggatagtcagagtaaccccaaaactttcgtactgtcaatgagtcatggacaaaaaataaagcactttcaaattataccagtagaagatgacggtgaaatgttccacacactggatgatggccacacaagatttacagatctaatacagctggtggagttctatcaactcaataagggcgttcttccttgcaagttgaaacattattgtgctaggattgctctctagacaagccagaagtgacttattaaactattgaaggaaaaggactcaagaaaaataataaaagaccataaataagggcgaaaacattaccatgtgaaaagaatgtatttcacctgcaagttacaaaaaaatagtttgtgcattgcaaataagcaaagacttggattgactttacattcatcatttaaaattcattagttaaaattaaaccttaggaaaaaaatgaaaaaaaaaaaaaaaa

SEQ ID NO: 286431 - DNA, 1000 bp, Homo Sapiens; identical to SEQ ID NO: 116211

SEQ ID NO: 286432 - DNA, 1000 bp, Homo Sapiens
tttgtgctttttccccctccttacctgaccccctacgagtttacaggtctgtggcaatactcttaaccataagaattgaaatggtgaagaaacaagtatacactagaggctcttaaaagtattgaaagacaatactgctgttatatagcaagacataaacagattataaacatcagagccatttgcttctcagtttacatttctgatacatgcagatagcagatgtctttaaatgaaatacatgtatattgtgtatggacttaattatgcacatgctcagatgtgtagacatcctccgtatatttacataacatatagaggtaatagataggtgatatacatgatacattctcaagagttgcttgaccgaaagttacaaggaccccaacccctttgtcctctctacccacagatggccctgggaatcaattcctcaggaattgccctcaagaactctgcttcttgctttgcagagtgccatggtcatgtcattctgaggtcacataacacataaaattagtttctatgagtgtataccatttaaagaatttttttttcagtaaaagggaatattacaatgttggaggagagataagttatagggagctggatttcaaaacgtggtccaagattcaaaaatcctattgatagtggccattttaatcattgccatcgtgtgcttgtttcatccagtgttatgcactttccacagttggacatggtgttagtatagccagacgggtttcattattatttctctttgctttctcaatgttaatttattgcatggtttattctttttctttacagctgaaattgctttaaatgatggttaaaattacaaattaaattgttaatttttatcaatgtgattgtaattaaaaatattttgatttaaataacaaaaataataccagattttaagccgtggaaaatgttcttgatcatttgcagttaaggactttaaataaatcaaatgttaacaaaaaaaaaaaaaaaa

SEQ ID NO: 286433 - DNA, 1000 bp, Homo Sapiens
ctatgaagaaggacccggtgaagaaaatcttcgttgggggtctgaatcctgaagccactgaggaaaagatcagggagtactttggcgagtttggggagattgaggccattgaattgccaatggatccaaagttgaacaaaagacgaggttttgtgtttatcacctttaaagaagaagaacccgtgaagaaggttctggagaaaaagttccatactgtcagtggaagcaagtgtgagatcaaggtggcccagcccaaagaagtctatcagcagcagcagtatggctctgggggccgtggaaaccgcaaccgagggaaccgaggcagcggaggtggtggtggaggtggaggtcagggtagtacaaactacggcaagagccagcgacgtggtggccatcagaataactacaagccatactgaggcggcagcaggagcgaccaactgatcgcacacatgctttgtttggatatggagtgaacacaattatgtaccaaatttaacttggcaaactttctattgcctgtcccatgtgcatcttatttaaaatttcccccatggaaatcactctcctgttgactatttccagagctctaggtgtttaggcagcgtgtggtgtctgagaggccatagcgccatcatgggctgatttttattaccaggtcccccagaagcaggtgggaggctctgcttcctgctgccgctctgcagcctggacctgtggaccctggttgtaaagagtaaattgtatcttaggaaaccagtgtcacctttttttcaccttttaattttatattatttgcgtcatacatttcctgtaacggaagtgttaattttactgtactttttggtaccttttgggaatctaatgtattgtaaggtattttacacgtgtcctgattttgccacaacctggatattgaagctatccaagcttttgaaataaaatttaaaaacccccaagcctgggtgagtgtgggataaaaaaaaaaaaaaaaaaaaaa

SEQ ID NO: 286434 - DNA, 1000 bp, Homo Sapiens; identical to SEQ ID NO: 116212

SEQ ID NO: 286435 - DNA, 1000 bp, Homo Sapiens; identical to SEQ ID NO: 116214

SEQ ID NO: 286436 - DNA, 1000 bp, Homo Sapiens
ggtggttttaggaagtcaactttagttttgctttgtttgcatgtccactggtttttttattttgatatttgtctttttttaaattttacagtagtcattgaaagttatgtttctttgcttacttcattttttccctctaattatttaagattggaacaaaagtataaatattatttatttgaggtagaatttttttcatgtagtttcttaatatatacttgaaggaaatgtttcaccttatttttggtctttgtttattcatttagaccctgcaagttgattctcattgccagattccattaccctttcttcctcataggtagtaattaccaatgtaactaagcatttgtgttctgatatctgaggccagtaactattaatatctagttctcagagcatttggaaaggttatcttaaatggctacctaaattgaaatccttttcagaaaaaatataattgcaagtaggtaggagtggcctaaattgtctaatgtaataaagtcagacaaaatgcacactttatagtttcaagattttcagtaaataaaatctgtccattcctacctggacatgtcccattaaaaagtggaagattttaaataatttctttacagatgttttatttaaacaggtagcacaatctactaatgttgtgtgatttgtgttatactggttgtaattaatttttttaattcatgaactagcggaaaatttattaaattaactattaactacattcaccttgtaaattactgtataaaacttgttgacaatgcactgactttagaaagatgttaatgtacataaatagagtgtaaataaaatagtgttgatgtactgaaatatgaactgtatcaaaagtattggtaattgtatatggggtgtacctgtttatctgttaactattatccaaacaaattaaatactgtggttgcctctatgtgctgtttttcctcatacaagtaaacacagaaagtcaaaaaaaaaaaaaaaaaaaaaa

SEQ ID NO: 286437 - DNA, 1000 bp, Homo Sapiens; identical to SEQ ID NO: 116215

SEQ ID NO: 286438 - DNA, 1000 bp, Homo Sapiens
gattcatatgctacacaacttgaagctattcttgagcaaaaaatagacattttaactgaactgcgggataaagtgaaatctttccgtgcagctctacaagaggaggaacaagccagcaagcaaatcaacccgaagagaccccgtgccctttaaaccggcatttgctgctaaaggatacccagaaccctcactactgtaacatacaacggttcagctgtaagggccatttgaaagtttggaattttaagtgtctgtggaaaatgttttgtccttcacctgaattacatttcaattttgtgaaacactcttttgtctacaaaatgcttctagtccaggaggcacaaccaagaactgggattaatgaagcattttgtttcatttacacaaatagtgatttacttttggagatccttgtcagttttattttctatttgatgaagtaagactgtggactcaatccagagccagatagtaggggaagccacagcatttccttttaactcagttcaatttttgtagtgagactgagcagttttaaatcctttgcgtgcatgcatacctcatcagtgattgtacataccttgcccactcctagagacagctgtgctcacttttcctgctttgtgccttgattaaggctactgaccctaaatttctgaagcacagccaagaaaaattacattccttgtcattgtaaattacctttgtgtgtacatttttactgtatttgagacattttttgtgtgtgactagttaattttgcaggatgtgccatatcattgaacggaactaaagtctgtgacagtggatatagctgctggaccattccatcttatatgtaaagaaatctggaattattattttaaaaccatataacatgtgattataatttttcttagcattttctttgtaaagaactacaatataaactagttggtgtataataaaaagtaatgaaattctgaagaaaaaaaaaaaaaaaaaaaaaaaaaaaaaaaaa

SEQ ID NO: 286439 - DNA, 1000 bp, Homo Sapiens; identical to SEQ ID NO: 221512

SEQ ID NO: 286440 - DNA, 1000 bp, Homo Sapiens
agaactgtactcttctcagcttgagcttaacataggtaaatatcaccaacatctgtccttagaaaggaccatctcatgttttttttcttgctatgacttgtgtattttcttgcatcctccctagacttccctatttcgctttctcctcggctcactttctccctttttatttttcaccaaaccatttgtagagctacaaaacctatcctttcttattttcagtagtcagaattttatctagaaatcttttaacacctttttagtggttatttctaaaatcactgtcaacaataaatctaaccctagttgtatccctcctttaagtatttaaaacttgttgccccaaatgtgaaagcatttaattcctttaagaggcctaactcattcaccctgacagagttcacaaaaagcccactttagagtatacattgctattatgggagaccacccagacatctgactaatggctctgtgccacactccaagacctgtgccttttagagaagctcacaatgatttaaggactgtttgaaacttccaattatgtctataatttatattcttttgtttacatgatgaaactttttgttgttgcttgtttgtatataatacaatgtgtacatgtatctttttctcgattcaaatcttaacccttaggactctggtatttttgatctggcaaccatatttctggaagttgagatgtttcagcttgaagaaccaaaacagaaggaatatgtacaaagaataaattttctgctcacgatgagtttagtgtgtaaagtttagagacatctgactttgatagctaaattaaaccaaaccctattgaagaattgaatatatgctacttcaagaaactaaattgatctcgtagaattatcttaataaaataatggctataatttctctgcaaaatcagatgtcagcataagcgatggataatacctaataaactgccctcagtaaatccatggttaataaatgtggtttctacatt

SEQ ID NO: 286441 - DNA, 1000 bp, Homo Sapiens; identical to SEQ ID NO: 221513

SEQ ID NO: 286442 - DNA, 1000 bp, Homo Sapiens
ggagagcttcatagacacacagaagttcagcgtcatgcgcagcatgcgcaagacttttgcccgctacctttcattccggcgtgacaacaatgagctgttgctcttcatactgaagcagttagtggcagagcaggtgacatatcagcgcaaccgctttggggcccagcaggacactattgaggtccctgagaaggacttggtggataaggctcgtcagatcaacatccacaacctctctgcattttatgacagtgagctcttcaggatgaacaagttcagccacgacctgaaaaggaaaatgatcctgcagcagttctgaggccctatgccatccataaggattccttgggattctggtttggggtggtcagtgccctctgtgctttatggacacaaaaccagagcacttgatgaactcggggtactagggtcagggcttatagcaggatgtctggctgcacctggcatgactgtttgtttctccaagcctgctttgtgcttctcacctttgggtgggatgccttgccagtgtgtcttacttggttgctgaacatcttgccacctccgagtgctttgtctccactcagtaccttggatcagagctgctgagttcaggatgcctgcgtgtggtttaggtgttagccttcttacatggatgtcaggagagctgctgccctcttggcgtgagttgcgtattcaggctgcttttgctgcctttggccagagagctggttgaagatgtttgtaatcgttttcagtctcctgcaggtttctgtgcccctgtggtggaagagggcacgacagtgccagcgcagcgttctgggctcctcagtcgcaggggtgggatgtgagtcatgcggattatccactcgccacagttatcagctgccattgctccctgtctgtttccccactctcttatttgtgcattcggtttggtttctgtagttttaatttttaataaagttgaataaaatataaaaaaaaaaaaaaaaaaaaa

SEQ ID NO: 286443 - DNA, 688 bp, Homo Sapiens
agccccgccccaggcgagggcgccgcacccacaccgcgctgcgcagttttgttctgctccagctgttcgaaggtgatccagacgcaagatggctgtcctctctaaggaatatggttttgtgcttctaactggtgctgccagctttataatggtggcccacctagccatcaatgtttccaaggcccgcaagaagtacaaagtggagtatcctatcatgtacagcacggaccctgaaaatgggcacatcttcaactgcattcagcgagcccaccagaacacgttggaagtgtatcctcccttcttattttttctagctgttggaggtgtttaccacccgcgtatagcttctggcctgggcttggcctggattgttggacgagttctttatgcttatggctattacacgggagaacccagcaagcgtagtcgaggagccctggggtccatcgccctcctgggcttggtgggcacaactgtgtgctctgctttccagcatcttggttgggttaaaagtggcttgggcagtggacccaaatgctgccattaaagaattataggggtttaaaaactctcattcattttaaatgacttacctttatttccagttacattttttttctaaatataataaaaacttacctggcatcagcctcatacctaaaaaaaaaaaaaaaaaaaaaaaaaaaaa

SEQ ID NO: 286444 - DNA, 1000 bp, Homo Sapiens
cccgtggatgctctttcaatgcagcacccttgccatcccaagcccagtgaccttactcgtataccgtgccactttccaccaactttttccaagtcctttaactcgttgcagtctgtattttccaccttttgtttttccagttccaggacacagattatcaactggggggaccaaatagccaccttgattttcttctttgtggtctttttcctgaaagttggggcccagtccttggctgtatccatgtaatgatcttggaccatggtagaaaatgcaccaaataggatcatatgaattgctgtctagccttagtcaataaacttgtaggacttttaaacaaaagtgtacctgtaaatgtcctgaatccagcattgttgagctgtcatcaacattcttgtgtctgttttactgttacaatattaggtgaatatggaagtaaaggcattccacaggatcatcatttaaaaaaaaagaattctggtcctgttttctaaaaaaaaaaaactgttgtagaaattcttaatttggatctatttattagtcagagtttcagctttcttcagctgccagtgtgttactcatctttatcctaaaaatctggaatcagagatttttgtttgttcacatatgattctcttagacacttttatatttgaaaaaattaaaatctttctttggggaaaaattcttggttattctgccataacagattatgtattaacttgtagattcagtggttcaatacctgtttagttgcttgctaatatttccagaaggatttcttgtattggtgaaagacggttggggatggggggatttttttgttcttgttgtacccttgttttgaaactagaaatctgtcctgtggcatgcaaaagaaagcaaattatttttaaaagaaaaaaaccaaagtacttttggtgtcattattccatcttctccataagtggagaaatgaaaagtaagaacagctcatcttcaaagtttttactagaaattc

SEQ ID NO: 286445 - DNA, 1000 bp, Homo Sapiens
cgcaaagtgggcgagcagctcaaccttgtcgtccccttccagggaaagccccggccccaggtggtgtggaccaagggcggggccccgctggacacctcccgcgtgcacgtgcggaccagcgacttcgacaccgtgttcttcgtgcgccaggcggcccgctccgactccggggagtacgagctgagcgtgcagatcgagaacatgaaggacaccgccaccatccgcatccgcgttgtggaaaaggctgggccccccataaacgtgatggtgaaggaggtgtggggcacgaacgcgctggtggagtggcaggcccccaaagatgatgggaacagtgagatcatggggtatttcgtccagaaagcagacaaaaaaaccatggagtggttcaacgtctatgaacgtaacaggcacactagctgtactgtgtccgaccttatcgtgggcaatgaatactatttccgagtttacaccgagaacatctgtgggctcagtgactcacctggtgtctccaagaacacggcccgcatcctcaagacaggaatcaccttcaaaccgttcgagtataaggagcatgacttccggatggctcccaagttcctgacacctctcatagaccgcgtggtcgtggctgggtactcggcagccctcaactgtgctgtcagaggccacccgaagccgaaggtggtctggatgaagaacaagatggaaatccgtgaagatcccaagttcctgataaccaattaccaaggagtcctgacgctgaacatccgtcgcccctcgcccttcgacgctgggacttacacctgccgggccgtcaacgagctgggcgaggcgctggctgagtgcaagctggaggtccgagtgccgcagtgagacctgtcccctacctgccaagacaattggtggtggagtcctgaccccaatccccaacctcccaggactgtgttctttctggagttttcgctgagaacaaaacagtgttgtctggaaaaaaaaaaaa

SEQ ID NO: 286446 - DNA, 1000 bp, Homo Sapiens
gagcttgacctctgcatccatggtgacggaggtggcaatgacatcatcaaggtcagagggtaaattcctaacaggagaccacaaaggtttcacttcttttagatccatccaatatgcgaaaaaagggtacattttaatttaatgtgttaaaaacacaatgtccctaccgtgtaaatagaatccaagtcaattgtgactgcaattccaagttagtatttaaaaatagagaaattgcacttcctggaaaaaattaaaaagtagttagtttaattattctgtaaattatttaattttgtcaagatgtaagtatttatattcacagcctcttatgttaacgtttgctatttatttaacatttttatttattaattttatactatttcaactagaccccacaccagggcaccctaagaggggaaaaaagtgaattcaaagcaaaaataactatttgactataatataggccacaaaaaatcttgatataactcctagttataattttgatgcaaccaagttattttttatatattttgttatttattcttttaataatggaatttttttaaaaagtattttgtaactgaggaattttgataatttggggattttgttttcccttggtctaatggagagaaagacattttggttttctttttccattttgggttccttttgtttcaggcacggataacagcaaatggaattctgtatttattattatttaagtgtagcgcagatgtgtgtgcttgggcgtgtttctcgtgtcgcgtttgcgtgtcggctcttgcggtggagtcctgttgctgtgagggagtgctggccgcaggcagcctcgagtcaccgccaggctcacaggctgtgccacccgtccctccgacagctccaatactgtgaccctccttcctcaggaagcgcgttgaacccacagcactccgtggtgtgtttgcagggtgatttcctaataaaagtccactctgactgtgaaaaaaaaaaaaaaaaa

SEQ ID NO: 286447 - DNA, 1000 bp, Homo Sapiens; identical to SEQ ID NO: 116217

SEQ ID NO: 286448 - DNA, 1000 bp, Homo Sapiens; identical to SEQ ID NO: 116218

SEQ ID NO: 286449 - DNA, 1000 bp, Homo Sapiens
cctggatgaggactttgaaattgggcagattttacatgataatgtcatcctgaaatcaatctattactatactggagaagtcaatggtacctactatcaatttggcaaacattatggaaacaagaaatacagaaaataagtcaatctgaaagatttttcaagaatcttaaaatctcaagaagtgaagcagattcatacagccttgaaaaaagtaaaaccctgacctgtaacctgaacactattattccttatagtcaagtttttgtggtttcttggtagtctatattttaaaaatagtcctaaaaagtgtctaagtgccagtttattctatctaggctgttgtagtataatattcttcaaaatatgtaagctgttgtcaattatctaaagcatgttagtttggtgctacacagtgttgatttttgtgatgtcctttggtcatgtttctgttagactgtagctgtgaaactgtcagaattgttaactgaaacaaatatttgcttgaaaaaaaaagttcatgaagtaccaatgcaagtgttttatttttttcttttttccagcccataagactaagggtttaaatctgcttgcactagctgtgccttcattagtttgctatagaaatccagtacttatagtaaataaaacagtgtattttgaagtttgactgcttgaaaaagattagcatacatctaatgtgaaaagaccacatttgattcaactgagaccttgtgtatgtgacatatagtggcctataaatttaatcataatgatgttattgtttaccactgaggtgttaatataacatagtatttttgaaaaagtttcttcatcttatattgtgtaattgtaaactaaagataccgtgttttctttgtattgtgttctaccttccctttcactgaaaatgatcacttcatttgatactgtttttcatgttcttgtattgcaacctaaaataaataaatattaaagtgtgttatactataaaaaaaaaaaa

SEQ ID NO: 286450 - DNA, 1000 bp, Homo Sapiens
ccataaccattttctccagaagcgtggaggaaagattatgaaaggaacaggctctttaaaaaagaaaacaaaaagccagaatcttccttttttttgtttcattggggtttctctttctgtttttctttctactaccataaaaactatctcaaatcacctgaacatcaagtgatattaaggttgtcatcttaagaaaaaatatccatttttttcttaagttcgggaaacaaagttcggggaaaatacctggcatgaaactgtagttagggatacatttcagcattttactcactttatccaagttattcattttattcaagttatatgtatgtataattcaacaattttagattatggtgtaagatactccagtaacttatctttctgtccttttaagtgtacctggaattctttgatttattttattgcatcaatgaattaaaacaaaaatcttgggggaagaaattggcaatatcgtataaaaatctgctcatattagaacacagtataattcagcagtaaacactagaatcaaatgaatagccttttgtatcagttattaatcttttctaactctgcttagctgctaataatcctgaggcatagaaattgaagaatttgtaaaaatagaattgccttaaaggatttgaagtaagaacataattttggggagagttttttagtgattcacagtatccctcttagcattaatttaaggtaaagaggcagattgattttccctctttcctggtaattcctaagtaattaagaataaataagttccaaaagaaattgtagctggaatcttaataacaattgtgagtggctgtttgagttgcccccaccatgtccttagatctaatctgtgctaccttattaactcacagcaggcttactgaatggcttcatttcagatttagttgatttctccaccaaatgcatgtcatgtattctcaataggctgtattcccagcagtcaataaatgaacacccgtaaaaa

SEQ ID NO: 286451 - DNA, 1000 bp, Homo Sapiens; identical to SEQ ID NO: 221516

SEQ ID NO: 286452 - DNA, 1000 bp, Homo Sapiens
tagaaatggaacaaaaacggaatgaccaagatcaggagactattacaggtttacgtgtctggcgtactaatcctggttcggtttttgactatgatccagcagaagacaacatccagtcccgaagcttacacatgattaatgtccaagctcagcgccggagccgggagcagtcacgatctgccagtgcactaagcgtcagtgggggtgaggagaagtctgagcattcagaagcaccagaccaccacctttcgacttacagcgacgggggtgtctttgcagtctcaacagcttacaaacatgcaaaaaccacagagctcccacaacaacgatcatcttcagttgctacccaacagacaacggtatcttccatcccatctcatccatctactgctggaaaaatcttccgtgccatgtatgactatatggctgctgatgcagatgaggtgtccttcaaggatggagatgccatcataaatgttcaagcaattgatgaaggctggatgtatggcactgtgcagaggactggcaggaccggaatgctcccagccaactacgttgaagctatttaggcatttcaaagcatcacacttgtctgcaggacttacagatcctgcagtcaatgtttcggtttagactctccactgttacctaagttctcaagctgcctatggtttttctgtgtcaatgtgatttatggtagtaccatcctttctcctttgggttttaaaataagttgcagaacagacactttaaaagcttctgcaatattatttctgtgcctagagtctttctccattataaacatgttttaacattatttcttttctaaaacagggattttgaatatgccaaacacattaaaggaaaaatagcagagatgttcaccttttccttgctgattgctaatgcttattatttctaattcagttctgaagttataaacttataatcaatacaaaccagcaactaataaaacctctaattctgcaaaaaaaaaaaa

SEQ ID NO: 286453 - DNA, 1000 bp, Homo Sapiens; identical to SEQ ID NO: 116219

SEQ ID NO: 286454 - DNA, 509 bp, Homo Sapiens
cgccggggaagcgaagtaggcaggggcgaggcggctggggaccgcggggcggacgggagcgagtatgtccgctctgactcggctggcgtctttcgctcgcgttggaggccgccttttcagaagcggctgcgcacggactgctggagatggtggagtccgtcatgccggtggtggtgtgcacattgagccccggtatagacagttcccccagctgaccagatcccaggtgttccagagcgagttcttcagcggactcatgtggttctggattctctggcgcttttggcatgactcagaagaggtgctgggtcactttccgtatcctgatccttcccagtggacagatgaagaattaggtatccctcctgatgatgaagactgaaggtgtagactcagcctcactctgtacaagagccaggtgagaatttcaaggattatcgacttcatattgcacattaaagttacaaattaaagtggcttggtcaagaatgagaaaaaaaaaaaaaaaa

SEQ ID NO: 286455 - DNA, 1000 bp, Homo Sapiens; identical to SEQ ID NO: 116221

SEQ ID NO: 286456 - DNA, 1000 bp, Homo Sapiens; identical to SEQ ID NO: 116222

SEQ ID NO: 286457 - DNA, 899 bp, Homo Sapiens; identical to SEQ ID NO: 116223

SEQ ID NO: 286458 - DNA, 750 bp, Homo Sapiens
gggtcaaaggccagcggcgcaaaatggcggcggcgatgaccttctgccggctgctgaaccggtgtggcgaggcggcgcggagcctgcccctgggcgccaggtgtttcggggtgcgggtctcgccgaccggggagaaggtcacgcacactggccaggtttatgatgataaagactacaggagaattcggtttgtaggtcgtcagaaagaggtgaatgaaaactttgccattgatttgatagcagagcagcccgtgagcgaggtggagactcgggtgatagcgtgcgatggcggcgggggagctcttggccacccaaaagtgtatataaacttggacaaagaaacaaaaaccggcacatgcggttactgtgggctccagttcagacagcaccaccactagagcgtgtggcacgccgggggtcccgcagcatcctgtgagcatttccgcggggaagctgagcacgtgaagctcgctggttctgtgcgaagggtattcctggtgctgaataaagggtgttgctgtcaaggctgacaatttatatctgtgtgaggctggattttctttgcctactccaaccaaagcgacacatcacagcagactggatgcagaagcgtgcgtgggaatgcagctgttttccatggaaccagacgctacagagactgcaacgtgtaaaacactgccattcttttcattcctttgaataatttttttaaaatttgctatttaacacgtaatagttttttattttaaa

SEQ ID NO: 286459 - DNA, 1000 bp, Homo Sapiens; identical to SEQ ID NO: 116224

SEQ ID NO: 286460 - DNA, 1000 bp, Homo Sapiens
agccataactgctgcagtttgggcccaggctatgtgctcttctggtgccctagggactgctgtggccagagcctggggccagccagtacagtcctgagccgaggaggagggactgcaagtggaagagagccagtctggaaggaagagctttccaggtggacagggcttcttggaagacccccaaagccccaggtatcctgggtgaagcctgtttgcctctcttgaaaatggcaggtgctcttgttttacccatgttgggtcagcctgaaactgccaaccagtaggaagcatggactctcctgagtgagaagagactgaaataggagcaagcagaaccctgagaggtgtcccatcttattgctgttgaggaccctgaaacaccgttgtttaaagacttcacacagaaggctctgaactgagccactggggaagggaagtttcagtaacatgacactaaaatggcagagacgttaaaaaaagtttttcccttctagagctgttttgcgcgcatgcatgtctgtgtgcattggggctttttagacaggcctgccctgtgactttgtggtagaggcagagagaaggaaattgtcccctgagcacggtagggccttgctgggtggggtcagaggccagtagttccaggcctttctctgtgtccagcacagacccttgtccttgctgtggaaatgatgagggatggagggacaagaggaagaatgagaggacacacgccctggagccctcaccactgccctgggggttgccatctggaggagcctggggataagggtaacccagggaggctgggcacgagggagctgactccacgtttttccccccgttcctcaccttcgagggccctgctaggtcacccctatgctggcatgaagagcatggggcaataaaccagcacagtctctgaccacttggagcgtctcatccagtgagagagacagccgttaaaagcataaacatccaaataaagatgcctttccaagtt

SEQ ID NO: 286461 - DNA, 1000 bp, Homo Sapiens; identical to SEQ ID NO: 116225

SEQ ID NO: 286462 - DNA, 1000 bp, Homo Sapiens
tgtgactcctggcacggaggccaaccccttccttgttcaatggttccttgagggaccattcccatgtgattatcgaccattcggcaggcgttcaaagtcaaaggccccacactgagtcctggcccagcgccctgtgcccgttggctgctggagggacagacggggcgtgcggctgaccatcccgtgcccgcaggctgaggatgcagcgctggaaggcggcggccttggcctcagtgctctgcagctccgtgctgtccatctggatgtgtcgagagggcctgcttctcagccaccgcctcggacctgcgctggtccccctgcaccgcctgcctcgaaccctggacgcccggattgcccgcctggcccagtaccgtgcactcctgcagggggccccggatgcgatggagctgcgcgagctgacgccctgggctgggcggcccccaggtccgcgccgtcgggcggggccccggcggcggcgcgcgcgtgcgcggttgggggcgcggccttgcgggctgcgcgagctggaggtgcgcgtgagcgagctgggcctgggctacgcgtccgacgagacggtgctgttccgctactgcgcaggcgcctgcgaggctgccgcgcgcgtctacgacctcgggctgcgacgactgcgccagcggcggcgcctgcggcgggagcgggtgcgcgcgcagccctgctgccgcccgacggcctacgaggacgaggtgtccttcctggacgcgcacagccgctaccacacggtgcacgagctgtcggcgcgcgagtgcgcctgcgtgtgaccctacctcactcggccggcgcggcggccactccccccgcctcgacggcaccactggccggccccgcgaaagactgcgcgtgcgtagagcacgccggcgcggccccgggactctcgcgataactgtactgagataaagtgtggcaactcgaaaaaaaaaaaaaaaaaaaaaaaaaaaaaaaaaaaaaagaaaaaaaaaaaaaaaaa

SEQ ID NO: 286463 - DNA, 1000 bp, Homo Sapiens
tatccacgtcgtaggggtcctccacgcaattaccagcaaaattaccagaatagtgagagtggggaaaagaacgagggatcggagagtgctcccgaaggccaggcccaacaacgccggccctaccgcaggcgaaggttcccaccttactacatgcggagaccctatgggcgtcgaccacagtattccaaccctcctgtgcagggagaagtgatggagggtgctgacaaccagggtgcaggagaacaaggtagaccagtgaggcagaatatgtatcggggatatagaccacgattccgcaggggccctcctcgccaaagacagcctagagaggacggcaatgaagaagataaagaaaatcaaggagatgagacccaaggtcagcagccacctcaacgtcggtaccgccgcaacttcaattaccgacgcagacgcccagaaaaccctaaaccacaagatggcaaagagacaaaagcagccgatccaccagctgagaattcgtccgctcccgaggctgagcagggcggggctgagtaaatgccggcttaccatctctaccatcatccggtttagtcatccaacaagaagaaatatgaaattccagcaataagaaatgaacaaaagattggagctgaagacctaaagtgcttgctttttgcccgttgaccagataaaataactatctgcattatctatgcagcatggggtttttattatttttacctaaagacgtctctttttggtaataacaaacgtgttttttaaaaaagcctggtttttctcaatacgcctttaaaggtttttaaattgtttcatatctggtcaagttgagatttttaagaacttcatttttaatttgtaataaaagtttacaacttgattttttcaaaaaagtcaacaaactgcaagcacctgttaataaaggtcttaaataataaaaaaaaaaaaaaaaaaaaaaaaaaaaaaaaaaaaaaaaaaaaaaaaaaaaaaaaaaaaccctgag

SEQ ID NO: 286464 - DNA, 1000 bp, Homo Sapiens
gtcacctttgagaagacaccatactcagcaatcacaagagcccgccggccagtgggcttgtttgcagactgggtgaggtggagccctgctcctctctgtcctctgacacagagagctgccctgcctaggagcacccaagccaggcagggggtctggcagcacggcgtcctggggagcaggacacatggtcatccccagggctgtatacattgattctggtggtagactggtagtgagcagcaaatgcctttcaagaaaataggtggcagcttcactccatgtcatatatggagtgaatatttcaaaacgttgggaataagggcctgcaaaaggcagcgaggaggcacctcgggtcttgaggttcctgacaaccgatctggtctgttggtttgaggatgaaggggctccatttctgctgcctccctgctgagaatattctccctttagcagccaaagattcgctggaacggaggctgccctctgctgcctgttggggtcggaagacaaggggcttctgaaatgggagttcctgagatacaacaaaatgtgtgccttcaaagaaactgacagctttgtatttggtgaaatggttttaattatactccatgtgtattttgcccactttttttgggaattcaagggaaagtgtttcttgggtttggaatgttcagaggaagcagtattgtacagaacacggtattgttatttttgttaagaatcatgtacagagcttaaatgtaatttatatgtttttaatatgccattttcattgaagtattttggtcttaagatgactttagtaatttaactgtttatgttacccacgttgggatccagttggtcttggtttgcttctctctgtaccacgtgcacatgaggtccattcattttacagcccctgttacacacagacccacaggcagccgtctgtgccccgcacacattgttggtcctatttgtaaatcccacacccggtgtatccaataaagtgaaacaaagc

SEQ ID NO: 286465 - DNA, 1000 bp, Homo Sapiens; identical to SEQ ID NO: 116226

SEQ ID NO: 286466 - DNA, 1000 bp, Homo Sapiens; identical to SEQ ID NO: 221519

SEQ ID NO: 286467 - DNA, 1000 bp, Homo Sapiens; identical to SEQ ID NO: 116228

SEQ ID NO: 286468 - DNA, 1000 bp, Homo Sapiens
ttgggcaacacagtgagacccccatctataaaaagagagcactgcctgaacctcggtggcactgggaagctctggcctgagagttaaacacccatgctgaatgatacagtgtgcattctctccagctgcaaactttcttcaactttcctaaattcttactaaattcagaggaataggataaagatcacttagagaaagggtgcttatggacatagcctgagtttcctttaacctctctgcaatgggtgcttttaactagcttctacatggcaagctgtttcagtttgcaaaatcactgcccagcatgtttgaggtcagttggcaccttaaaacacctgttctccagcccttggacagtggagagaatctgtaaaagtgtgaccccctctaagatttcgttttaaatgatcagattcggttccagttttattcttgttgagtttttccctatgaaggctccttttgaatgtgtcttgagacccaaattgagcatgttgctgttattcctgccctgcacctgtggagcaggagtggcagggctggctgtgctgggttccagctcgctcccaccgagggactagcttggcctttgcgctttgattccagatagtaagatgagtggaagtgtttatcgagcatgcaaaagaaaccctcacggctaagggctctgggagttgtgtctgtgtgacctgagagtgatccatctcctgcctgtgtgaggtagcagtgggcacttttcattgagacaaactccagggtgtccagagggggttctgccccttgtgaaggcccattcctggcacttagagacagaaagaactcagcaatctttcgttctagttatattcggtctttgaaactgacaatctttgaaatgtgaatactgtaacaatatgttttcttggattgttgtctttaaaaaggatttttgtgaagcaattgatttatcaaagcaaaaaaattaaaaatagaaacttgcaaaaaaaaaaaaaaaaaaaaa

SEQ ID NO: 286469 - DNA, 1000 bp, Homo Sapiens; identical to SEQ ID NO: 220705

SEQ ID NO: 286470 - DNA, 1000 bp, Homo Sapiens; identical to SEQ ID NO: 221523

SEQ ID NO: 286471 - DNA, 1000 bp, Homo Sapiens
ttaggagagcacacaggtgttcatacagtggcatttgggacacaatcgttggaacctgaagaatctgaagttttttttaccaccatctttttctactctgtatggaagtagatctttatggggaaaagagaatttggggtgttctgcaagccagtcaaagtggcacagcaaatcatataaatcgaattaaatggacaacaccgttagatgtgtatgtaaaaattttctgtttcatatttttcctttcactttcggtttaaaacatgctatatgtactgtatgtcctgtagcccagtgcggctccacagcatggaatctgatgtatgatatgatagaatgtggcactaaatgcagtttcagattttattttttttaatcatatgaactaaaattgtcaattgtgaggtgtgcttttctcatcatgttggttatattgcacaattggttatatttatgacctgatattcaaagactctggcattgatagccagtgtgttttcttatttaactccgtttactacattctacatggtgtttacgtgatccacacttgaaatactagatcagtagacattcactaatataccaaaataaaatgaaaaattgagtttttccgtgaactttatactgtccagctctgttgattttaaagcctcttcatccaggtcagttcaggaagtatatctggagtacctgctctgtttttggctgtgagactagcactaaggattctggtacctttacccaaacctactgggctactaatacttctctcagcagttgatcaaatacaatagaccatgtaagctggggccgctcatccacttccagtttgctggtctccctgctagaaaacacattgtactgtgctttttctggaattcagtataatggcatcactgcctgtttttcacatcttttgtttcctgttcattttaaggaaacctactaaatccagttaatattaaatggacaccactcaaaaaaaaaaaaaaaaaaa

SEQ ID NO: 286472 - DNA, 1000 bp, Homo Sapiens; identical to SEQ ID NO: 221524

SEQ ID NO: 286473 - DNA, 1000 bp, Homo Sapiens
gaggctgagcccagtacagtgcctgggactcccccacccaagaagttccgctcactgttcttcggctccatcctggcccctgtacgctccccccagggccccagccctgtgctggcggaagacagtgagggtgaaggctgaaccaagaacctgaagcctgtacccagaggccttggactagacgaagccccagccagtggcagaactgggtctctcagccctggggatcagaaaggtgggcttgctggagctgagctgtttcactgcctctcgcaggccccagctggctgtcactgtaaagctgtcccacagcggtcgggcctgggccgttatctccccacaacccccagccaatcaggactttccagacttggccctgaactactgacgttcctacctcttatttctcattgagcctcaggctatactccagctggccaaggctggaaacctgtctccctcaggctcaccttcctaaggaaaatgtcatagtaggtgctgctggcccctggtgatccagcttctctgccaatcatgacctgttccttcctgaagtcctgggcatgcatctgggacccccgtggagctgacaagttttccttgctttcctgatactctttggcgctgacttggaattctaagagccttggacccgagtgtgtggctagggttgccctggctggggcccggtgccgagactcccaagcggctctgtgcagaagagctgccaggcagtgtcttagatgtgagacggaggccatggcgagaatccagctttgacctttattcaagagaccagatgggttgccccaggatccggctgccagccctgaggccaagcacggctggagacccacgacctggcctgccgttgccctgagctgcagcctcggccccaggatcctgctcacagtcaccgcaggtgcaggcaggaagcagccctgggggactggacgctgctattgattcattaaaaaaagaaaagaaaaatacaaaaaaa

SEQ ID NO: 286474 - DNA, 1000 bp, Homo Sapiens; identical to SEQ ID NO: 221525

SEQ ID NO: 286475 - DNA, 1000 bp, Homo Sapiens; identical to SEQ ID NO: 116232

SEQ ID NO: 286476 - DNA, 1000 bp, Homo Sapiens
ccgtggggttcgagccccacttctggttgcatgttcccaccaccacgctctgctggttttagtcggctgactttctcaactgccccagcctctcctgctctctcagaacctccctctgcccccaccccccatctgtctcttcctcctaattaagggccactgcaaagagagacgggctggctaacccatgggatttagcttataagaacaaagcacaattattcaggactgaactgctttgaggtgccttggaactggctttggaaatagctatctgccccctagctatggactcttcacagttatttccagtttataaaaaggaaaagctgatcggatccatgtttctctctgcgagtctccttggggaggttgggctggtaaatatttgcaaggtcaggttaagcagacagacaattgaaaatactgggcaggtccaaaaggatagttccaggccataggaatggcttggtgcagttaacgggtgatgaagcaagaaatcttccttcctacttatgtcttaaagatggacagcctgtgtctcttgctgtgcctcttgctggcgtcttcctttattgaagcttgctgatgcactgtacatagtctctctctctaggtatagatatattatatatacaaatatcaaacatctcaccacacccaccccaaaagttacactgtgtgtgtgtggggaggtgtaataacttctcagtgttttgagttgattcaccaaaggcaaattttggaatgttcttgcgctttgtgcacttggaggggaaaacccaactacatatgcactttcttggttgtgtgtgctatagagaggttggaaggggtggttggaaggggagagaaactgagatggccctctgtgactcgactgctgggatgtatctgcttttgggagcagactgagtttcttttgcaatttgtcttattgtttgggtctactggcaacaataaactatctcccctgaaaatcaaaaaaaaaaaaaaaaaa

SEQ ID NO: 286477 - DNA, 1000 bp, Homo Sapiens
cttattaggctgaaactagccagtcacattgagagaagcagaacaatgatcaaaataaaggagaagtatttcgaatattttctcaatcttaggaggaaataccaaagttaagggacgtgggcagaggtacgctcttttatttttatatttatatttttatttttttgagatagggtcttactctgtcacccaggctggagtgcagtggtgtgatcttggctcacttgatcttggctcactgtaacctccacctcccaggctcaagtgatcctcccaccccagcctcctgagtagctgggactacaggcttgcgccaccacacctggctaatttttgtatttttggtagagacgggattctaccatgttgcccaggctggtctcaaactcgtgtgcccaagcaatccacctgcctcagccttccaaaagtgctgggattacaggcgtgagccaccacatccggccagtgcactcttaatacacagaaaaatatatttcacatccttctcctgctctctttcaattcctcacttcacaccagtacacaagccattctaaatacttagccagtttccagccttccagatgatctttgccctctgggtcttgacccattaagagccccatagaactcttgatttttcctgtccatctttatggatttttctggatctatattttcttcaattattctttcattttataatgcaactttttcataggaagtccggatgggaatattcacattaatcatttttgcagagactttgctagatcctctcatattttgtcttcctcagggtggcaggggtacagagagtgcctgattggaaaaaaaaaaaaaagagagagagagagaagaagaagaagaagagacacaaatctctacctcccatgttaagctttgcaggacagggaaagaaagggtatgagacacggctaggggtaaactcttagtccaaaacccaagcatgcaataaataaaactcccttatttgaca

SEQ ID NO: 286478 - DNA, 1000 bp, Homo Sapiens; identical to SEQ ID NO: 116235

SEQ ID NO: 286479 - DNA, 1000 bp, Homo Sapiens
tcaaggcctcggggaggagcaggaggtggaatccctgtgggaagtgctccctgggtgatgggtagagccctcgaaacttgacatggggccagaagggcctgggttgaagtagtaattgggcttccttggagctagtcagaggggtcacctaagctggtcctcacaggggcctttctcaccacctccctgctcctaacccctgccactttctgtttcattaaggcctctactctggctcaggacccagtccaggccttctacgggctaggcccagagacttgggttgctggtcccccttccctagtgggttttcccggggactctataggcagctgctcctgcccgcaaagcaagagcatcattcctattcttcagtggatgccagcttccctgccccaatcctccccagcatggtcatgttcgtggtgtcctggcagtgaagctccgtgagggggctggcccttagaggaactggggtgggaagtggggcaggcctcacccttgggctttgctgccctgttgggtcagctacccatagtccatttttttagggcagtgggaacctctgcctccacttcctgctttagccccttccctttgctgccaggtattggggtaatatttcctccttttccaagaccaaggccaagaggctgggccaggcttcagttcaggcctgttgcttaactggggtcaccctgggatctgctgctctgggtctaagtctaaacctttctgatccttgggtctgggttttttgaggaagggacatagtggcctctgggctgccatgtcaccacctgcaacattccccaaacagataagaacccatcatctcagggccactgctccattgctctgggggctgggattcctggctaagcaggggctgacagggtggcaggtgactttctagggatcagcacctgccctgtgttttgtaccttgaacctaagatatattaaacatctctcagatggaaaaaaaaaaaaaaaaaaaa

SEQ ID NO: 286480 - DNA, 1000 bp, Homo Sapiens
acgccatcttctcccagtttggccagatcctggatatcctggtatcacggagcctgaagatgaggggccaggcctttgtcatcttcaaggaggtcagcagcgccaccaacgccctgcgctccatgcagggtttccctttctatgacaaacctatgcgtatccagtatgccaagaccgactcagatatcattgccaagatgaaaggcaccttcgtggagcgggaccgcaagcgggagaagaggaagcccaagagccaggagaccccggccaccaagaaggctgtgcaaggcgggggagccacccccgtggtgggggctgtccaggggcctgtcccgggcatgccgccgatgactcaggcgccccgcattatgcaccacatgccgggccagccgccctacatgccgccccctggtatgatccccccgccaggccttgcacctggccagatcccaccaggggccatgcccccgcagcagcttatgccaggacagatgccccctgcccagcctctttctgagaatccaccgaatcacatcttgttcctcaccaacctgccagaggagaccaacgagctcatgctgtccatgcttttcaatcagttccctggcttcaaggaggtccgtctggtacccgggcggcatgacatcgccttcgtggagtttgacaatgaggtacaggcaggggcagctcgcgatgccctgcagggctttaagatcacgcagaacaacgccatgaagatctcctttgccaagaagtagcaccttttccccccatgcctgccccttcccctgttctggggccacccctttcccccttggctcagccccctgaaggtaagtccccccttgggggccttcttggagccgtgtgtgagtgagtggtcgccacacagcattgtacccagagtctgtccccagacattgcacctggcgctgttaggccggaattaaagtggctttttgaggtttggtttttcacaaaaaaaaaaaaaaaaaaaaaa

SEQ ID NO: 286481 - DNA, 1000 bp, Homo Sapiens; identical to SEQ ID NO: 221526

SEQ ID NO: 286482 - DNA, 1000 bp, Homo Sapiens
ctgctggaacacagcctgcggcggcgcaccacgcagagcaccaagcacggagaggtggatgcctggcccggccagcgagagcgggccaccgccatcctgctggcctgccgccacctgcccctctccttcctctcctccccgggccagcgggcagtgctgctggccgaagctgcccgcaccctggagaaggtgggcgaccggcgctcctgcaacgactgccagcagatgattgttaagctgggtggtggcactgccattgccgcctcctgaccaccaggctcagcccacccctccacctctctctcgatttctctctctccccctcagcatcttcccgctgagagtggtggggaagagccttgtcttcttagctgtcacctgccgaggcttctgggccactcaggccagtgcacccctgggcagagccccttaaagctgctgtcactagatgcccatggtccagggcctggtgggcgtgagaggataggtggcagggcagaaactgggcagccctgacttgatagcagcagggggagctcccaagctgccaagcccctgcctccagccttcctgagtttctctctcctgaaccctactctctcctttttgcttcctcagtttttatcaggctttctctgggggacagcagtctctgagcaccagggagcagttgccctcaggcctgtgcccagcatgccctcccctttttatacgaatgttttctaccagtgtgcttgggtttgccatgatgcgaggctgagttgctgtagcgtcttgattctctccctgggtctgcgttccctcccctgggcctgactgagcctgctcattgtttttccctttattacacaggacagccaggggaggaggggggcccagccctgggaggctggtgggaggcagggggcaggcctgcggatgcatgaaataatgttggcattattttttaattttttaaaaaataaatggtatcttatttaaaaaaaaaaaaaaaaaaaaa

SEQ ID NO: 286483 - DNA, 1000 bp, Homo Sapiens; identical to SEQ ID NO: 116236

SEQ ID NO: 286484 - DNA, 1000 bp, Homo Sapiens
ggagttggagaaacagcaggtcaccatcctggccacgccccttcccgaggagagcatgaagcaggagctgcagaacctgcgcgatgagatcaaacagctggggagggagatccgcctgcagctgaaggccatagagccccagaaggaggaagctgatgagaactataactccgtcaacacaagaatgagaaaaacccagcatggggtcctgtcccagcaattcgtggagctcatcaacaagtgcaattcaatgcagtccgaataccgggagaagaacgtggagcggattcggaggcagctgaagatcaccaatgctgggatggtgtctgatgaggagttggagcagatgctggacagtgggcaaagcgaggtgtttgtgtccaatatcctgaaggacacgcaggtgactcgacaggccttaaatgagatctcggcccggcacagtgagatccagcagcttgaacgcagtattcgtgagctgcacgacatattcacttttctggctaccgaagtggagatgcagggggagatgatcaatcggattgagaagaacatcctgagctcagcggactacgtggaacgtgggcaggagcacgtcaagacggccctggagaaccagaagaaggcgaggaagaagaaagtcttgattgccatctgtgtgtccatcaccgtcgtcctcctagcagtcatcattggcgtcacagtggttggataatgtcgcacattgttggcactaggagcaccaggaacccagggcctggccttctctcccagcagcctggggggcagggcagagcctccagtcggaccccttcctcacactggcccctatgcagaagggcagacagttcttctggggttggcagctgctcattcatgatggcctcctccttcaggcctcaatgcctgggggaggcctgcactgtcctgattggccgggacacacggttttgtaaaaaattaaaaaacaaaaaaagagcataaaaaaaaaaaaaaaaaa

SEQ ID NO: 286485 - DNA, 1000 bp, Homo Sapiens
caactgaagattgcagccaatccctttgccaaaggcttccgggagaacggcagaaactgtaagagggagcgagacgcccgtgtgaagaggaaactgcggggcccagagccagcagccacagaggcctatgggagcggagacacaccaggtggtccctgcgactccaccctgggtggagacattcgtgaatcagatccagaacaggccccagcccccggggaagccaccgctgccccggcacctctgtgtggtggccccagtgctgaggcctacctcctgcaccctgcggctttccatggggcccccagtcaccttcccaccaggagccccagcttcccggaggctccagactccgggcgctcagccccctactcggctgcatttctggagctgccgcacgggtcagggggctccgggtacccagcggctccaccggcggtaccctttgccccgcactttctccaagggggccccttccctctaccatacaccgcgcctgggggctatctggatgtgggctccaaacccatgtactgaaccactgctgggcccctctgcctccatcacaaacctcccgctcccttcccccagccctggagccccctcacctccaccggccccatcccccacaccaaatggccgccttgggcctgcccacccaccccctcaacttcacaccttgatttcactcccacccccctctggcttcaaagcctaaccaaggctgctgggagtccagctggggccggcttccccttcccggctctcacctccgtgtgaatggaaggggctctgctggccaaatggggccacagaccagcatccccacttaccaggcctccccatgggctctggaggggctcaatccccacccccccacacacactggtgcaggccacaccagtctgttgttctgggaccagagtatttttgttaataaaactcaaaagccatccatgctcaggaaacattgggctcctgtgtttggccctgggcgggg

SEQ ID NO: 286486 - DNA, 1000 bp, Homo Sapiens; identical to SEQ ID NO: 221527

SEQ ID NO: 286487 - DNA, 1000 bp, Homo Sapiens; identical to SEQ ID NO: 116239

SEQ ID NO: 286488 - DNA, 1000 bp, Homo Sapiens
agaagtctttcaagaatgacggaataagagacctgttttaaaaaggaactgcagcaatctttgaaagacttccaaagaatgttagagcacagtacataatacacttgccctgctccctctaccccttaccccacaacgtgcaactgacactcccacccagtctctgctccacctttcagcccacgtcacgtgtagtgtccattttgtgaagccctgttgtgccacagagtgtagccaggtccccctgcagctagtcctagtgaacctcaccccgaggccctgcatgggccagcccctccatctgtacttggtccaactgcaactcatcatcggtgactggttatcacaccatcgctggcccctttgggccctgcatgtagtgtgggaggctcctgttagctcctcactgtggtaaatgccacacacctttaagtagataagcagacgatagttatctgttcttttgacttaatctcatttggtttgattttccctctactaaggctttcctaccttcttcaggctgcctaagacatgtaacgaaacacttcaataattgtccatgaggagaaaaaaagcatgtgtcatgcatgaaggaaactgaacttgaggtggcctccttgcttgttacatacctgggtatgtgtaggcagtttagtgcatctttgcctctcagttgaaacctgtataaccctgttacaaagctgtgttgttgcttcttgtgaaggccatgatattttgtttttccccaattaattgctattgtgttattttactacttctctctgtattttttcttgcattgacattatagacattgaggacctcatccaaacaatttaaaaatgagtgtgaagggggaacaagtcaaaatatttttaaaagatcttcaaaaataatgcctctgtctagcatgccaacaagaatgcattgatattgtgaacatttgtgatatatgtattaataaatagagcaattacaagcaaaaaaaaaaaaaaaa

SEQ ID NO: 286489 - DNA, 1000 bp, Homo Sapiens
attcctaatccttttccgaaatggcaggtgtgagtgcctgtataaaatattctatgtttaccttcaacttcttgttctggctatgtggtatcttgatcctagcattagcaatatgggtacgagtaagcaatgactctcaagcaatttttggttctgaagatgtaggctctagctcctacgttgctgtggacatattgattgctgtaggtgccatcatcatgattctgggcttcctgggatgctgcggtgctataaaagaaagtcgctgcatgcttctgttgtttttcataggcttgcttctgatcctgctcctgcaggtggcgacaggtatcctaggagctgttttcaaatctaagtctgatcgcattgtgaatgaaactctctatgaaaacacaaagcttttgagcgccacaggggaaagtgaaaaacaattccaggaagccataattgtgtttcaagaagagtttaaatgctgcggtttggtcaatggagctgctgattggggaaataattttcaacactatcctgaattatgtgcctgtctagataagcagagaccatgccaaagctataatggaaaacaagtttacaaagagacctgtatttctttcataaaagacttcttggcaaaaaatttgattatagttattggaatatcatttggactggcagttattgagatactgggtttggtgttttctatggtcctgtattgccagatcgggaacaaatgaatctgtggatgcatcaacctatcgtcagtcaaacccctttaaaatgttgctttggctttgtaaatttaaatatgtaagtgctatataagtcaggagcagctgtctttttaaaatgtctcggctagctagaccacagatatcttctagacatattgaacacatttaagatttgagggatataagggaaaatgatatgaatgtgtatttttactcaaaataaaagtaactgtttacgttaaaaaaaaaaaaaaaaaaaaaaaaaaaaa

SEQ ID NO: 286490 - DNA, 1000 bp, Homo Sapiens; identical to SEQ ID NO: 221529

SEQ ID NO: 286491 - DNA, 1000 bp, Homo Sapiens; identical to SEQ ID NO: 221530

SEQ ID NO: 286492 - DNA, 1000 bp, Homo Sapiens; identical to SEQ ID NO: 116240

SEQ ID NO: 286493 - DNA, 1000 bp, Homo Sapiens; identical to SEQ ID NO: 116241

SEQ ID NO: 286494 - DNA, 1000 bp, Homo Sapiens
ctctcttctgatgaagaggaggggaccagctctcaagcagaagcggccaggatactggctgcctcctggcctcaaaaccgagaagatgaagaaaagcagaagctgaagggtgggcccaagaagaccaaaagggaaaagaaagcagcagcttcccacctgttcccatttgagaagctgtgagctgagcgcccactagaggggcacccaccagttgctgctgccccactacaggccccacacctgccctgggcatgcccagcccctggtggtgggggcttctctgctgagaaggcaaactgaggcagcatgcacggaggcggggtcaggggagacgaggccaagctgaggaggtgctgcaggtcccgtctggctccagcccttgtcagattcacccagggtgaagccttcaaagctttttgctaccaaagcccactcaccctttgagctacagaacactttgctaggagatactcttctgcctcctagacctgttctttccatctttagaaacatcagtttttgtatggaagccaccgggagatttctggatggtggtgcatccgtgaatgcgctgatcgtttcttccagttagagtcttcatctgtccgacaagttcactcgcctcggttgcggacctaggaccatttctctgcaggccacttaccttcccctgagtcaggcttactaatgctgccctcactgcctctttgcagtaggggagagagcagagaagtacaggtcatctgctgggatctagttttccaagtaacattttgtggtgacagaagcctaaaaaaagctaaaatcaggaaagaaaaggaaaaatacgaattgaaaattaaggaaatgttagtaaaatagatcagtgttaaactagattgtattcattactagataaaatgtataaagctctctgtactaaggagaaatgacttttataacattttgagaaaataataaagcatttatctaaaaaaaaaaaaaaaaaaaaaaaaaaaaa

SEQ ID NO: 286495 - DNA, 1000 bp, Homo Sapiens
ctcccctccagggccctgtatgcctgaggtgtttttggaggcagcggtagcactgatccaggcaggcagagcccaagatgccttgactctatgtgaggagttgctcagccgcacatcatctctgctacccaagatgtcccggctgtgggaagatgccagaaaaggaaccaaggaactgccatactgcccactctgggtctctgccacccacctgcttcagggccaggcctgggttcaactgggtgcccaaaaagtggcaattagtgaatttagcaggtgcctcgagctgctcttccgggccacacctgaggaaaaagaacaaggggcagctttcaactgtgagcagggatgtaagtcagatgcggcactgcagcagcttcgggcagccgccctaattagtcgtggactggaatgggtagccagcggccaggataccaaagccttacaggacttcctcctcagtgtgcagatgtgcccaggtaatcgagacacttactttcacctgcttcagactctgaagaggctagatcggagggatgaggccactgcactctggtggaggctggaggcccaaactaaggggtcacatgaagatgctctgtggtctctccccctgtacctagaaagctatttgagctggatccgtccctctgatcgtgacgccttccttgaagaatttcggacatctctgccaaagtcttgtgacctgtagctgccacgttttgaagagcttgagctgggtccccagtgggctgtctctctgtggggagggctttctgcttcaccatcattaggaatgtgaccattcctatataattcctggactggtgagattggtggtaggcctgtgaaatttgccctagttactaccattctcgttttggaggaaacaatctctgccaccaccaagtcattgactttgctcgaggcaccttttttcctgtttctccttttctgttgtcgagtaaaatttcatatttataaaaaaaaaaaaaaaaaa

SEQ ID NO: 286496 - DNA, 1000 bp, Homo Sapiens
agcagcacctttagctaggttggcccgagtgaggcctctgtgctgtcctgccctggtgcatggccttagctttctaggccactgggagttgtggctgggcttcccatcttccacagagacatctccctgtgggatgggcagatgggcctggccttgagaaaggcattggccattggttgccatggtgaccagggaccacgttgctgcctgtgaatgctgagtgagcgagtaagggaggaggggcgattgagggttcacctctgccttggggaggctgatttctcacacactggctggccctctcattctcactcctccttgggccctgaggctgctggatccggtctgcctgcctccctgtgcagtccagccctgccttgctgcagccccagcccagatggcactcagcgctctcccctgagggagtccctgggcctagccatcccctcactattcccgacccaaagggtgacttttcatctgaacttaaggtgggagatatttttaacttttttccactttggaaaatgtcactgtgacaaaagccagcatactttccctgcacccatctgctcaccagatctcaggcaggaaagcccctctctgttgaagtcaggggctatcttttggtatacttgtgtgaaagtggctggttgggagcagagctaagtggcttcccattaacctgaggtctctttctttactctgggtcagacctgaggttggggaaggcgactgagccatgctcagaatgtctggtcctggcttgggcctgagtagggcagagagggcctttcatggctgatcagagcttaccagccccaccccaccatggtagccttagggtgctgagtgcctgatactgcctgacaagtgcctgacacgcagcctagttccttcctggcccctctctcactggctgggaaaccctagaccatgtcagataggacaacactgctgggttttacatccagatagtaataaacaccatttcatcatt

SEQ ID NO: 286497 - DNA, 1000 bp, Homo Sapiens
tgtgtctaattatctgattttttttattggtcttgtggtctttttaccccccctttcccctccctccttgaaggctaccccttgggaaggctggtgccccatgccccattacaggctcacacccagtctgatcaggctgagttttgtatgtatctatctgttaatgcttgttacttttaactaatcagatctttttacagtatccatttattatgtaatgcttcttagaaaagaatcttatagtacatgttaatatatgcaaccaattaaaatgtataaattagtgtaagaaattcttggattatgtgtttaagtcctgtaatgcaggcctgtaaggtggagggttgaaccctgtttggattgcagagtgttactcagaattgggaaatccagctagcggcagtattctgtacagtagacacaagaattatgtacgccttttatcaaagacttaagagccaaaaagcttttcatctctccagggggaaaactgtctagttcccttctgtgtctaaattttccaaaacgttgatttgcataatacagtggtatgtgcaatggataaattgccgttatttcaaaaattaaaattctcattttctttcttttttttcccccctgctccacacttcaaaactcccgttagatcagcattctactacaagagtgaaaggaaaaccctaacagatctgtcctagtgattttacctttgttctagaaggcgctcctttcagggttgtggtattcttaggttagcggagctttttcctcttttccccacccatctccccaatattgcccattattaattaacctctttctttggttggaaccctggcagttctgctcccttcctaggatctgcccctgcattgtagcttgcttaacggagcacttctcctttttccaaaggtctacattctagggtgtgggctgagttcttctgtaaagagatgaacgcaatgccaataaaattgaacaagaacaatgataaaaaaaa

SEQ ID NO: 286498 - DNA, 1000 bp, Homo Sapiens
cggcccagcccctccctcagcactgctctctggggtagctctcaagggccagtttctggatttctccacaatgcaagctacagagctggggaagttgccggctggaggagttctctaccctccaccttccttcctctactctccggctttctgccccagtcctttgcctgacacatcgttgcttcaggtacgccaggatctgccatccccttcggatttttattctactcctctgcagcctggtggccaaagtggctttctcccttcaggggctcctgcccagcagatgcttctacccatggtagactcacagctgcctgtggtgaactttggctccctgccgccagcaccacctcctgccccacctcccctttctctgttacctgtgggccctgctctgcagccccccagcctggctgtgcggcccccacctgctcctgctactcgggtgctgccttcacctgccaggcccttccccgctagcttggggcgagcagagctgcatccagtggaactaaagccgttccaggattatcaaaaactgagcagcaaccttgggggacctggatcatcacggactcccccaactggaaggtccttctctggcctcaattcccgtctcaaggccacgccttccacctacagtggagtcttccgcacccagcgcgtcgacctttaccagcaggcctccccaccagatgccctgcgctggatacctaagccttgggagcggacagggctgccacctcgagaagggccctcccgacgggcagaggagcctgggtcccgaggggacaaggagcctgggttgcccccaccccgctgagggagttcctcttgccccctacccccggggcttgtatatagattataaatatataagggggaaaggggtgggcggggaggggttgtggggctggggcctcacttcccctcctcccccttcccctggtcccctgtccctggggctgtttgttaaaaaagagtaataaaaggattt

SEQ ID NO: 286499 - DNA, 1000 bp, Homo Sapiens
aggccgtatcctagccctggctcgaaataagagcctcaacctcaaacacattaaacactttattttggatgaatgtgataagatgcttgaacagctcgacatgcgtcgggatgtccaggaaatttttcgcatgaccccccacgagaagcaggtcatgatgttcagtgctaccttgagcaaagagatccgtccagtctgccgcaagttcatgcaagatccaatggagatcttcgtggatgatgagacgaagttgacgctgcatgggttgcagcagtactacgtgaaactgaaggacaacgagaagaaccggaagctctttgaccttctggatgtccttgagttcaaccaggtggtgatctttgtgaagtctgtgcagcggtgcattgccttggcccagctactagtggagcagaacttcccagccattgccatccaccgtgggatgccccaggaggagaggctttctcggtatcagcagtttaaagattttcaacgacgaattcttgtggctaccaacctatttggccgaggcatggacatcgagcgggtgaacattgcttttaattatgacatgcctgaggattctgacacctacctgcatcgggtggccagagcaggccggtttggcaccaagggcttggctatcacatttgtgtccgatgagaatgatgccaagatcctcaatgatgtgcaggatcgctttgaggtcaatattagtgagctgcctgatgagatagacatctcctcctacattgaacagacacggtagaagactcgcccattttggaatgtgaccgtctgtccttcaggagaggacaccagggtgggggtgaaggagacactactgcccccacccctgacagcccccaccccatggcttccatcttttgcatcaccaccactcctgaacccccatttctgatttgtcagaatttttttttaacaaaactaaaaatgaaacacatgtgtctgtggtatctataaaaaaaaaaaaaaaaaa

SEQ ID NO: 286500 - DNA, 1000 bp, Homo Sapiens
tcccgctctcgattctacagtggttttaacagcaggccccggggtcgcgtctacaggggccgggctagagcgacatcatggtattccccttactaaaaaaagtgtgtattaggaggagagagaggaaaaaaagaggaaagaaggaaaaaaaaaagaattaaaaaaaaaaaaaagaaaaacagaagatgaccttgatggaaaaaaaatattttttaaaaaaaagatatactgtggaaggggggagaatcccataactaactgctgaggagggacctgctttggggagtaggggaaggcccagggagtggggcagggggctgcttattcactctggggattcgccatggacacgtctcaactgcgcaagctgcttgcccatgtttccctgcccccttcacccccttgggcctgctcaagggtaggtgggcgtgggtggtaggagggttttttttacccagggctctggaaggacaccaaactgttctgcttgttaccttccctcccgtcttctcctcgcctttcacagtcccctcctgcctgctcctgtccagccaggtctaccacccaccccacccctctttctccggctccctgcccctccagattgcctggtgatctattttgtttccttttgtgtttctttttctgttttgagtgtctttctttgcaggtttctgtagccggaagatctccgttccgctcccagcggctccagtgtaaattccccttccccctggggaaatgcactaccttgttttggggggtttaggggtgtttttgtttttcagttgttttgtttttttgttttttttttttcctttgccttttttcccttttatttggagggaatgggaggaagtgggaacagggaggtgggaggtggattttgtttatttttttagctcatttccaggggtgggaatttttttttaatatgtgtcatgaataaagttgtttttgaaaataaaaaaaaaaaaaaaaaaaaaaaaaaaaaaaaaaa

SEQ ID NO: 286501 - DNA, 1000 bp, Homo Sapiens
tggagtacgctgtgacacaggagagcaagatcactgtattttggaaagagttgattgacccaagactgattattgaatctccaagtaacacatcaagtacagaacctgcctgagtatgacctctccaccttatagtttatgaatgtcttgtttgtgaaagtgactataacccaaacttttttttttttttaaagaggatttggaagttgtatggatttttttgttatcttcactttactgcataggaaacaatctacctcatcatttaaaatgacatgggtgtcggttttgtagatctttggtttttttgtcaggtttaatttcagttaacaaaatgtaaaacatgacattccctgcagatattgttgtataccagtatggtttcttctctttctttaaatgtttttggccatcaagtagcagtcgtcagtaggagtttataataccaagaatgtgctgcgtatcttgtctcaataagttttaagtaacatttaaaaatattaaagcatgttatttgacctaattttttagcatttgagttgttccattaaatggagcatcttgtaaatttcaagtattttatacttgcaattgttaagagttaacaggtagttggatttgtcgcagacaatgagttaaggaatcctttcacgtttttcccaactttaaaattaaggattctcaggtccctgtgtagagcagtgaaaataagatgtgcgtatgtgtgtgtatgcctggagaattggtgtttcacttcagtgagaggattggctgtgagcttcagaccaggaaatgtgtcatcttgccaggcacctggctgagtgtgctggagtgaggatcttgaacagaaacttccttttctgttattattcactacgaagctaaaatggccaaatatataccgtgaaaattggtttcatttaacaaaagatcagatccctccttcagctgtacacatttttaaataaaatcatattgaactaaaaaaaaaaaaaaaaaa

SEQ ID NO: 286502 - DNA, 1000 bp, Homo Sapiens
ggcatctcagagaagacagaggcagggtcggaagaggaccgagtcaggaacgaatatgaggagagccagtggacaggagagcgggacactcagagctccacggtcagcacaacagaggcagagccgtattaccgctccctgagggacttcagcccccagctgcccccgacgcaggaggaggtgtcttattcccgaggtttcacaggtgaagatgaggatatggccttccctgggcacttgtatgatgaggtagaaagaacgtaccccccgtctggagcctggggacccctctacgatgaagtgcagatgggaccctgggacctccactggcctgaagacacatatcaggatccaagaggaatctatgaccaggtggccggagacttggacactctggaacccgattctctgcccttcgagctgaggggacatctggtgtaagagccctctcaaccccattgtcctgcacctgcaggaatttacactccactggtctctctcattacagcctgggccgagctggttaggtgagctccataaaacccaaagggacttggtgtcaggagaggacatggagggggctgagtgacagagatggttcagctggtaccagagtagaaacaaggtgcatcctggggttggctttagaaactaaacttctccaaaaggacagggcagattgtaaacgtcgtctcaaaaatgaaatgctgccgggtgcggtgactcacgcctataatcccagcactttgggaggctgaggcgggtggatcacctgaggtcaggagttcgagaccagcctggccaacatggtaaaactccatttctactaaaaatataaaaaattagccaggagtagtggcgcatgcctgtagtcccagctacttgggaggctgatgcatgagaattgcttgaacccaggaggcggaggttgcagtgagctgagatcacgccactgcactccagcctgggcgacagagcgagattctgtctcaaaaaataa

SEQ ID NO: 286503 - DNA, 1000 bp, Homo Sapiens
ggaccgcagaggccatcaaggccctgggtgccaagcactgcgtgaaggaagtggtcgaagctcacgtggaccagaaaaacaaggtggtcacgaccccagccttcatgtgcgagacggcactccactacatccatgatgggatcggagccatggtgaggaaggtgctggaactcactggaaagtgacgcgcatggacggggcccagctaggcgccaggacttggcctcaccctctggctgaggagctgtcggctgctttccatccagctgggagtctggcaggcccttttttttttttctttgccgaaacctgcaggcgttctctctctaaggaggatgtgctgcagtgcatgggggatgtttcttcctgggtgtggctgggctgctctcacatacagaggccgaggggccaattcgttctctgccacagggacttgcctcactgtgtcccaaaaacaaatcgcagccagcttttccagaaatagaaaattctgccgtctgaggttttatacttcaggttagttagtttttggaaggaagaacatttttaggtttgcaagcctcctgatcaggaaaccagaaataccacatttatggaccatgaaaggttggttcttgactctgaagggacttttgagttaatcagcgtaaggggatttctaaagcaggcaatccctgtagccgcagagaataaacgccttcccaaaatggcaacttcccacagccacatttcagacctgctgagactgctgagtgaggaatggcagtgaggtttcttcaattagtctcagttctcttaattttcaggaagaaagggaaattgcagctcctcagcccccaggattgacctctggggagtgatggtagcgttggtgccaggccgtgggttcaggtgtggcagaagcttgcagatgcgtccgaagggaaataaagtgtgttggcgttagaaaaaaaaaaaaaaaaaaaaaaaaaaaaaaaaaaaaaaaaaaaaaaaaaaaaaa

SEQ ID NO: 286504 - DNA, 1000 bp, Homo Sapiens; identical to SEQ ID NO: 116242

SEQ ID NO: 286505 - DNA, 1000 bp, Homo Sapiens; identical to SEQ ID NO: 116244

SEQ ID NO: 286506 - DNA, 1000 bp, Homo Sapiens; identical to SEQ ID NO: 221532

SEQ ID NO: 286507 - DNA, 1000 bp, Homo Sapiens
tttgtcagtttacaccaatagtttcttgttaatccttctttcctggatatataaggctggtggtaacttttgaattatatggttgatgtggaaaattggcagtgtaacatttctagatacttttcattacctttttattctggtatataggctaaccactttaaagctattcttatgctgtaacagttagcatggcttcacactgtttgtgtagccaagaggacagaattacatgaatgacagtgcccagagtgacagctgtatattgctcagagcttttatttcttatacctagaataaatataaaatgggggaaaaatgtgacagacaagcagtttttcattgcacacatattcttcacatttaatgtttgatagttcaatttcttgagctgaagaatatcaaagtatcgataatacgaattttaaaatattaaaaccaatacacaaaattttcctatgtcagaatgtggtggagcataatagattgtatttggtgtgcttgcgattttttttttccatagaatttattaagtgaagtttctaaaactttgcttctcctgatcccggtgaagtgtacatcataagaatccatagtactttgaagtaccattgcaccaagatgtctgactgaattcatagtcacacttttatttgaaagaaagaattgttgtagttttttttcattattctaaaactcttgttgttagatacaagatttaattaagatctaagctcctgcttatttaatgtaattctaaggtaccattttagaaaaaacatttgttttaagattccaagaaacctgtgagttaatactatatttaaaagagaattggtaaattttgaatgtgtgtaatattttggaacctgtttaaaaaccaaatatacctgcaaatagatacagcctatcctatactatttaaatgtttggctgttttgttttatagaaattattttgctgaattcacaaataaaatttaagaagactttaaaaaaaa

SEQ ID NO: 286508 - DNA, 1000 bp, Homo Sapiens; identical to SEQ ID NO: 116245

SEQ ID NO: 286509 - DNA, 1000 bp, Homo Sapiens; identical to SEQ ID NO: 116246

SEQ ID NO: 286510 - DNA, 1000 bp, Homo Sapiens; identical to SEQ ID NO: 221534

SEQ ID NO: 286511 - DNA, 1000 bp, Homo Sapiens; identical to SEQ ID NO: 116248

SEQ ID NO: 286512 - DNA, 1000 bp, Homo Sapiens
cttagtaaacacaaaagattgttacggtttcattagtagtatggttgtggggccataagttaaacagtgctgcctggtaggctgggaactgaagagacttgtggtattccatctcgggtgcctctgttggcaatgatcaggcagcccaaaagatttaaatgatctataataatttccaagcggtagattatgtggcattttattgctcaggcaataattggtttaatgctggtagtgtcaaattttgaagtgttaattttgtcttagaaccttccagtaagtgaaatacaacctagttttatcaccatatccaccagcaggcatggataattattttaacaatgctaatatttgagttttgcagtatattatagaatatagtccagttaaatctttggtttcagtatgtctgaagagtacagtgagaggttaatttctgctcaagtggtaccacttaaaggcatgtattcttttagtatgtaaaatgaaatagtaccttgagtttaaatagaatgcatttaggcattgtagagatctgaaatagttttcttccactacattgttgaaatcaatgaagcaattagtttctcattcagaaatgtgcacactaatatttagttttgctttctcgtggataatattaagcacttactctgcagtttcctggaagttgtgtcaactgcagtgatactattcaggatggtgggaaatccccaaaaatatgtatgtgtgggcttgcttagattactatatttcatagttaatcttttgtctcttgcggtgctcatgatgtgtggggcacacggaaggcattgctgtagtcagtcattttggttttcttctatagccattttattattttagtgtattagttatgaagataatattatctatttgtaaattgctactttgtattttatgcatgctctgtaatttgatttttttttagttattgatttggattatattcacattctaataaacagttatagggggatta

SEQ ID NO: 286513 - DNA, 1000 bp, Homo Sapiens
gcgacattgacagtggtccagccgctcaccctggacagagatgttgcaagagcaattgaattactggaaaaactacaggaatctggagaagtaccagtgcacaagctacaatccctcaaaaaagtgcttcagagtgagttttgtacagctattcgagaggtgtatcaatatatgcatgaaacgataactgttaatggctgtcccgaattccgtgcgagggcaacagcaaaggcaacagttgcagcttttgcagctagtgaaggccactcccaccctcgagtagttgaactgccaaagactgatgaaggccttggttttaatgtgatgggaggaaaggagcaaaattcccccatttatatctctcgcataattcctggaggggtggctgaaagacacggaggcctcaaaagaggagaccagctgctatcagtgaacggagtgagtgtggaaggagaacaccatgagaaagctgtggaactactcaaggctgctaaagacagcgtcaagctggtggtgcgatacaccccaaaagttctggaagaaatggaggctcgctttgaaaagctacgaacagccaggcgtcggcagcagcagcaattgctaattcagcagcagcaacagcagcagcagcaacaaacacaacaaaaccacatgtcataggcccttgagggaaagctacttgatcaaacatccgatagtcacaaatttgaaaccgtgcttcagaatcccagcacatagtaaaagacaacactgataattatacctgtcaagaagctgtgaacacatggtgtataaattctttaccaaggcaactcaacaccttctttctctgggcttgaaccgccactgctcacgtgggctttacatacattgaccttccattcactgcagtgggaattctcagtgtgcagagggagaggttttctagtctgcaaactgaaacagtgtaagaagaataaagtctatgacttttaaataaatcaccagggccaagaaaaag

SEQ ID NO: 286514 - DNA, 1000 bp, Homo Sapiens
gaccctaattcaatatgactgatgatcataaaagaagaggcgagtagggcacaacaggcacaaagggagaccataaggagacacagaggaaggacaactctttacaagctaagaagagagggcctcagaagaaaccaaccctgccaacaccttgatcttggacttccagcctccaaaactatgagaaataaatttctattgtttaagtcacccagtccatggtactttgttaggcagccctggcaaatgaatcaaagacccattcctgttcctctccccaccactactgttttctactgtaatctgaagcttcaacaaaaggcttacctggtaagaatattcagctggtctgggtcctcaagactccaatagacactcttaaagaaggattgctgatggattgatagtgaaaccattagatcattgaattcctctggaattagaaaaccagagagtcccattttaagaaattagatatttaatatagcattgtgtgttctattttagtaacagcagaatctcttgacattacacaactcagtgaaacaacatcatttaagccaaaatatctcccaactgactgatagactctgagcactaatatcatagtgctgtgatgatggacaattacatagtaccgataacagccatgcactgtgcaaagcatgcccttctgcacaggagagcaaggcacttgcagtagtgatctatgccagcaaaacatcattttgagacaaacatttttgtggcagatgtttttcctaaaaagtactatatcatccaagaaatatttgagtaaaatcccttgttcttttgggtgacattaactgacatttgctttttttcaagacctaatagaaaataagaaagcccataatgtatttagaaacaggaatcctcagagcaattctctgtattctcatataatttcaatgtaaaacagaaaacatattgatgtgttggtgataggcttgaattattaaaaacttcaaaaacaaaa

SEQ ID NO: 286515 - DNA, 1000 bp, Homo Sapiens; identical to SEQ ID NO: 116249

SEQ ID NO: 286516 - DNA, 1000 bp, Homo Sapiens; identical to SEQ ID NO: 221536

SEQ ID NO: 286517 - DNA, 1000 bp, Homo Sapiens
gctttttatggaaattctcaatgactgttctgatgtagatgagatcaaattccaagaagatggttcttggtgtccaatgagaccgaagaaagaagctatgaaagtatccagccaaccgtgtacaaaaatagaaagttcaagcgtcctcagtaagccttgttcagtgactgtagccagtgaggcaagcaagaagaaagtagatgttattgatcttacaatagaaagctcttctgacgaagaggaagaccctcctgccaaaaggaaatgcatctttatgtcagaaacacaaagcagcccaaccaaaggggttctcatgtatcagccatcttctgtaagggtgcccagtgtgacttcggttgatcctgctgctattccgccttcattaacagactactcagtaccattccaccatacgccaatatcaagcatgtcatcagatttgccaggtttggattttctttcccttattccagttgatccccagtactgtcctcctatgtttttggatagtctcacctcacccttaacagcaagcagtacgtctgtcaccaccaccagctcccatgaaagcagtactcatgttagttcatccagcagcaggagtgagacaggggtcataaccagcagtggaagtaacattcctgacatcatctcattggactaaaggaggactcacttgattctgggaatcattcatcagaactgctttttcttggatctctagtctgtggaaacgttcttttttttttttttttaataatttggtatttattgaaagtcagatggattcttttgctttctgaggggtgaacacagaagactgcaacaagaaccaaatgacatgcaaggatttttcttaattatgctgtactctcagcatcagatacattcaaccataactgtatcttcctgagagatggatttcactttcatacgttaatggatggagtctacaaatcagtgaaaaaagtttttgttaaaataaagagcaataaaatta

SEQ ID NO: 286518 - DNA, 1000 bp, Homo Sapiens; identical to SEQ ID NO: 221537

SEQ ID NO: 286519 - DNA, 1000 bp, Homo Sapiens; identical to SEQ ID NO: 116251

SEQ ID NO: 286520 - DNA, 1000 bp, Homo Sapiens
acaagaaaaacaatcgcttcaatgatgggaaggtggatcccgccgggaggtactttgctggcaccatggctgaggaaacagctccagcagttcttgagcggcaccagggggccctgtactccctctttcctgatcaccacgtgaaaaagtactttgaccaggtggacatttccaatggtttggattggtcgctagaccacaaaatcttctattacattgacagcctgtcctactccgtggatgcctttgactatgacctgcagacaggacagatctccaaccgcagaagtgtttacaagctagaaaaggaagaacaaatcccagatggaatgtgtattgatgctgaggggaagctctgggtggcctgttacaatggaggaagagtgattcgtttagatcctgtgacagggaaaagacttcaaactgtgaagttgcctgttgataaaacaacttcatgctgctttggagggaagaattactctgaaatgtatgtgacctgcgcccgggatgggatggaccccgagggtcttttgaggcaacctgaagctggtggaattttcaagataactggtctgggggtcaaaggaattgctccctactcctatgcgggatgaggacaggtcttctttcctgccagagggagctctgaagacaactagagaattctgggcctgaaatttcaatctagttagaaagaaaaatgaggcaatgattttattaacagcgttaagttttaatttacaacttttaaaaggcagagcatttttaacaaggggtgacaggtggttttgataacacacttataaggctttctgtaaaaggtactatagaagggcgaagaatcgttcaactgtcaatcagcctcttgattctttgtaaattgccagggtgggtgggtacatatctcttcttgattctgcatttcatacttaactatattaaagcttcaaggaacaataaatagtaacctggtaatgaccaaaaaaaaaaaaaaaaaaaa

SEQ ID NO: 286521 - DNA, 1000 bp, Homo Sapiens; identical to SEQ ID NO: 116252

SEQ ID NO: 286522 - DNA, 1000 bp, Homo Sapiens
catgtgtccatttggaccaaacgttgttggtttttaaaaaattttattttgtttttttgtttttgtttttgttttttttcatcttaatatgtaccagtggcacttaaccaaaagatacagtgatatagccatgtactgtgggtgggacagatacagtctccttggcctataatgaaaccactaggactttatacagttttccttaatttgttgacatataaatggtaaattatatttaggcttatcctgttttgaaatgatggtagtcatctttcttactgctactttcatgttgctttctagaaaacagcatttcattccaaaataactaggatctgcatttagaacaagaatcattatttgtcctgaccttttcagtcctacagagacgcatctgtggttcttttgtacttgccatagatgtaacctaaaaagttttggcatatttaggtcagcctagcggaactttttttttcatttaaatggagctgaataatggagattttgtgtctgcaaaattcctgagatcattgaaaaagtaacaagctgttccttgtttctgatacataaaattattttaagcattttatcaatcattaaaatttactgccagttgtgagtggctttttaattaacttgtctttcattgcacttcactctgcctgttttcaaggggagtaagattggtaacatttggggagactgtatctgtctacttagcgtggctgttttgagggactgtcccatcagtgaacaaactgcatggccttggagagagactctgggctcttggctcagatgtgttcatcaaatactcctttcagagctgttgtgggtgtaagtgacatgatgtggccaaaaatccaaactgtgcagttgcgttgtgacaaacatgcaatgtgctgtaaaaattcaatacagtttaaataaaatctctatattagtaaaaaaaaaaaaaaaaaaaaaaaaaaaaaaaaaaaaaaaaaaaaaaaaaaaaaaa

SEQ ID NO: 286523 - DNA, 1000 bp, Homo Sapiens; identical to SEQ ID NO: 221539

SEQ ID NO: 286524 - DNA, 1000 bp, Homo Sapiens
tgaagactttctggaaatggatcttgcaaaaaatgagcacagagttcacgtgcaaatggagccggtatgacacactttcttacaacaacagccactgtgttggctggagagggatggggtgggcccaacggggacacaaggaggcagaggagctaacccctctactccactttcaaaactacattttaaagggaatgtgtatgtgaagagcactaccaacatcgcttttgttttgttttgttttgttttaagctttttttttttgcttgtttttaaagccaaaacaaaaaacaaccaagcactcttccatatataaatctggctgtattcagtagcaatacaagagatatgtagaaagactctttggttcacattccgatattaaaatagtgacatgaactggcaaagtggttttaaaagctttcacgtgggataaatgattttctttttttcttttctttcttcctatggtcttgtctgaataaactactctcctgaataaaacaacatccaacccaggtcattgaaatgaaattggccagtcaaaaaaaaaaagacttcaatcatttttaaaattcctaattttcagaaatatgaataaatagtttttgttaaaccctttgtaaaataccaaggttcccgttaacaaattacggcctctgcttgctggaaatgaaatatagtttaagaccaaacattttactaataaacaaattttaagtatatatatatatatataacttgaacttcataaatgtgaagattaccacttctttttatggccagtccttatcagaagtgtttcagtacagaatatacaaaatggcatttaaaaatgtgtttcctgttgcttttagttatacagaaatatgtgactgtagtgtctttaatttaaaccgctatttattattaagttattctaggatgattaaagtaatcaaaagaaataaaatctgagacataagcagccaaaaaaaaaaaaaaaaaaaaaaaaaaaaaa

SEQ ID NO: 286525 - DNA, 1000 bp, Homo Sapiens
atgcggccggaccatccagcgccacctggccttcgacatcctgcggcacaacacaggctactgcgtgtacatactgggtgtgatgtggtccgtcctgggcttcccactgccacaagtcttcctggtgccatatgccatgtggcacagcgtggacgagcagcaggcagccctcctcatctccatcatcggcttcagcaacatcttcctgaggcccctagccgggctgatggcaggacggccggcctttgctagccaccgcaagtacctgttcagcctggcactcctgctcaatgggctcactaacctggtgtgtgcggcatcaggtgacttctgggtgctcgtgggctactgcctggcgtacagcgtgtccatgagtggcatcggcgccctcatcttccaggttctcatggacatcgtccccatggatcagttccccagagccctgggactcttcactgtcctggacggccttgctttcctcatctccccaccactggccgggttgctcctggacgccaccaacaactttagctatgttttctacatgtccagcttcttcctcatctcagctgccctcttcatgggtggcagcttctacgccctgcagaagaaggagcaaggcaagcaggctgtcgcggcggatgccctggagcgggatcttttcttggaagccaaagacggtcctgggaagcaacggtcccctgagatcatgtgccagtcttcccgccagccacgtccagctggcgtcaataagcatctttggggatgtcctgcctcctccaggaccagccatgagtggctcttatggccaaaggcggtactgcaggccaagcaaacggctctgggctggaatagccctacctgagtgccctgtttgactccgccactatctgccatgtgagttgggcaaattgttgaccacctctgagccttgaaaaagtaggaggttactttgttagagcaaaataataaaatttaattttaaaaaaaaaaaaaaaaa

SEQ ID NO: 286526 - DNA, 1000 bp, Homo Sapiens
aatcctccagttgacaatgacacaccagttactctgggagtatatcttaccaagaaggaacagaaaaaacttcggagacaaacaaggagggaagcacagaaggaactacaagaaaaagtcaggctgggcctgatgcctcctccagaacccaaagtgagaatttctaatttgatgcgagtattaggaacagaagctgttcaagaccccacgaaggtagaagcccacgtcagagctcagatggcaaaaagacagaaagcgcatgaagaggccaacgctgcccgaaaactcacagcagaacagagaaaggtcaagaaaattaaaaagcttaaagaagacatttcacagggggtacacatatctgtatatagagttcgaaatttgagcaacccagccaagaagttcaagattgaagccaatgctgggcaactgtacctgacaggggtggtggtactgcacaaggatgtcaacgtggtagtagtggaagggggccccaaggcccagaagaaatttaagcgtcttatgctgcatcggataaagtgggatgaacagacatctaacacaaagggagatgatgatgaggagtctgatgaggaagctgtgaagaaaaccaacaaatgtgtactagtctgggagggtacagccaaagaccggagctttggagagatgaagtttaaacagtgtcctacagagaacatggctcgtgagcatttcaaaaagcatggggctgaacactactgggaccttgcgctgagtgaatctgtgttagagtccactgattgagactactgcaagcccttgcctctcctcccttgcctttgtctcttcagtcctctcacttattctatttcccaaccccctcccacttgtttgtgtgatctcagaactgtgccaagcagacactgggacaaagggagaatatcttgctcccctcctgagtcagcctggtgttgccctttattccccttatgtgcatatgattaaagagttatttttaaaaaaa

SEQ ID NO: 286527 - DNA, 1000 bp, Homo Sapiens; identical to SEQ ID NO: 116254

SEQ ID NO: 286528 - DNA, 1000 bp, Homo Sapiens; identical to SEQ ID NO: 221541

SEQ ID NO: 286529 - DNA, 1000 bp, Homo Sapiens; identical to SEQ ID NO: 116255

SEQ ID NO: 286530 - DNA, 1000 bp, Homo Sapiens; identical to SEQ ID NO: 116256

SEQ ID NO: 286531 - DNA, 1000 bp, Homo Sapiens; identical to SEQ ID NO: 221542

SEQ ID NO: 286532 - DNA, 599 bp, Homo Sapiens
aggccgcgctcgcgccgaggggctgcgagagtgaccgcggctgctccagcgctgacgccgagccatggcggacgaggagcttgaggcgctgaggagacagaggctggccgagctgcaggccaaacacggggatcctggtgatgcggcccaacaggaagcaaagcacagggaagcagaaatgagaaacagtatcttagcccaagttctggatcagtcggcccgggccaggttaagtaacttagcacttgtaaagcctgaaaaaactaaagcagtagagaattaccttatacagatggcaagatatggacaactaagtgagaaggtatcagaacaaggtttaatagaaatccttaaaaaagtaagccaacaaacagaaaagacaacaacagtgaaattcaacagaagaaaagtaatggactctgatgaagatgacgattattgaactacaagtgctcacagactagaacttaacggaacaagtctaggacagaagttaagatctgattatttactttgtttattgtctatatgccttttaaaaaaataaacttgttatgcaaaataaaaaaaaaaaaaaaaaaaaaaaaaaaaaaaaaaaa

SEQ ID NO: 286533 - DNA, 1000 bp, Homo Sapiens
aaacatttgtttttgcaaaataaggcccaatgttatggcctaatgaaagctatatacttgtgctatctaaagcactactttgtaaagatgactacccaagattgtaaatacaaaatttaaaaaggtacttaaattttctggaatatccatgtttcagaggtaatatttactttctatttcagtggcttaaattataacgttttggcttaagtgtcttttatcaatacaatgataagacaccttaatcctgagagagaaaattaagtactgtatataggtgtactttgcttctcacaatgattgtgcaaaaagtcacgtgtaaattgaacttttgtaaatcaaattgtattttaaatgcattaggggagctgccatttagaggaaacttgtgaattctttcataaagcagaaaaccattttataatacaaataaccattctctgatttatctcttttgtatgtttggattttcaatatcgactttgcttaaaacagagcccacctgcatagtaactgtgttttgccaaggctgcttgtgctaccagtttgctggtggctaacggcttgtgcttgaaagtcttctgaagtctgatgtgaattgagctatcaagcaatgctatcatagcacagtagcagtcctgaacagtctgagcagccaacccatttcaacaaaattgaacacaggactcttctgctcagcagcatctcttttctcagatgtggccatgttacagtagagggtattccataagcacatattccataaagtgctcagagtcacaggttttataataaattatgttattatgtaaacgaattgcatgcatgttgaaattttttagcagtactttagcttgaaagtactcgtacaaatactgttagatttagttgcaaataattgttctcaagttattgcaataaatgtcaaatgaaacaagctcttgtgtaaatagacttctgtgcctaatagtgacattgtttcaaaaaaaaaaaaaaaaaa

SEQ ID NO: 286534 - DNA, 1000 bp, Homo Sapiens; identical to SEQ ID NO: 116257

SEQ ID NO: 286535 - DNA, 1000 bp, Homo Sapiens; identical to SEQ ID NO: 116259

SEQ ID NO: 286536 - DNA, 1000 bp, Homo Sapiens
agccccctgggggctctgcagcacggcttcttccgccgcacggccgacgaggccaccaacacgggcccggcaggcagcagtgcctccacctcgcccgcgcccctcgacacctgcccctcttccagcaccgccagctccatctccagttctggaggctccagtggctcctccagtgacaaccggacctaccgctacagcaaccgatattgtgggggccctgggccccctatcacagactgtgagatgaacagcccccaggtcccaccctcccagccgctgcggccctgggcagggggtgatgtgccccacaagacacatcaagcccctgcctctgcctcgtcactgcctgggaccggggcccagttacccccccagccccgataccttggtcgtcccccatcaccaacctcaccaccacccccggagctgatggatgtgagcctggtgggcggccctgctgactgctccccacctcacccagcgcctgccccccagcacccggctgcctcagccctccggactcggatgactggaggtcgtccacccctcccgcctcctgatgaccctgccactctggggcctcacctgggcctccgtggtgtaccccagagcacagcagccagctcgtgaccctgccccctccctggggcccctcctgaagccataccctcccccatctgggggccctgggctcccatcctcatctctctccttgactggaattgctgctacccagctggggtgggtgaggcctgcactgattggggcctggggcaggggggtcaaggagagggttttggccgctccctccccactaaggactggacccttgggcccctctccccctttttttctatttattgtaccaaagacagtggtggtccggtggagggaagaccccccctcaccccaggaccctaggagggggtgggggcaggtagggggagatggccttgctcctcctcgctgtacccccagtaaagagctttctcacaaaaaa

SEQ ID NO: 286537 - DNA, 1000 bp, Homo Sapiens
ccctggactgccctcatcagcacctagacgtaccgcacgggaaggaggagcagatctgctgacctcagggcctgacagtgtgggacaggctcttctttcccaaaattagggagctcttgacagaaagcagttctgatgcttacatctggaatctgaggcatcctctgactccactcaaagagggtgagggccttcttaagatacaaatggtggaggattgctgccagagaagtctggtcagagccacagggtctgcctccagccaaacgggagcttttggtgagaaggtgttggacaggggattggcgcccccctttggtttggcctccatcctcatctctcttgggccaagccagctgcctaggtcccccaagcatgggggaccccttcccacatataagttgagaaggtgcctgccatagccaggagcgcatctcaatggaaacatcactggggtcacttgggaagaggacttcggggtagaggctgggaggagcccctggacatgcctgtcctgaaagcggctgcctccattatccattcccaagatgcctgatcagaaaccaaccatgaatgaacccctggctccttcaccacccccacgattggtatgatgctgccggcacagctgggatacacacggctcccccaggcctgagctgcttcactagggaatcctgcggcaggactgcagagcagatggcagatgcacatgttggaggagagagccttgggagccactgccactccagtcctgccaccaccctgtcttcctctgcaagtgctcagggaaatggccttcccgccggaggccagctatctgcctgacaggctgtgactcttctctcaaccttggccttctcccctcttctgagctagttggttgaattttttttaatgcttaagatttgtttttctcttttcacagcaacattttcttgaatttttttctgcacagcttttccaaaataaaaaccttccaaacaaaaaaaaaaaaaaa

SEQ ID NO: 286538 - DNA, 1000 bp, Homo Sapiens
tcacccgccaaccctccgtttcattatataggagctgggaagtgccacatggataatgtcaacttgtgtgctatatctctgaggaatggtgaggtggcatgggagatgtctgtgcttggaggtacctcagagaggtaacccaggggtcagcccaggctgctgggctgtagccaatagccatgcaggactggttcagcttgggctgtctgtacagctccgtactgcctatgtgtagccatctttgccttttgctgcaatagaagatgagcaaaggattaaacagaggcccacagctagtttgcagaaccactcaattttaagtgctgtttaaattgcagagcaaataatcctgtgtgggaactgtggttacaggaaatggagcactctaacaatgtttacttctaaactttgttgaatgataatagaaagcaccctaattgacttggaaaaaaaaaacagcaaaagcaaaagtagcaacatatgtcaacatatgtcactgaaataggaaacagtcattggaatgttgcacagaggctaataactatagactgttggatacagtggtgagaggagccccattttaggtctttcttttaggtttttggttttcattactccaagtaatccttgacccaagaacaaaggcttgttgtatgagttccactgccagatttatgggatgcctggatcattcagaaggatgcttcaactattatttgtcaggtccaaaggtcgtacttaataaccccattttctatgtatggggtagtctaatatattattttatctactttatttttcccttttcagaaagtccttagtgcaaaccaccattggaatctagccagaaatgtctgtcagatagttagaattgtaacatctaaacctgccacggatcgaatggtacttacaggtacctctcttagggactctgtgatccctaaaatatcagaagaaaatgtctgtctttctgtccaaatatctacttgacttgggggta

SEQ ID NO: 286539 - DNA, 1000 bp, Homo Sapiens
cctctaatgctgctgtaaaattggcagaaagcaaagtaagtgttgcagtggaagccagcgcagatagctcgaagacagacaagaaattgcaaattcaagaaaaagcagcacaagaggtaaaattggccatcaagccattttaccaaaataaagatatcaccaaggaagaatataaagaaattgtacggaaagcagtagataaagtttgtcatagtaagagtggagaagtaaattctactaaagtggcaaatctggttaaagcctatgtagacaaatacaaatattcacggaaggggagccaaaagaaaactctggaagaacctgtgtctactgaaaaaaacataggctgaaatggggaacgctgtcaaggacattatcaggatatctgcaaagtgcaatttcaacatgtaccattaactgaaaatcatacataactgtgattgaaatttggttttgataaaattatttttttaacataggatatgatgttttgttctaaataaatataggtctgcactgcaacttctgtatccttccttcccctccaccctcccccacaaaattcaagggaaagtaaagggtttaaaggaatgtgcatctttactaggactgtgttatagtgtggatactggaaaatgtatagctttttgattagggcaatggagtgcataaattagaaacttctaagtgcactggttttcaaagagatatatataatgcatttattctgtcaggttaaaatataaagtatgatctttatgattttttccctctaattatagaaagttaaataatgtattaccatgaaaaatgtttctaatattaaatagaacatatcagttgcaaagttcctaatgtgtatttttaaagcacatatctgaataaattgcctagatagaaaaaaaattatcacgagtaaaatttagtgttcaaaacattgaaacactcttcacctattgtatgaccaaataaaggttatgctgcttgttacgcgaaggcc

SEQ ID NO: 286540 - DNA, 1000 bp, Homo Sapiens; identical to SEQ ID NO: 221545

SEQ ID NO: 286541 - DNA, 1000 bp, Homo Sapiens; identical to SEQ ID NO: 221546

SEQ ID NO: 286542 - DNA, 1000 bp, Homo Sapiens; identical to SEQ ID NO: 116260

SEQ ID NO: 286543 - DNA, 1000 bp, Homo Sapiens
gcaagtaaagcagtccggcaggtactgcaccaactaaagagacttggaattgtgtggcaggatgtcctgccagtgaatatatattgcaaggctatggggactttactcaatacagcaatttctgaggtcattggcaaaattactgccctagaggacatatctactgaagatggtgataggttatattccttatgcaaaacagtgatggatgaaggaccccaagtatttgcacctttatctgaagaaagcaagaacaagaaatatcaagaagaggttccagtctatgtgccaaaatggatgccattcaaggaattgatgatgatgctacaagccagcttgcaagaaattggggatcggtgggcagatggaaaaggacccctggcagctgcgttctcttccagtgaagtaaaagctttaattcgtgccttgtttcagaacacagaaagaagagcagctgcccttgctaaaattaaatagctccatcttcttaagaaagctatgtcttgaatatgtggattcttcccttggcataattactcccttaaagacttctttgaatcgcccattggttttggtgaaccagtacatcttggaagtttgactttacagaagaacgtcttacctcctggcctgtacgaggctttgtttaagaactgtttattaagataaattgtcaagtaaagcacctcaattcattgactttctagccatcttcctttgattagctaacaaactgtcaggcagcattatttcatgctgcttccagagccctctgggagctatatacattgtaaatgcaggccctagctttggaacgaggaattgggagattccaggagtcagggtagagaatttctgagcaaatcggagatattttaggggtgtggaggaggggaagggaggaatgggccaccatatttggccttacaggaattaaggagacttcctgtaatatttctttccaataaatattgctttttacaaaaaaaaaaaaaaaaaa

SEQ ID NO: 286544 - DNA, 1000 bp, Homo Sapiens
ggttaaggttagactcttgggaatcagctagttttcaatcttattagggtgcagaaggaaaactaataagaaaacctcctaatatcattttgtgactgtaaacaattatttattagcaaacaattgatcccagaagggcaaattgtttgagtcagtaatgagctgagaaaagacagagcatatctgtgtatttggaaaaataattgtaacgtaattgcagtgcatttagacaggcatctatttggacctgtttctatctctaaatgaatttttggaaacattaatgaggtttacatatttctctgacatttatatagttcttatgtccatttcagttgaccagccgctggtgattaaagttaaaaagaaaaaaattatagtgagaatgagattcatttcaatgtaatgcactaaagcagaacacgaacttagcttggcctattctaggtagttccaaatagtatttttgttgtcaaactttaaaatttatattaatttgcaaatgtatgtctctgagtaggacttggacctttcctgagatttattttatccgtgatgtattttttttaattcttttgatacagagaagggtctttttttttttaagtatttcagtgaaaacttggtgtaagtctgaacccatcttttgaaatgtattttcttcattgcaggtccacctaatcatcctgtgaaagtggtttctctatggaaagctttgtttgcttcctacaaatacatgcttattccttaagggatgtgttagagttactgtggatttctctgttttctgtcttacaagaaacttgtctatgtaccttaatactttgtttaggatgaggagtctttgtgtccctgtacagtagtctgacgtatttccccttctgtcccctagtaagcccagttgctgtatctgaacagtttgagctctttttgtaatatactctaaacctgttatttctgtgctaataaacgagatgcagaacccttgaaaaaaaaaaaa

SEQ ID NO: 286545 - DNA, 1000 bp, Homo Sapiens
cttttcctaagcccaaatgggactgtcaattatttgattcttattctgagtcactgccggcaaatcaacaacctcgtgacttgaatcggatggagaagacatctgttaaagacatggctgaccttcctgtccctaaccaggatgtaactagtgatgacaaacaagctttgaaaagtactatcaatgaagccttaccaaaggacgtgtctgaggatccagcaactcccaaggattccaacagtctcaaagcaagaccaagatccagatcttactctagcacctccatagaagaggccatgaaaaggggcgaggaccctcccaccccgccacctcggccacagaaaacccattccagagcctcctccttggatctgaataaagtcttccagcccagtgtgccagctaccaagtcaggattgttacccccaccacctgcgctccctccaagaccttgtccatcacagtctgaacaagtgtcggaggccgagttactcccacagctgagcagagccccatcccaggctgcagaaagtagtccagcaaagaaggatgtactgtattctcagccaccatcaaagcccattcgtaggaaattcagaccagaaaaccaagctacagaaaaccaagagccttccactgctgcaagtgggccagcttctgcggcaaccatgaaaccgcatccaacagtccaaaagcagtcttccaaacagaagaaggccattcaaactgctatccgcaaaaataaagaggcaaacgcagtgctggctcggctgaacagtgagctccagcagcagctcaaggaggttcatcaagaacgaattgcattggaaaaccaattggaacaacttcgtccggtcactgtgttgtgacccccccatggttcaagtgacagtgggtgaccttgtctgccaagatctttcttttgaatgttttgaacccaactacttgtcatagatgtttgactgtgtcaaaagctgtgagcagcaaaatataatccata

SEQ ID NO: 286546 - DNA, 1000 bp, Homo Sapiens; identical to SEQ ID NO: 116262

SEQ ID NO: 286547 - DNA, 1000 bp, Homo Sapiens
atactgaaatatcaaagtaaaatcctagttggcaggattgtaagtagaccgaattctaatttttcccaacacatagtggtaattggaggttactgttatgaatactccatctgactacgactaagagagtgaggggtggttttaatgaaccctctaagctctctcagttccttcccttccacaaaatgcaagagcaaaagcaaactacaaacaggccttgtgctcaaccactggaaatgcctcctgggataagaatggcagcacttgaaaattctgccctctactgatgagacttcctgctgcctttggacataactaagccaggaaactttaaaagccttctagaaatagaggcactgtatgacttgcaatcgtaggtatagtttataacctgatagcaaaaaacttgaaatattgcagcccagtttaattcagcactttcccattttcataactatgtgaaaacatctgggaatttgaatcactcctgaatacagaggcatattctttttaaactataaataccattttgagtgagaaagtacttttaaacaagaaagaaattgtacattatgactaaagttataaatacaatatttatatctataaatctgaagtttaacatgattaatttaaaaagtatttagtgcttgacaaagtagtgtcactcttaagatgtcaaagggaattagccattttttttattgtaataaaggcaggtgctatttttttctggtgagattgcacctggataccaggcttttgtaatagttaacattaaacatttgattcataaagttaattcactgcttaagcatgtggctcatatttaggaagctatataaaattcagtttttcatttaacatttgctcttttgcatatgaagagatatttgtatttttcaaatgttaagtaaaacaagatgtgccaatatcataggtaaataaattagggaaaatgtgggaaaaaaaaaaaaaaaaaaaaaaaaaaaaaaaaaaa

SEQ ID NO: 286548 - DNA, 1000 bp, Homo Sapiens
caactgtcctatggaggagattgtgcgagccatgacctatgtcatcaaccagggcctggccctatactgggggacatcccgatggggggctgcagaaatcatggaggcctactccatggccagacagttcaatctgattcctccagtgtgtgaacaagcggagcaccatctgtttcagagggagaaggtggagatgcagctgccagagctctaccacaagattggagttggatcagtcacttggtaccctctagcctgtggtctcattactagcaagtatgatgggcgagtcccagatacttgcagggcctccatcaagggctaccagtggctcaaggacaaagtgcagagtgaagatggcaagaagcaacaagccaaagtcatggaccttcttcctgtcgctcaccagctgggctgcaccgtggcccagcttgctattgcgtggtgtctccgcagtgagggtgtcagctctgtcttgctgggggtgtcgagtgcggagcagttgatagaacacctgggcgcgctacaggtgctgagccagctgaccccgcagacagtgatggaaatagacgggctcctgggaaacaagccgcattccaagaagtagtctgtcgcgggcgcagggacccaacccggtgtcgctgcacccgcccgagccccgctcctcgcagccgcctctcccgctccggatccctccacgcagcggccggagccagactagccccgcccaccaacgagtcccggcttcgagtagtgatacgcatgaacaaagccatatccttttgcagtggggtcgagagagaaagtagcacgcccgccccctgctgcgtctttctaggcccttcttgcaaatcccgggcatgagctactcgccgtcggctctctgccacttcgtctcgctccctactctcctccccttattcccgaggcccagaaaagaaaacaaaaacaaaaacccagcacatacaagaaacatacagtgtacctcaaaaggggccct

SEQ ID NO: 286549 - DNA, 1000 bp, Homo Sapiens; identical to SEQ ID NO: 221550

SEQ ID NO: 286550 - DNA, 1000 bp, Homo Sapiens
agaaaacctgttttaaaattttagggatctttacttggtcatacatgaaaagtacactgcttagaaattatagactattatgatctgtccacagtgcccattgtcacttctttgtctcatttcttccctttgttccttagtcatccaaataagcctgaaaaccataagagatattactttattgaatatggttggcattaaatttagcatttcattatctaacaaaattaatataaattccaggacatggtaaaatgtgttttaataacccccagacccaaatgaaaatttcaaagtcaataccagcagattcatgaaagtaaatttagtcctataattttcagcttaattataaacaaaggaacaaataagtggaagggcagctattaccattcgcttagtcaaaacattcggttactgccctttaatacactcctatcatcagcacttccaccatgtattacaagtcttgacccatccctgtcgtaactccagtaaaagttactgttactagaaaatttttatcaattaactgacaaatagtttctttttaaagtagtttcttccatctttattctgactagcttccaaaatgtgttccctttttgaatcgaggtttttttgttttgttttgttttctgaaaaaatcatacaactttgtgcttctattgcttttttgtgttttgttaagcatgtcccttggcccaaatgaagaggaaatgtttaattaatgctttttagtttaaataaattgaatcatttataataatcagtgttaacaatttagtgacccttggtaggttaaaggttgcattatttatacttgagatttttttcccctaactattctgttttttgactttaaaactatgggggaaatatcactggtctgtcaagaaacagcagtaattattactgagttaaattgaaaagtccagtggaccaggcatttcttatataaataaaattggtggtactaatgtgtaaaaaaaaaaaaaaa

SEQ ID NO: 286551 - DNA, 1000 bp, Homo Sapiens; identical to SEQ ID NO: 221551

SEQ ID NO: 286552 - DNA, 1000 bp, Homo Sapiens; identical to SEQ ID NO: 116265

SEQ ID NO: 286553 - DNA, 1000 bp, Homo Sapiens; identical to SEQ ID NO: 116266

SEQ ID NO: 286554 - DNA, 1000 bp, Homo Sapiens
tgaaggaacagaaagtgagacagacagatatgaccaaatttatacaaaccatgtaccaacacttgaaagatgggtggatattttccaggaaacagattttgggcaggacattccatgcactggaaatagcatgaacaaatgcatgaaaattgcctacaacatgcctggcacatagctgtgaggtaccctatgagttgttgacttgaaaacatggaactgcacagggcattcaggcaagtgcaagtggttcaggggccagcgcagagcagagtgctgagtaaagatgtcagaaaaggaaagcaatggtctggtacaagtcttgtatagaacaagaagtttagacttttgaacaggcaatcgagatttggggttcagaaagataaatcccaaaagtatggagaacaaaggaactcattttaaaggactagctaagatgctcaatctctaaaaaaaaaaggatctgtattcgtgagagtagagagaaaggttgtttaggaagagtcaacagactttagcaaaatccttttatttgattcatgcataactcctgatggagtgtcaaggaagactcattcacttttctttcctgccagaaagttggttcttgcaaaatagattaacttgatgactatgtgtatattggatactcctaattttagctctgttagatatgtttctttctaaggacaagcaactatgtatagacttgttgtttgaattttttttcagtatatatatgtttcttgtttttctatttttctacttcatactgttaatgtcaaatatcaaaaatgttttccagcaatatcaagttatggcaatggcaaaagtccttgttgtagatgagaagcatataagaaatggttgccaatctttgttttgtatgatctatttagagttttaaccaacctagatctgtcagctaagctaattttatatttggtatacatgcatgtcaaataaagttaattttacatacaaaaaaaaaaaaaaaaaaaaa

SEQ ID NO: 286555 - DNA, 1000 bp, Homo Sapiens
gcacgaatgttcccctcactccactttttaactcgtttgctgaactcgacaaggcttccccttacgagcagtgagacctaggctactttcgaacgcttccttccgaacggtaagccacttcgctctcgggcaggacaggtcctccctgcagagagagacaactcatcccccgaccttccatactacagaccaaaatacccaggtgtggcctaaggactatattaaatgcctcctatagaaattcaaggaatgttagaaccaggaaactagctgtttaaagttttaaagaagtatataaatatatatataaatataaatatgaaatcatatcgagtgtgaggatgagcagagtgccaaatattcagcatctgtacaaagtcattcactggaattcaactattttatgtcattctctttctcacgcttttatggttcttttgataaattctatttagtagcatgcaggatacctaatctgaatgtgcaatatgctattcatcaccacgacaatttcttacttcctcttaataacttaccagaatgttggtcattcctttaaggcagttaaggattgctttatttgtgttcttttttcccatgactttttttcactctcagctgactgtaagaaactgtgcaccgtttccgccataaccgtcctgtgacgatgcctccatttgacttctgtatcgctgatgttcacctcctgtaaatagtttggcaattaaattttttgagaaaagtaatgtttacttttttattggagtgaattctcgtgttattttaatctcagaaaaattatatagaccaaagagttttatccgaaaaaaaattacactcttcctccattatatatttcattgttgaaatatcctcaatttctctatattttaagaagtaatggacatttattaaggttacagatttaatatgtatgcaaaatggtatagattaaatgagtttttaattaataaatcctacagtatttagttaaaaaaaa

SEQ ID NO: 286556 - DNA, 1000 bp, Homo Sapiens
tcttacaaactcgtctctcggcctttctctcctgccttccacagcctctcgtttctcctccatctgtgcttattacttgaggactgtgtctgctccgtgagagctgcgtgggcagggctgcagtggggtccaggtggtgttcagctgtgctgatgcctgccattgggtcctccttaggctctgtaagtcgtgacagccttcatcagtgcaatgtttgcagggtaattcttaaactttttagagggtggcaggtacatcagttctttttgatatgaaaacattcatgtttcagacattgaattgagagcttttaggggaagcataatggttattgtcactatcaacagtctaaaaagaaaaactgaggtctttttaatcttgattacagcactcacggcatgcaccctactcagtgtgggtgtcttcgtttgggggctttttttttttttgcacttctgaggctagatatgtctggctgaagatttgatgtggttcctccttaagctatgcgtcctgttaataataggtactgtactgggctctgtgtaagtgtcgttggggtaggacctatattttaatactgttcctaacatttcattttactagcgagaaatctttgatttcattttattctttgtaattctagacactagattgtagtttagccataactgatgttttttaaaaagggatatattttcttgcacagttgttcaaaaaagagacaagtttcagtcctcaatgctgtcctttgttttacaggtacaagttttctagctcagacaaactatgaaaaactgtagactattctcaaggtattaactcgcagaccctctgggggtaggggctgttttctaagttacaggcagagtgggactgagatggtacagtgtgcacagacaggtactgagctgacagactgggattttctgtactaaaatgttactttgtatcaaaagttaaacaggctttagtacaacaaataaaggtcaatttctgt

SEQ ID NO: 286557 - DNA, 1000 bp, Homo Sapiens
agcacaaagaaacccgctggaaatatcactttgaggtagtgagagacacattacacctaaccaacaagaagaaggatcctcccccttataatttaactatgtttacagggaatgcgtacattgtggcttcccgagatttcgtccaacatgttttgaagaaccctaaatcccaacaactgattgaatgggtaaaagacacttatagcccagatgaacacctctgggccacccttcagcgtgcacggtggatgcctggctctgttcccaaccaccccaagtacgacatctcagacatgacttctattgccaggctggtcaagtggcagggtcatgagggagacatcgataagggtgctccttatgctccctgctctggaatccaccagcgggctatctgcgtttatggggctggggacttgaattggatgcttcaaaaccatcacctgttggccaacaagtttgacccaaaggtagatgataatgctcttcagtgcttagaagaatacctacgttataaggccatctatgggactgaactttgagacacactatgagagcgttgctacctgtggggcaagagcatgtacaaacatgctcagaacttgctgggacagtgtgggtgggagaccagggctttgcaattcgtggcatcctttaggataagagggctgctattagattgtgggtaagtagatcttttgccttgcaaattgctgcctgggtgaatgctgcttgttctctcacccctaaccctagtagttcctccactaactttctcactaagtgagaatgagaactgctgtgatagggagagtgaaggagggatatgtggtagagcacttgatttcagttgaatgcctgctggtagcttttccattctgtggagctgccgttcctaataattccaggtttggtaacgtggaggagaactttgatggaaagagaacttccttctgtactgttaacttaaaaataaatactcctgatcaaaaaaaaaaaa

SEQ ID NO: 286558 - DNA, 1000 bp, Homo Sapiens; identical to SEQ ID NO: 116268

SEQ ID NO: 286559 - DNA, 1000 bp, Homo Sapiens
cctgtaaatttaattagggctagatttgagctgcttgtaagtcacaggttttccagatgtctgccaacaagaaatgactcatactgtgatgataccttttgctttgccttgtggacaatgtgggtttttgaaatttgcacccttcaaacaatgatttatcagagaaaggggtctgttttcaaaaaagattctgtaatgaattttatgtgtggcatatacttatttcttgagagaagattttaacttattgtttttattttatggttacatatgatgataacctgctattattaaactttttctaaaaagtgaaaaaaaaaaaaaaagatataagaactcaaggtcccatactctgtattcgggatccatctgagatgcatgctaagctatgtgtatgtttttaattttgcactgctctttcctggcaatttgttttaatggttattgcagaatattaaggtacatgtctctctgttttaagtaatattgcactttataaaaaagtatgaataaagcaaactattttataaagtgcactgtttaaagcatttgcactgtatttttgccatttattttcattttctactttaaatttgtcctcacattcctcttctactttgtatgcaacaagtagaatggggcatgttgtgtcatgtagtcagccacttatgcaccaatgtgaggaaaacctaaagggaaattaaactaaacactgtgcttcatatttgtacactgtgttgtactacagtgaggaatttcctcctgtagtcatatattatgtacataatattttagaatcatacctatgacttgtttggaaatttttctgttaaattttaaatccagaaagcatattttataaacttatgcagagcacttttattgctcaaaagttctgaattcatacagaaaacaagtactatgtgatgaaaacatttcattaaaagattgctgcatttaaaaatacaattaattcgttccctatgcaaaaaaaaaaaaa

SEQ ID NO: 286560 - DNA, 1000 bp, Homo Sapiens
attatctcaagcaatggtcatgtgtgctagttcaccagagaaaattgaaatcttggctcctccaaatgggtctgttcctggagacagaattacttttgatgctttcccaggagagcctgacaaggagctgaatcctaagaagaagatttgggagcagatccagcctgatcttcacactaatgatgagtgtgtggctacatacaaaggagttccctttgaggtgaaagggaagggagtatgtagggctcaaaccatgagcaacagtggaatcaaataaaatgcttccactaccaaaagacattagagaaaaccttaaaagtaataaagagaaatatatttgtcacttatacctaaaatatgagtggctcatttttgcattactctcttctagacttgactagtcatttacttggtatatattgttttcattgattggggaaacactagatttttacctcggtttttgatcatttataatggagagaggaagttgcctatgttttgtaataatttattttttagcaggaatattgattagcagcttttttttctttatacacatagataactaactagattaatgtttagtttcttatttgtaggcacaggatgcatgaaatttcaagctctgggattttttgtatattgtgtatctgtatcaaaaatatcctctccttttcaaaaatgacaggttggaaaatgtttgtcagacttattaactggtcatattataataatactgataatgaccaactgctcattctgaaagccaaacataaaagctaggagaagtggcatctgaacatttttgctttgctgccagagtaaccctgactaataatacaataacagcaatttttttaaaaaactgagatttcctactggcttgaagtttttctatttagcaaaataattagtaataagttttgactaggtctaaagaatgaacacattgtaaacagttgccacagtagtttctaataaattgatcataaaagca

SEQ ID NO: 286561 - DNA, 1000 bp, Homo Sapiens; identical to SEQ ID NO: 221554

SEQ ID NO: 286562 - DNA, 1000 bp, Homo Sapiens; identical to SEQ ID NO: 221555

SEQ ID NO: 286563 - DNA, 1000 bp, Homo Sapiens; identical to SEQ ID NO: 116270

SEQ ID NO: 286564 - DNA, 1000 bp, Homo Sapiens
acttttttatcgtgagccaggctgtgagaagtggtagtgtttctcccacacattacaatgtcatctatgacaacagcggcctgaagccagaccacatacagcgcttgacctacaagctgtgccacatctattacaactggccaggtgtcattcgtgttcctgctccttgccagtacgcccacaagctggcttttcttgttggccagagtattcacagagagccaaatctgtcactgtcaaaccgcctttactacctctaacctgcagaagacgatgcagccgcttttctttttgaaatgactttgggatttttttaagcttttatttactttttttttaactgttatctttctggatgaaacttgggaaggggattaggagatctagcattttatttctagcattgctattcaccggcttccttattttatacgtaaaaattaagattttatattttatcttcttgtttctcatagatattttgtgagcatttttttgtttattttgaagaaatgtggataagatacttggtagtataaaacagactctctgagagtatttgaaatgtgtttggagatttacttaaacgtactttcaggagtgagcaagtcctacttataaacctatattaactttatttttgagatacctgttttgaatttaaaggagataagaggcgtaaagtaggatgctcactacaaccataggtggggtttcagctcatatcttaaagataaaaggtactattatataacctatacacaagatacaggagaaaatatgcttgatttttatttggcaggggggctaggttgtatgggagtaaaaaaaacattgaaaatttttaaattgtccaaagaaacattttaagactctttaacaaaaaaggccatgagtaaatctctatattaacattactatttattttgttttggaactgggacatgattctatttgttataaaataaaattgatgtgattgtcaccttaaaaaaaaaaa

SEQ ID NO: 286565 - DNA, 1000 bp, Homo Sapiens
cccagttgacataactgtgaacctcgatgccagtggctcccagtgtgggctacatagtcctttgcagtctgacaatgccaccgacagtcctaagagctctctaaaaggcagcaacccactaaagtccagatccctcaaagtgaactttaaggaaaatagaggcagtgcaccacagaccccgcccagcacagccaggccactgccagtcaccacagctgacttttcgctcactaccccgcagcacatcagtaccatcctcttagaagaaaccccctcccagggagacagacccttgctgggcactgaggtttcagcgccttgtcagggaccttccaaagggctgtcccccaggtttcccaagcagaaactgttccctttctcttcaagagagaggaggagcttcactgaaatagatactggtgacgacgaagacttcttagagctcccaggggcaagggaggagaagcaggtggactccagcccaaattgctttgcagataagcctagtgatgggagagaccctttaagagaagagggcagtgtgggctcttcctccccgcaggacacaggtcacaactgtaggcaagacatttaccatgctgtgagtgaagtcaaaaaggacagtagtcaagaagggtgcaagatggaaaatcacttgtttgccccagaaattcattccaacccaggagacacaggttattgtcccacacgtgaaaccagcatgtgactagttacaaaagcaataaattgaaacaaaacaaaacaaaacaaaacttgtttcttaaaaatgcggttaataatgcctgtgaactaaaaaaatgggaagccctccccaaaaaaagtgcataaaatgttatttttgcatggcatgaacagtttagcttaagtactgtttaaataatgagtcaagactgcattttgtaacaaaccaacaaaaatgactgaagaacagtgaacaaataaaaagagctctattaggaaccaaaaaaaaaaaaaaaaa

SEQ ID NO: 286566 - DNA, 1000 bp, Homo Sapiens; identical to SEQ ID NO: 116273

SEQ ID NO: 286567 - DNA, 1000 bp, Homo Sapiens; identical to SEQ ID NO: 116274

SEQ ID NO: 286568 - DNA, 1000 bp, Homo Sapiens; identical to SEQ ID NO: 221559

SEQ ID NO: 286569 - DNA, 1000 bp, Homo Sapiens
acccccatcccccaccgggcctttgtccctgccttggcttttctccccttctcattctcctctcccctttcctcactgaaggctgtgagttgctttcaatgtgacaacactatgatgtcatttggaaggatttgccaggacagactgattctgagtcctgggtgccgtatgtgtatgcggcagtgttgtcaggcgatcttgtttgaagctctatgttgccataattaccatcaagtacacactgttggcaaaaggctaacacctgactttagaaaatgctgatttgagaacaaaaggaaaggtcttttttcactgcttaaagtggggtcactttgatacctttgcggtcatgtctgtgtctgatgagtgtagaatctctggatgtgcactgtcagtcatgtgtccaccaggcctcgaatatcatatgggaaatgtcatagttaaaaacgtacagccaggcccgtgtgctgttaatagtgtgaaattgtcatgttaaaaaaaaaaacaggaaccaaatgtgaccttgtgcatatattggtagctgaaaatcttcaaggctactgatgggtggccccttaatcttgtctttgattgctgtgtgcagggaaaggtgtccccgtttgttcatgctgttttggggggtgggggggtatttgcaagaatactcattttgacataataggtcctcttgtcagagatcctctaccacagacattaatagctgagcaggagccacatggattgattgtatccactcaccattgacgatggcattgagcgtagctagcttatttccatcactacgtgtttttgagcttgctcttacgttttaagaggtgccaggggtacatttttgcactgaaatctaaagatgttttaaaaaacacttttcacaaaaatagtcctttgtcattacattatttactcatgtgtttgtacatttttgtatgttaatttatgaatgattttttcagtaaaaaatacatattcaagaaccaaa

SEQ ID NO: 286570 - DNA, 1000 bp, Homo Sapiens; identical to SEQ ID NO: 116275

SEQ ID NO: 286571 - DNA, 1000 bp, Homo Sapiens
gtgagggcttccagggaaaatggaacaaaatggtgttcttaggtaatgggttgtagatactgagtcttcctttccttttctgacccttctcgaggacatttgctttcctcacacttttgtagtctctctttacatattactatatggaaatgaattgctctgtgctgaaatttgaagaccagataatgaaactgaaaagcaaacaattttactgaatctgtctacccttcattcatgagaactccagaatgagtgttgaccactgaagcatcttttaagtctgtgttccattgtgccattcaggtttgctgtcacatatgcatcatctgaaatcatttgaaatttttgtacaataaaatatcctggatttgatcctgaaggaaactagtaagatcagatttttgggtcatgtctgttgtattttcagtaatgtgatttcagatggtcatctggattctcccacttctctactccattatttctctacttttccttccagcaaacctgaaacgtgagggagatggattaatgtgagtaacaggaatgtgtctttaaaaagctagagtggttacatttaatcaggcagtaagataatttgggttcttgagttgttttggagtaatatcccacaactggggtaggaagctcaggacttttttctttaaagctagtcatttcaaaagcatattgtatttttttgaatgactacagtatggacaatttcaaaaaccaaaacccactttggattggtggaagtaaaaactggtaactcactcaagtgaatgaatggtcttgcattttaaaagcttatgggaaactcaatttgaaatgattagaaaatgtcaagtattataagctggtatttaagatgcttgtaaatactatttatgtttttaattttgtaaaataaagatttctttttaaccactggcaaaaaaaaaaaaaaaaaaaaaaaaaaaaaaaaaaaaaaaaaaaaaaaaaaaaaaaaaaaaaaaaaaaa

SEQ ID NO: 286572 - DNA, 1000 bp, Homo Sapiens
cacttcttgcaaggtaacttgaatcatcacttatttctctgccacctggttttaggactggcactctataaatgacgctgactttgtatagaaggattttgctaagggggcaaaaagcccagataccattttaactggcccagctcattttctcctttcattttacaaaagaaatcatgcagaagcatcaattaaaactgatttatttatgttggtacatccaacaaaatagttggagccacaaggcccttgtctttttaaaaaaacaaaatattttgaagatggtgaaagtgactgattttaataatgagataggtcacttaaaataacagtgcctttgaccttaaaacatggcactggcccatgtgacctttgccatttcccagtacttccctttacagtctgcagcctataaacagtggtgtctcaaagcaaaggaaacctccacaagtgctgcaacagtgcattagtttttatgtagcaatttgtttataaaaattcccatcccataatgcatgaccttcctaaaaatacccacagcctccataggcaaggtgagctttctgtgctacccactggttagattccagccacctcagggattctgatccatgtcattaacgaccatcccagggtgtgagggcctgattaaagcttatcgaactagacatttgtttattagatgagctcggcattattattttctcaataactggtagaagggaaattttaaacataacactcaacccaaacaaaactacttcgtgaggctttcagcaaaaaggctgcttaaaagcatgaacccgggatgcagagcagcttttgtgcacggttccacttactgtaattgtttctggttctttcctctaacaccttccatgtatgtcaactttttatcaccgtcaggcatagactcgtggagattagtcattatagctcagacctaagctaattatttaaaataaatacatgtaaaggccactgccacattctcagcaga

SEQ ID NO: 286573 - DNA, 1000 bp, Homo Sapiens
caagttcaccatgagagggtgtgggccatgtttgaggattgccccagcattcagttctatgagtaataaatatccacaggctgttttcttggaagtcgatgtacatcagtgtcagggaacagctgccaccaacaatatatcagcaacacctacatttttgttttttcgaaacaaagtgagaattgatcaatatcaaggagcagatgctgtgggattagaagaaaaaatcaagcagcacttagaaaatgaccctggaagcaatgaggacacagatattccaaaaggctatatggatttaatgccttttattaacaaagctggttgtgaatgtcttaatgaaagtgatgagcatggatttgacaactgtttacgaaaagacacaaccttcttggaatctgactgtgatgaacagctgcttattactgtggcattcaatcaacctgttaagctttattccatgaaatttcaagggccagataatggtcagggccctaaatatgtaaaaatttttatcaacctaccccgatctatggattttgaagaggcagaaagaagtgaaccaactcaagctctggaactgacagaggatgatattaaagaagatggcattgttccacttcgttatgttaagtttcagaatgttaacagtgtaactatatttgttcagtcgaatcaaggtgaagaggaaacaacaagaatttcatattttacttttattggtactccagtccaggcaacaaatatgaatgacttcaaacgagtagttggcaaaaaaggagaaagccactaaggtacaaaagacactggacaaccatattgcaatcagatctacagctcctggataattgcttgattctcgccagagactgtcaatgtttcattcattgccattaccaataaatcattgcttttgttcagatggtatcactagtgtttccattgtaatcttgacacatgcaattgtaaataaaagtcaccacttttgccaagcttaaaaaaa

SEQ ID NO: 286574 - DNA, 1000 bp, Homo Sapiens
tcagaaggcagctattcccagcagcttcctagttaacaacccccatgctgcctccagtctttgtctgtattcttctgtatttaaccttcagattgtaagccttttctggcaagcttttcttctttttttaaactcttttcctgaaactttttatgaatggctatggcaccattaatgctgctgaatatctttaaactctgcacaagcaagtgtgtagcttaaggccactactggtaaggaaaccaagtgtcctctgtgccttttttctttctgtgaagtaatttaagaatatccaaaaaaattagactttaaaaagttatcttggtacaacaccgtgtgtatatacacttggaagcttaaaaaggtgttttgtctggaacttagaagcagctctaaatctagtagagcagactttctaacatacctagttttgtgtattggctttgctggagtatgatagcaaaatgaagactcttttactcagctctggtattgctcataacttaccaagaggctaatactaaacttggaaaattgtttaagtatgttttatcaagcagtctgggttttgttttttaatatactttttaatggatatgtgaaaactgaaggaaatgttaaaggttttttaatggtgcaagtgaaggtgccagttgctatttgatatcacactctacaaaagcttcattactttatttgatggtggttgctaagcagccattgcacagagcataagtctactgggtgcctttacatgccagaggctgatgctgcactgttgatgtcatgtgaggaaataatgcacatgctctaactgctcaacaggaaatgaacctagaaacagaaaatgaaaaggttgattgaaataaaacttgatcaacgcgactgtattttgaaacattccaggaaggttacttcttgtcaaacttgcctggcagtgtttgttcaaaacttgtatttaataaatgaacatctgacttacaaaaaaaaaaaaaaaaaa

SEQ ID NO: 286575 - DNA, 1000 bp, Homo Sapiens; identical to SEQ ID NO: 221561

SEQ ID NO: 286576 - DNA, 1000 bp, Homo Sapiens; identical to SEQ ID NO: 116279

SEQ ID NO: 286577 - DNA, 1000 bp, Homo Sapiens
cacacacgggcggacacacacacacgcgcgcacacacacacgcacagagctcgctcgcctcgagcgcacgaacgtggacgttctctttgtgtggagccctcaaggggggttggggccccggttcggtccgggggagatggcgcagcccatcctgggccatgggagcctgcagcccgcctcggccgctggcctggcgtccctggagctcgactcgtcgctggaccagtacgtgcagattcgcatcttcaaaataatcgtgattggggactccaacgtgggcaagacctgcctgaccttccgcttctgcgggggtaccttcccagacaagactgaagccaccatcggcgtggacttcagggagaagaccgtggaaatcgagggcgagaagatcaaggttcaggtgtgggacacagcaggtcaggaacgtttccgcaaaagcatggtcgagcattactaccgcaacgtacatgccgtggtcttcgtctatgacgtcaccaagatgacatctttcaccaacctcaaaatgtggatccaagaatgcaatgggcatgctgtgcccccactagtccccaaagtgcttgtgggcaacaagtgtgacttgagggaacagatccaggtgccctccaacttagccctgaaatttgctgatgcccacaacatgctcttgtttgagacatcggccaaggaccccaaagagagccagaacgtggagtcgattttcatgtgcttggcttgccgattgaaggcccagaaatccctgctgtatcgtgatgctgagaggcagcaggggaaggtgcagaaactggagttcccacaggaagctaacagtaaaacttcctgtccttgttgaaaccaaacgatataaatacaagataaattatcactggagttttttctttcccttttttctgtgcctgcataatgctgacacctgcttgtttccatacaaattgatatcaaaataaaatttgtatagattaaaaaaaaaaaaaaaaaaaaa

SEQ ID NO: 286578 - DNA, 1000 bp, Homo Sapiens; identical to SEQ ID NO: 282941

SEQ ID NO: 286579 - DNA, 1000 bp, Homo Sapiens; identical to SEQ ID NO: 221563

SEQ ID NO: 286580 - DNA, 1000 bp, Homo Sapiens
taaagtctggctatgctcacagtctcacatctggttggggtgggctccttacagaacacgctttcacagttaccctaaactctctggggcagggttattcctttgtggaaccagaggcacagagagagtcaactgaggccaaaagaggcctgagagaaactgaggtcaagatttcaggattaatggtcctgtgatgctttgaagtacaattgtggatttgtccaattctctttagttctgtcagcttttgcttcatatattttagcgctctattattagatatatacatgtttagtattatgtcttattggtgcatttactctcttatcattatgtaatgtccttctttatctgtgataattttctgtgttctgaagtctactttgtctaaaaataacatacgcactcaacttccttttctttcttccttcctttctttcttccttcctttctttctctctctctctctttccttccttccttcctccttttctttctctctctctctctctctctttttttgacagactctcgttctgtggccctggctggagttcagtggtgtgatcttggctcactgctacctctaccatgagcaattctcctgcctcagcctcccaagtagctggaactacaggctcatgccactgcgcccagctaatttttgtatttttcgtagagacggggtttcaccacattcgtcaggttggtttcaaactcctgactttgtgatccacccgcctcggcctcccaaagtgctgggattacaggcatgagccatcacacctggtcaactttcttttgattagtgtttttgtggtatatctttttccatcatgttactttaaatatatctatattattgtatttaaaatgtgtttcttacagactgcatgtagttgggtataatttttatccagtctaaaaatatctgtcttttaattggtgtttagacaatttatatttaataaaattgttgaatttaaaaaaaaaaaaaaaa

SEQ ID NO: 286581 - DNA, 1000 bp, Homo Sapiens
gcccactgagggactaggttttcatgtctctagtcatacctagaatgttctgagccgtctgagggccttcatgccggcagcagctagcaaagccagaaagcaagtctaacaggatctaagatgaccatcaggagaaggagtttgagactgtgtatgcaacccccaatagacccccttttactctgatctggagaatgtatctggcttcatattttcaagtcacatgtctctcagacccctggattcagaacccaaggccacaaatcataggcatgaagcactttcttaagactgacctaacgctggattatttcccgtccaatgcctgcatgctgcttgaattgctccacccacacctccatgaccaagggcgccagagtgctgcaactggggcgtgggccgctctctgcttttcctgtctgactctgacaagtcctccctcactgaatgtagaatcgttgccaagtttctgagaagtgtcgattccctgttaacatggatatcagttctgcctcacatttcccacttgaggttgaggcgtactggagacaacacctcagaccatctgaaccccatcagtggacgaaaatggggctgttaatatactctaaaagccatactaaaaatgctctgagggaactggctaagaatagtgggcctggtgattgtctatcacgcaaggctttgttttgtactgttcagaaatctgtcacctttctgcctgcccttgtttcctgaatgaaatgcttctggggttatttatgaaaggagtgatcctggggcaggcaggaggcagtgggcttcatggctccttgaagttattactgatcttgaccttctctttggctacctttagacaaagaatacgccaatcaatacttggggctctaagttttacaattgatatttatttgtatcatctctttgtctaggaatgtaaaagtgattctaaactaagatgtgtaataaaaatcaatcagatttattgtacctacaaaaa

SEQ ID NO: 286582 - DNA, 1000 bp, Homo Sapiens
aaaaagcccctttctggttgtgagagaggaaaaaaaagtatggaggccttattttcaaaaatgtgaaatataaggcacgttttcacacaaaatttcaaaacaaaaacaagagggcatagatgcaatcattgggaaattttcatgcacgcttattatgttattacatatgtttatataaaatccatctctgtgtgctttctggactgtgataagtgacgttttatagcctgttgtatagaaaatgcaaaatatatctctgctcttcagccatttttggtaaattcaatgttataagtgttgctaagtatagggagttttatgacatcagagcaacaattatttcagttgggtttttctttttttttgccaccattataaattgccacaattacttttattttttaaagaaattacagtgtagtgtttattctaaggaagatatgtatgaatgtatatacaaagactcagctacttcttttcttatatgtacagccttcattctgttgcaattaagttttagtacttgtatgaaaggtgtgaattagaaagtcacatatatacatatgtatcttataatcttttctccctgaaatactcacattcccacatacattcactattttcacacacacacacacacacacacacacacgaatccacagcaatccatcagatatgctggaagatccaaacgtgcatacagtagcaaatatttattgacaaattgaaaagcaggaaggaagagggttgtgccaaggtattgatgacaaatggggtgatttgcttcattgagatcttgctcccaggtaaccttaagaagattttagtccctaaagaaatgaacctttccttatcaaatagaatatcactgatatactgctgcatgaataagaaccattatgtgggcaggttatggaagcaaaattggttaatctacaccttaactctggctgctgcaattgaaaactttctttctaataaaataatatatatatctctg

SEQ ID NO: 286583 - DNA, 1000 bp, Homo Sapiens; identical to SEQ ID NO: 116281

SEQ ID NO: 286584 - DNA, 1000 bp, Homo Sapiens; identical to SEQ ID NO: 221566

SEQ ID NO: 286585 - DNA, 1000 bp, Homo Sapiens
ggcatgaggatgacgttcaacacttcaaggtcatgcgagacaacaagggtaattactttctgtggactgagaagtttccatccctaaataagctggtagactactacaggacaaattccatctccagacagaagcagatcttccttagagacagaacccgagaagaccagggtcaccggggcaacagcctggaccggaggtcccagggaggcccacacctcagtggggctgtgggagaagaaatccgaccttcgatgaaccggaagctgtcggatcaccccccgacccttcccctgcagcagcaccagcaccagccacagcctccgcaatatgccccagcgccccagcagctgcagcagcccccacagcagcgatatctgcagcaccaccatttccaccaggaacgccgaggaggcagccttgacataaatgatgggcattgtggcaccggcttgggcagtgaaatgaatgcggccctcatgcatcggagacacacagacccagtgcagctccaggcggcagggcgagtgcggtgggcccgggcgctgtatgactttgaggccctggaggatgacgagctggggttccacagcggggaggtggtggaggtcctggatagctccaacccatcctggtggaccggccgcctgcacaacaagctgggcctcttccctgccaactacgtggcacccatgacccgataaactcttcaggggacagaagctttttgtctggagctgcccacaagaaagagggcaaggaaaaaaggctggactccatgactatatatacatacatctatctacatctgcctgtgtacacacacaactttttatactagtaatttattggcaattgggctggtaattagttgatgcaaaagggaactcaggtggagaataatattgacacttgcttttctgcccccctcaggggtgtgtggaaggcagtgggggagttgggaggggggcagggaaatgaaatggagttttgtcctggc

SEQ ID NO: 286586 - DNA, 1000 bp, Homo Sapiens
aatttttaaatgtttacataatggccagaaggcttgcaaatctgtatttaattgcattttaattaattgccagtttttacatgtgatagtcagttgtacaaagaaaatgcacttaaacctgtttctaaattatatattcagttatattatatttggctttagatggttttaatacatttgatagtttttcaccccttggctttattttatataaacttttgtttttcagcagttctgaactttttagtattttataaatggtccaaaaaatgcctgtttcagaagtttttgaattcagtgcatttcctcttgatttgtctgggttaaaaccattccttttgtatgaaatgttttgacttaggaatcattttatgtacttgttctacctggattgtcaacaactgaaagtacatatttcatccaaatcaagctaaaatttatttaagttgattctgagagtacaggtcagtaagcctcattatttggaatttgagagaaggtataggtgatcggatctgtttcatttataaaaggtccagtttttaggactagtacattcctgttattttctgggttttatcattttgcctaaaataggatataaaagggacaaaaaataagtagactgtttttatgtgtgaattatatttctactaaatgtttttgtatgactgtgttatacttgataatatatatatatatatatatcaacttgttaaattatttcatgttcccgtggcttcttttcagttgttgcctattacagtatgagagtttaaggttattaaccattggcttagaagtcaacacctaggatcatacatccgttgactacaatgtggaatgaattttatggaaacctgttttatagttctatgtgatgtaaaggtctagggagcaataaccagcccttttttttctgaaggcttgtttttagtcctcattgtacaaaatataaaataatcatattgctatgaatacctaaaaaaaaaaaaaaaaa

SEQ ID NO: 286587 - DNA, 1000 bp, Homo Sapiens; identical to SEQ ID NO: 116286

SEQ ID NO: 286588 - DNA, 1000 bp, Homo Sapiens
cgtgtacacgtcagaggtgctggccgtggtgatgcagcagctgatggagcagagccccctgcccatgctgctcatgaggaccgtcatccagtccctgaccatgtacccccgcctggggggcttcgtcatgaacatcctgtcccgcctcatcatgaagcaggtgtggaagtaccccaaggtgtgggagggcttcatcaagtgctgccagcgcacaaagccccagagcttccaggtcatcctgcagctgccgccccagcagctgggagccgtctttgacaagtgcccagagctccgggagcccctgctggcccatgtccgctccttcaccccccaccagcaagctcacatccctaactccatcatgaccatcttggaggccagcggcaagcaggagccagaggccaaggaggcgcctgcggggcccttggaggaggatgatctggagcccctgaccttggccccggccccagcaccccggccccctcaggacctcatcggcctgcgactggcccaggagaaggccttaaagcggcagctggaggaggaacagaagctgaagccgggaggagtgggagccccctcctcttcctccccctctccctctccgtcggcccggccaggcccgcccccgtctgaggaagccatggatttccgggaggaggggcctgagtgcgagaccccgggcatcttcatcagcatggatgacgactcggggctgaccgaggccgcgctgttggactctagtctcgagggccccctacccaaggagacggcagcgggcgggctgaccttgaaggaggagcggagcccccagaccctcgcacctgttggagaagatgctatgaagactcccagcccggctgccgaggacgccagggaacccgaggccaaggggaacagctgacggggctcgagggggaaagggggtgggacagggactcggggctgggggacggggcggggcttgacctgcgggtgctttgccttaaaaagaaataaa

SEQ ID NO: 286589 - DNA, 1000 bp, Homo Sapiens; identical to SEQ ID NO: 116287

SEQ ID NO: 286590 - DNA, 1000 bp, Homo Sapiens; identical to SEQ ID NO: 221569

SEQ ID NO: 286591 - DNA, 1000 bp, Homo Sapiens; identical to SEQ ID NO: 221570

SEQ ID NO: 286592 - DNA, 1000 bp, Homo Sapiens
ttgaagggtaatgtaccaaaaaatatagttcagtgaattaaaatgaacacacatgtgcaaccatcaattcaggtcaagaaatagaagattgtagcacacaaaagcctactcagccattctcccagtcactacttccttccttacccctgggttatttttgaaatgacacttgatgtatttccctctgttgctgttatgagaacattgctacagccaagtgttgtgtttctgtgtgcataggttgatacttaattatctccccactttttaataaacttttaatttggaaataattttagattgacagaaaagttgcaaagatagtgaggaaagttcctgtctactctttgctcagcttcccttaatgttaacattttatatagcaagatgcatttgtcaaagctaacaagttaacattggtacaatcactgttaattaaactgcacacaatattcagatttcaccacttttccactaatattctttcattgttctaggattcaattcaggagaccacatttcatctagccctcttttttaaaagtaaatacttttcagcacttacaggagttaactgagctggggcatcatggtgtatagacgccctgacactggtcatcttggaattcatttagtttgtcagtgggtgccctgacattctgtcacaacatcaatttgggaacatggcattatatttttatctttgaacttttttctttttggatgacatttgattaatgcgtcatcttggaacacattatcttttttcttggttatgtgatcaggaagattaatcagtttttcctgttcttggtataattcctgcttttcacatacctgtcccttacagttctctatatatacccttcccttattacacagagagaaatatctatctatactttttacacaaaatatacttcaaaagaaacaaaacagccacaattattaactttttaaataaatgagaatttaattatatcctaaaaaaaaaaaaaaa

SEQ ID NO: 286593 - DNA, 1000 bp, Homo Sapiens
tctccagcacctcagtctaatcaggtgcccgtgtctttaccagtaactcagtgaagccagactgtactgtggagaaagtagaaatatatccgtctttgagagtggactcaaaccttttaaatctgaatgcgatcacactgtagtgatatagtagaagcagtgatgatattcagattgttttattttgattcaaatgatgaatctgttgacaccttataactcccatctccctatctatatttttgtctctaagagatcaagtaagatacatgttgttcatattcataacaacttattagagctatgtaggaacatagaggtatctgtgatcaaatgacttgtcattggcactttcagtctttcctattctagccgttgtttttgtttgtattttttattattaatgacatatttagtcttcagatatattattttaaaggcaccacacatgtaaaacagttattacaaatattttatacataaatctcttggtagattttcagaataatagagatttatatcaagaaaaggaatctagattttgttgcattgtaggagcaaacaaggcttcatattctttttaaaatgacttgaaattttattataaatttccatagtttctatcaaggtcaactggcagttttattacctttgctatggacttgaacttactgtataaaattagttggaagccatgtaagaaaataacatctgaaaattcttgaacttaaaatcatgcttaaatggttgattctccaatttctttttttaaaaataagttaattgcttttgcaggttgacactctcacctgacagatgatgtaattcttcaatttttataatcttaaaatttttaaattttatatttgtaaatacagtacacattttatttcttggattttgagagacattgttaattttgggggaattggcattgcgaaagacttgaaaactaatgagtaaagtctgctgaatgaataaaccgtgtgattgtttcccg

SEQ ID NO: 286594 - DNA, 1000 bp, Homo Sapiens; identical to SEQ ID NO: 116289

SEQ ID NO: 286595 - DNA, 793 bp, Homo Sapiens; identical to SEQ ID NO: 221572

SEQ ID NO: 286596 - DNA, 1000 bp, Homo Sapiens
caattagccttaagttgtgctagcaaccctaataggtgatgcagataatagcctacttcttagaatatgcctgtccaaaattgcagacttgaaaagtttgttcttcgctcaatttttttgtggactactttttttatatcaaatttaagctggatttgggggcataacctaatttgagccaactcctgagttttgctatacttaaggaaagggctatctttgttctttgttagtctcttgaaactggctgctggccaagctttatagccctcaccatttgcctaaggaggtagcagcaatccctaatatatatatatagtgagaactaaaatggatatatttttataatgcagaagaaggaaagtccccctgtgtggtaactgtattgttctagaaatatgctttctagagatatgatgattttgaaactgatttctagaaaaagctgactccatttttgtccctggcgggtaaattaggaatctgcactattttggaggacaagtagcacaaactgtataacggtttatgtccgtagttttatagtcctatttgtagcattcaatagctttattccttagatggttctagggtgggtttacagctttttgtacttttacctccaataaagggaaaatgaagctttttatgtaaattggttgaaaggtctagttttgggaggaaaaaagccgtagtaagaaatggatcatatatattacaactaacttcttcaactatggactttttaagcctaatgaaatcttaagtgtcttatatgtaatcctgtaggttggtacttcccccaaactgattataggtaacagtttaatcatctcacttgctaacatgtttttatttttcactgtaaatatgtttatgttttatttataaaaattctgaaatcaatccatttgggttggtggtgtacagaacacacttaagtgtgttaacttgtgacttctttcaagtctaaatgatttaataaaactttttttaaatt

SEQ ID NO: 286597 - DNA, 1000 bp, Homo Sapiens
atctgtcatcaattctgccaattacgtgtatttccttggcttggagaaagtcttaacccttgatcacccagatgcagtgaagctttttacccgccagcttttggaactccatcagggacaaggcctagatatttactggagggataattacacttgtcccactgaagaagaatataaagctatggtgctgcagaaaacaggtggactgtttggattagcagtaggtctcatgcagttgttctctgattacaaagaagatttaaaaccgctacttaatacacttgggctctttttccaaattagggatgattatgctaatctacactccaaagaatatagtgaaaacaaaagtttttgtgaagatctgacagagggaaagttctcatttcctactattcatgctatttggtcaaggcctgaaagcacccaggtgcagaatatcttgcgccagagaacagaaaacatagatataaaaaaatactgtgtacattatcttgaggatgtaggttcttttgaatacactcgtaatacccttaaagagcttgaagctaaagcctataaacagattgatgcacgtggtgggaaccctgagctagtagccttagtaaaacacttaagtaagatgttcaaagaagaaaatgaataatgttaagccattcttgattggacctcatagcttattttagttaatcttttttttgtcttttagccttaccaccttttaaaaaatttgttattctccagaaacagtaaataggtgagtaggggtggtgcaagtgaattcgttttcatttagaagcccctctgtacagataatcaaaattcaaagttgaaagaatcaaaagcagccacagttatgtaggtctgatttgaatgtcataattgcagtgacaggacattgccaccaactctatcctactaccatcaatgttgtgtttattccgtcaataaaaaagacttgcttccaggcaaaaaaaaaaaaaaaaaaaaaaaaaaaaaa

SEQ ID NO: 286598 - DNA, 1000 bp, Homo Sapiens; identical to SEQ ID NO: 221574

SEQ ID NO: 286599 - DNA, 1000 bp, Homo Sapiens; identical to SEQ ID NO: 221575

SEQ ID NO: 286600 - DNA, 1000 bp, Homo Sapiens
cctcggcctcccaaagtgctgggattatgagcacgagccacggcgtccagccgattttccgctccctttcaagtgttaactcaccccctgacaggtgaagagggaagggttccttttacgcacaaccaaggttagcaaatgcccatgcaggatatggggtccctgcctctctggttgcttcatttcagcacttctatattagctgcttatggggaccctaaaatgaactggtcacccctccaccagctaagaaacaagggtgggattgctgtgccataagtcacactgaacgacttgcttctggcaagcatgctcctgtgtgtcaggaccttaccaaggcaaagaaatgccaggctcaagaggagcaggacgtgagacattggcctggcttctaacctggtctgagtggaagagacacagcttagggatttcagttttgctcttaggctactagatactgttatttcaccccctgagggagggacaggaagagcacggatttattttctctccgtcttcagtacttattttagcatctagtcataccccagggagagatgcgagacggtgtcactggctcagctgaagcagatgagcccgtctctagcagagatgtgcctgtttcttaggcatccgttcagcactagtcttggccatcagatttttaaaaaagaaatagctcatgaggcatttgcaacttctcctctctagacttctttctagttttcctctgttgtgtcactgcgatgtgtccagggacaaagccataagtagagcatacatacttaagactatgctgtacatataagacaagacctgtctgggttaaagcacgaccttatgcccaagcatttactctggtgctgaataacgcgaactactggaatcagcctcccccaactctgcgcgccccctgcccccctgctcctatcccattcttgctctcaaatggaccacaccattctcaactcgtttataaataaagggatgcagaattgca

SEQ ID NO: 286601 - DNA, 1000 bp, Homo Sapiens
ggctgagggacccggtggagcggaagtcactccctgaggcagtggcgacagcggcggcgagaggatgaacaacaagttcgacgctttgaaagatgatgacagtggggaccatgatcagaatgaagaaaacagcacacagaaagatggtgagaaggaaaaaacggaacgagacaagaatcagagcagtagcaagagaaaggctgttgtccctggaccggcagagcatcccctgcagtacaactacactttttggtactccaggagaacccccggccgtcccacgagctcacagagctatgaacagaatatcaaacagattggcacctttgcctctgtggagcagttctggaggttttatagccacatggtacgtcctggggacctgacaggccacagtgacttccatctcttcaaagaaggaattaaacccatgtgggaggatgatgcaaataaaaatggtggcaagtggattattcggctgcggaagggcttggcctcccgttgctgggagaatctcattttggccatgctgggggaacagttcatggttggggaggagatctgtggggctgtggtgtctgtccgctttcaggaagacattatttcaatatggaataagactgccagtgaccaagcaaccacagcccgaatccgggacacacttcggcgagtgcttaacctacctcccaacaccattatggaatacaaaactcacaccgacagcatcaaaatgccaggcaggctgggcccccaaaggctcctttttcaaaacctctggaagccgcggttgaatgtgccatgaccctctccctctctggatggcaccatcattgaagctggcgtcatcggagtctcttgttctgttggcgtgctacctggaagatccttctgtcctggacaagaggaattggaagagcattttatgttttaagaacaggctgacacgcagcagctacaacaacagctgagatcacttaataaatggtgctaaactaaaaaa

SEQ ID NO: 286602 - DNA, 1000 bp, Homo Sapiens; identical to SEQ ID NO: 116290

SEQ ID NO: 286603 - DNA, 979 bp, Homo Sapiens
ctgattatagttctgaggccctagctactcactttgcaaactccaggctccggtcgcgcacgggacgaactgcggggagtgagccgcgcgggccgccgtagtcagctgctaagagcaggaagagtccgagcggcgggcggagtctgcaggatggcaccggacccctggttctccacatacgattctacttgtcaaattgcccaagaaattgctgagaaaattcaacaacgaaatcaatatgaacgaaaaggtgaaaaggcaccaaagcttaccgtgacaatcagagctttgttgcagaacctgaaggaaaagatcgcccttttgaaggacttattgctaagagctgtgtcaacacatcagataacacagcttgaaggggaccgaagacagaacctcttggatgatcttgtaactcgagagagactacttctggcatcctttaagaatgagggtgccgaaccagatctaatcaggtccagcctgatgagtgaagaggctaagcgaggagcacccaacccttggctctttgaggagccagaggagaccagaggcttgggttttgatgaaatccggcaacagcagcagaaaattatccaagaacaggatgcaggccttgatgccctttcctctatcataagtcgccaaaaacaaatggggcaggaaattgggaatgaattggatgaacaaaatgagataattgacgaccttgccaacctagtggagaacacagatgaaaaacttcgcaatgaaaccaggcgggtaaacatggtggacagaaagtcagcctcttgtgggatgatcatggtgattttactgctgcttgtggctatcgtggttgttgcagtctggccgaccaactgatggcagtaaagagaccaccagcagtgacacctggcaatgacagatgcaagcccaacacccttttggtacgcaaaacctgctctcaataaattcccccaaagctctgaaaaaaaaaaaa

SEQ ID NO: 286604 - DNA, 1000 bp, Homo Sapiens; identical to SEQ ID NO: 221577

SEQ ID NO: 286605 - DNA, 1000 bp, Homo Sapiens
tgccatcacagtatctgttgcaaatgaaaaggcactagctaagtgtgagaagtacatgctgacccaccaggaactagcctccgatggggagattgaaactaaactaattaagggtgatatttataaaacaaggggtggtggacaatctgttcagtttactgatattgagactttaaagcaagaatcaccaaatggtagtcgaaaacgaagatcttccacagtagcacctgcccaaccagatggtgcagagtctgaatggaccgatgtagaaacaaggtgttctgtggctgtggagatgagagcaggatcccagctgggacctggatatcagcatcacgcacaacccaagcgcaaaaagccatgaactgacagtcccagtactgaaagaacattttcatttgtgtggatgatttctcgaaagccatgccagaagcagtcttccaggtcatcttgtagaactccagctttgttgaaaatcacggacctcagctacatcatacactgacccagagcaaagctttccctatggttccaaagacaactagtattcaacaaaccttgtatagtatatgttttgccatatttaatattaatagcagaggaagactccttttttcatcactgtatgaattttttataatgtttttttaaaatatatttcatgtatacttataaactaattcacacaagtgtttgtcttagatgattaaggaagactatatctagatcatgtctgattttttattgtgacttctccagccctggtctgaatttcttaaggttttataaacaaatgctgctatttattagctgcaagaatgcactttagaactatttgacaattcagactttcaaaataaagatgtaaatgactggccaataataaccattttaggaaggtgttttgaattctgtatgtatatattcactttctgacatttagatatgccaaaagaattaaaatcaaaagcactaagaaataaaaaaaaaaaaaaaaaaa

SEQ ID NO: 286606 - DNA, 1000 bp, Homo Sapiens
tacctgcggcatgtgccgctgcgcaaagtgcacctcttcaccctcatccagttgacctgtctcgtcctgctctgggtcatcaaggcatctccagctgccattgttttcccaatgatggttttggccttggtctttgtcaggaaagtcatggatctctgtttctctaagcgagagctgagctggctagatgatctcacgcctgaaagcaaaaagaagaagttggatgatgccaaaaagaaggccaaggaggaagaggtcatagtccttgcaccaactgtatacctgggggcctcaaattacagaacataggaagggtcatgtgaaaagtcagcatgtctggaatcccgagggttatatttaggagctgggaagattacccccaaagatgttctcagctaagaatggattagggattcttgcttctgtctgttcttaatttttgggtttgacaaccacttattttttcctttgtttataatctactcaccaggctcatacctacaatgtgaacatacagtatgcccttactagcagattcaatggctcacattctttcaaaaggtctaatttgacaaatacataagacccattatttcctagaatgtttgtaatatatctaattgcaaatggtgctgtggttggcaccatgcaaagataacttgcataggactttctgtcttttttcatttccctcagcacttggcatcttgtcatctacacaatggaccctcaataaattgcctatatgtgcaaagaaagaatgtgtagcaaatgaaaataccagacccagaaatgagtgagctgggaagtgtttccaaatacagttagtgcctaaaatagtgtcctttgaaaaaacttttaaaagacttttttttaggccaggcatagtgggttatccctgtaattccagggcttttgggagttgaagctggaggattacttgaggccagaagtttgagactagcctgggcaatatgatgagaccctgtctctacaaaaa

SEQ ID NO: 286607 - DNA, 1000 bp, Homo Sapiens; identical to SEQ ID NO: 116291

SEQ ID NO: 286608 - DNA, 1000 bp, Homo Sapiens; identical to SEQ ID NO: 221578

SEQ ID NO: 286609 - DNA, 1000 bp, Homo Sapiens; identical to SEQ ID NO: 221579

SEQ ID NO: 286610 - DNA, 1000 bp, Homo Sapiens; identical to SEQ ID NO: 116292

SEQ ID NO: 286611 - DNA, 1000 bp, Homo Sapiens; identical to SEQ ID NO: 221580

SEQ ID NO: 286612 - DNA, 1000 bp, Homo Sapiens
cgaggacctgctaaccaggctgcgggccaaccagagctgggaagattcgaacaccgacctcgtcccggcccctgcagtccggatactcacgccagaagtgcggctgggatccggcggccacctgcacctgcgtatctctcgggccgcccttcccgaggggctccccgaggcctcccgccttcaccgggctctgttccggctgtccccgacggcgtcaaggtcgtgggacgtgacacgaccgctgcggcgtcagctcagccttgcaagaccccaagcgcccgcgctgcacctgcgactgtcgccgccgccgtcgcagtcggaccaactgctggcagaatcttcgtccgcacggccccagctggagttgcacttgcggccgcaagccgccagggggcgccgcagagcgcgtgcgcgcaacggggacgactgtccgctcgggcccgggcgttgctgccgtctgcacacggtccgcgcgtcgctggaagacctgggctgggccgattgggtgctgtcgccacgggaggtgcaagtgaccatgtgcatcggcgcgtgcccgagccagttccgggcggcaaacatgcacgcgcagatcaagacgagcctgcaccgcctgaagcccgacacggagccagcgccctgctgcgtgcccgccagctacaatcccatggtgctcattcaaaagaccgacaccggggtgtcgctccagacctatgatgacttgttagccaaagactgccactgcatatgagcagtcctggtccttccactgtgcacctgcgcgggggaggcgacctcagttgtcctgccctgtggaatgggctcaaggttcctgagacacccgattcctgcccaaacagctgtatttatataagtctgttatttattattaatttattggggtgaccttcttggggactcgggggctggtctgatggaactgtgtatttatttaaaactctggtgataaaaataaagctgtctgaactgttaaaaaaaaaaa

SEQ ID NO: 286613 - DNA, 1000 bp, Homo Sapiens
atttgtaatttgggacttggattatttatctagagatgtttgtatattttgtcagtaactaatactgcgctgccatcatggtgactgtcatggttctacagaaatgccctccatgtgtccctctaatgttgcatgtttcagtgggttggaagttttgtatatttattgtattaacacagagtgtcataaaataaaatgctgtttactggatgtttgtttgtataattttgaacactataatagcaattcagagacagacattgttaaaggtttgatgtatatagaaattccatgtttgattttttaaaatatgtgtataagtctgtcatgtgctaaacaaaataatatgaaagacctagttaaaaattctaaccaatgtaaaatgaccatttttctgttgcattagacctttacaggtaatggaacatgagcttcacccatattaaatattttggcccctttaaggtcaaaatacagatcatctagaagttagattcaaaatggaaaacctattcatggctcagatttttcattgtgggttaaaaatgggtgtctctgtactagtattgtatttattcaattgaacttgtattctgatttctatccttgctacctattgctgttttatgtactgatgaaagtacctatttgtgtatattggatttttcacttggttagctaaagaagatgtaaaaatatctaaaataatgttcatggtgaatcttattttgagaaatacatgttaaaaaaggaacagtattctttattttctgggtgttatatttaaaaaagcaagtttggatttttacacctaatttactaggaaaatattttattctgtaattcatgttaagattatgtatggtttgcattttaaggggatttatgttaggttaattagttgtttctgtaaatcatttgtaatagcatagtgctttttactcattgctgtatctttttctgaaaacactgttgttaacatctaaaaaaaaaaaaaaaa

SEQ ID NO: 286614 - DNA, 1000 bp, Homo Sapiens; identical to SEQ ID NO: 116294

SEQ ID NO: 286615 - DNA, 1000 bp, Homo Sapiens
ccctatagccaatcagatcaaagcatgaaccggcacaactttccttgcagtgtccatcagtacgaatcctcggggacagtgaacaatgatgattcagatcttttggattcccaagtccagtatagtgctgagcctcagctgtatggtaatgccaccagtgaccatcccaacaatcaagatcaaagtagcagtcttcctgaagaatgtgtaccttcagatgaaagtactcctccgagtattaaaaaaatcatacatgtgctggagaaggtccagtatcttgaacaagaagtagaagaatttgtaggaaaaaagacagacaaagcatactggcttctggaagaaatgctaaccaaggaacttttggaactggattcagttgaaactgggggccaggactctgtacggcaggccagaaaagaggctgtttgtaagattcaggccatactggaaaaattagaaaaaaaaggattatgaaaggatttagaacaaagtggaagcctgttactaacttgaccaaagaacacttgatttggttaattaccctctttttgaaatgcctgttgatgacaagaagcaatacattccagctttcctttgattttatacttgaaaaactggcaaaggaatggaagaatattttagtcatgagttgttttcagttttcagacgaatgaatgtaataggaaactatggagttaccaatattgccaagtagactcactccttaaaaaatttatggatatctacaagctgcttcttaccagcaggagggaaacacacttcacacaacaggcttatcagaaacctaccagatgaaactggatataatctgagacaaacaggatgtgtttttttaaacatctggatatcttgtcacatttttgtacattgtgactgctttcaacatatacttcatgtgtaattatagcttagactttagccttcttggacttctgttttgttttgttatttgcagtttacaaatatagtattattctct

SEQ ID NO: 286616 - DNA, 1000 bp, Homo Sapiens
gactttcccggtaactattccggttatgatgatgcctgggaccaggaccgcttcgagaagaatttccgtgtggatgtagtacacatggatgaaaactcactggagtttgacatggtgggaattgacgcagccattgccaatgcttttcgacgaattctgctagctgaggtgccaactatggctgtggagaaggtcctggtgtacaataatacatccattgttcaggatgagattcttgctcaccgtctggggctcattcccattcatgctgatccccgtctttttgagtatcggaaccaaggagatgaagaaggcacagagatagatactctacagtttcgtctccaggtcagatgcactcggaacccccatgctgctaaagattcctctgaccccaacgaactgtacgtgaaccacaaagtgtataccaggcatatgacatggatccccctggggaaccaggctgatctctttccagagggcactatccgaccagtgcatgatgatatcctcatcgctcagctgcggcctggccaagaaattgacctgctcatgcactgtgtcaagggcattggcaaagatcatgccaagttttcaccagtggcaacagccagttacaggctcctgccagacatcaccctgcttgagcccgtggaaggggaggcagctgaggagttgagcaggtgcttctcacctggtgttattgaggtgcaggaagtccaaggtaaaaaggtggccagagttgccaacccccggctggataccttcagcagagaaatcttccggaatgagaagctaaagaaggttgtgaggcttgcccgggttcgagatcattatatctgtaagaaagatttgctggctgcggtggctcacacctgtaatcccagcactttgggaggccaaggcgagtggatcacggggtcaagagagcgagaccatcctggctaacatggtgaaaccccgtctctataaaaaaaaaaaaaaaaaaaaaaaaaaaaaa

SEQ ID NO: 286617 - DNA, 1000 bp, Homo Sapiens; identical to SEQ ID NO: 116295

SEQ ID NO: 286618 - DNA, 1000 bp, Homo Sapiens
ctccatcctgagctccatggagaagccacccagcctcggtgaccaggagactcggcgcaaggcccgagaacaggccgcccgcctgaagaaactacaagagcaagagaaacaacagaaagtggagtttcgtaaaaggatggagaaggaggtgtcagatttcattcaagacagtgggcagatcaagaaaaagtttcagccaatgaacaagatcgagaggagcatactacatgatgtggtggaagtggctggcctgacatccttctcctttggggaagatgatgactgtcgctatgtcatgatcttcaaaaaggagtttgcaccctcagatgaagagctagactcttaccgtcgtggagaggaatgggacccccagaaggctgaggagaagcggaagctgaaggagctggcccagaggcaagaggaggaggcagcccagcaggggcctgtggtggtgagccctgccagcgactacaaggacaagtacagccacctcatcggcaagggagcagccaaagacgcagcccacatgctacaggccaataagacctacggctgtgtgcccgtggccaataagagggacacacgctccattgaagaggctatgaatgagatcagagccaagaagcgtctgcggcagagtggggaagagttgccgccaacctctaggcgccccgcccagctccctttgacccctggggcagggcagggggcagggagagacaaggctgctgctattagagcccatcctggagccccacctctgaaccacctcctaccagctgtccctcaggctgggggaaaacaggtgtttgatttgtcaccgttggagcttggatatgtgcgtggcatgtgtgtgtgtgtgtgagagtgtgaatgcacaggtgggtatttaatctgtattattccccgttcttggaattttcttccccatggggctggggtactttacattcaataaatactgtttaacccaaaaaaaaaaaaaaaaaaaaaaaaaaaa

SEQ ID NO: 286619 - DNA, 1000 bp, Homo Sapiens; identical to SEQ ID NO: 116298

SEQ ID NO: 286620 - DNA, 627 bp, Homo Sapiens; identical to SEQ ID NO: 116299

SEQ ID NO: 286621 - DNA, 1000 bp, Homo Sapiens; identical to SEQ ID NO: 116300

SEQ ID NO: 286622 - DNA, 1000 bp, Homo Sapiens; identical to SEQ ID NO: 221584

SEQ ID NO: 286623 - DNA, 1000 bp, Homo Sapiens; identical to SEQ ID NO: 116302

SEQ ID NO: 286624 - DNA, 1000 bp, Homo Sapiens; identical to SEQ ID NO: 116304

SEQ ID NO: 286625 - DNA, 1000 bp, Homo Sapiens
tcctgggggaagcgcccgcgaaaaccgtggagagaagccgccgcccgggctgctgagaggcccggagagggactctgtccccggggagccatcgccttcagtgtgcagggacggcaccgaggagtctgagccgggggcgcgggcgccttccgcagagacctgcgcccacaggtgctgtcttagtggactgggacgtgaacctttcgctctccttctggactgggagaagggaggcttgggtgttgtgttttttgttttgtttgtttgtttgtttttaaagatctcctcagggtcggacttcattttgtactgtgggctgtgctggccctttcaaggtttttcaagagttggttttgcgtttccaacctcggagaattccaggcactccccttccccctccgctgacatacttgtataagcggtcatcgttgcgtcatggggcaggcgtggggagcttcctgtcgccttgcgtgggtgtggggcctgggaggaggtcctggggcgtgcacccgccctgggcagtggggaggagagtggcctgagttacttcacccccgcgtgctgctggttaatgtcccgcgtctctgcaccttcgggtgggagcggggactgatctactttcacattctcaagtttttctcatctgcattagaggtgcccagtaggttcccaggttccagcgtgcccctccctcagacacacggacacaatcagccgagaagttcctggtctgaatcacgagaatgtggaggggtggggggtgtcagtggaaaggcataaggctgagctgagaccagttgctggtgaaactgggccaatctggggaggggaacatccttgccagggagtttctgagggtctgctttgtttacctttcgtgcggtggattctttttaactccgtctacctggcgttttgttagaaatgtcagataggaaaataaaaaccatttgagtaaaaaaaaaaaaaaaaaaaaaaaaaaaaaaaaaaaaaaaaaaaa

SEQ ID NO: 286626 - DNA, 799 bp, Homo Sapiens; identical to SEQ ID NO: 116305

SEQ ID NO: 286627 - DNA, 1000 bp, Homo Sapiens; identical to SEQ ID NO: 116306

SEQ ID NO: 286628 - DNA, 1000 bp, Homo Sapiens; identical to SEQ ID NO: 116307

SEQ ID NO: 286629 - DNA, 1000 bp, Homo Sapiens; identical to SEQ ID NO: 221587

SEQ ID NO: 286630 - DNA, 1000 bp, Homo Sapiens; identical to SEQ ID NO: 221588

SEQ ID NO: 286631 - DNA, 1000 bp, Homo Sapiens
cctggcaaggtcctcgataaaggaagagctgagagctacattataagaataagtaaacatttcctggacctccaagaagattttgataaagctgctttaataaatacttctggtctgatacctaaggagcctggttcagtagaaagttttgaatttaaaccagaaccttctaaaatagagaatggtacgacattctatattgcaattcaagccatccatgaagccaatgtcacctcagaggtttcaaacattgcacaagcaactaactttattcctccacaggaacccagcattcctgatctgggtaccaatatttctgcaatcagtttggcaatttttggattagctgtaattttatctatattttaaactagaaattatattagaactcaaattcaatgttatacatacttggtaaacatttatttaaaatttaatttactatacttattgtctattataaagctcattataatataaaaagtgaagtacaaaagttgtaagtttcctaattacttgattaattaatactatttgagttattaaatgttaatcaaaatgagtatatcatttcctgtctggaataatccactcattaatttttaatatgaaaagatatatatttgtacttgtaagcattttaagaaacatttttaaagtgtgctacaaattcatttggtgtactaacatcaaaatgtatccaagccatttaaaaaatatttatatatacatagtagcaaatagttttatagatttatttgtatcgcattttttattacaaatgaatatttcatgtttatataagctgtaatcaaaaaggactagtagtagtagtaaggaagtcaaatttgtttttttatcattgattataagtggtatatttgttttttgtcattgattaaaagtgattttagccctaggcccgaaatgactagcaaatatcattttctgtatgaattgtggaacatcacaataaaattatttctgtgctgatgctaaa

SEQ ID NO: 286632 - DNA, 1000 bp, Homo Sapiens; identical to SEQ ID NO: 116308

SEQ ID NO: 286633 - DNA, 1000 bp, Homo Sapiens; identical to SEQ ID NO: 221589

SEQ ID NO: 286634 - DNA, 1000 bp, Homo Sapiens; identical to SEQ ID NO: 116310

SEQ ID NO: 286635 - DNA, 1000 bp, Homo Sapiens; identical to SEQ ID NO: 116311

SEQ ID NO: 286636 - DNA, 1000 bp, Homo Sapiens
tgtcctccctaataaaagattttcccaaggttgatctggaggtgacgtttcccaaggcatggttgtgacagtcttcctgaaagcaagggccgtttctccacagaatgaggaggtcttcacggatggctttgccgattccagcccttggtccttggatagatttctgttgggcaagggagacttcgagaatgctggcacccatagcgacatctgccctgagctgctcagcaggcaggcagcagcctcccgcacccatgggagagagttttgttttcttggccgggctgggcaggtgcgccttcctttctctctcctgtgaagaactgcaggagggccctcagctgtgaggttgtggatgaacaggcctgttcgccctggggtccgggcctggcacaggaagcagctagactaggggagtccttggagcatctgagaggggttttctttcctctgggaagagtcgcaagtcttatgaggatgccacaatctgggcagtgacccgtggccctggggaccttcctagtgccccccaaaaccaaggaagcattcacgtgagatggggagtcagccttccagctggtgtgtaggaaagccaggtccctgggcccttgtcccatgtggggttgagatccagatctccatgagatattcccatcctccgccgagcggtgatgcgtgaccgtgtgtgcaggccgctgttctcccaagctcggggccatgccgtgccaccgtcaccagagccagctgcagcactggggcagccactgtcgccggacttggggaagcccagggtgaagacagtcactcatccgtgcaagctctccagaagggatgcaagctctccagaaggggtgtgatctctgagcagtggggagtggagtcaccactcgggacatagagggtggacagttcaggcctgtgtctgcctccttgggactgtggagtgggtgccctcagtaaagcgctttgttggaatggtaaaaaaaaaaaaaaaaaaaaa

SEQ ID NO: 286637 - DNA, 1000 bp, Homo Sapiens; identical to SEQ ID NO: 221590

SEQ ID NO: 286638 - DNA, 1000 bp, Homo Sapiens; identical to SEQ ID NO: 221591

SEQ ID NO: 286639 - DNA, 1000 bp, Homo Sapiens; identical to SEQ ID NO: 221592

SEQ ID NO: 286640 - DNA, 1000 bp, Homo Sapiens
ttaacttctttcttgatgaacgcctgcctgtaaatccaaacttcactctgaaggacaatgaagataacacagccagcattctgacaaggcggaggagatttagtcgaactgttcaggatgtgtattatctgcccattatgatctctgatggtggaatcccctctctcagcagcagcagcaccctcaccatcagggtttgtgcatgcgagagagatgggcgtgtgcggacctgccatgcagaagccttcctgtcctcggctggtttgagtacaggagccttaatcgctattcttctctgtgttctcattctcctggcaattgtggtactttttatcaccctgaggcgcagcaaaaaagagcccttgatcatttcagaagaggatgtacgggagaacgtggtcacctatgatgatgaaggaggcggagaggaagacacagaggcctttgacatcacagccttgaggaatccttctgctgctgaggagctcaagtaccggagggatatcagacctgaagtgaagctcactcccagacaccagacatcatccaccctggaaagcatagatgttcaggaatttattaagcaaagactggcagaagcagacctagaccctagcgttcccccttatgactctcttcagacttatgcctatgagggtcagagatcagaagctgggtctatcagctcgctggattcagcaacgacacaatcagaccaggattatcactaccttggagactggggacccgagtttaaaaagttagctgaactctatggagaaatagaatctgaaagaacaacttagggggtcagttcttgcaaccttgtggaatttgcttcctgagtaagtggatatacaacctcagcaatgacaaggaagaagtgtggaaacagtacttggaactgaggaagctggacacagctcctgtagaaacaagtgcccttttcatgatcgaaactgggttatttaattggaagaaagtaaaaaaaaaaaaaaaa

SEQ ID NO: 286641 - DNA, 1000 bp, Homo Sapiens
agatcgtggctctgaaacgggtgaggctggatgacgatgatgagggtgtgccgagttccgccctccgggagatctgcctactcaaggagctgaagcacaagaacatcgtcaggcttcatgacgtcctgcacagcgacaagaagctgactttggtttttgaattctgtgaccaggacctgaagaagtattttgacagttgcaatggtgacctcgatcctgagattgtaaagtcattcctcttccagctactaaaagggctgggattctgtcatagccgcaatgtgctacacagggacctgaagccccagaacctgctaataaacaggaatggggagctgaaattggctgattttggcctggctcgagcctttgggattcccgtccgctgttactcagctgaggtggtcacactgtggtaccgcccaccggatgtcctctttggggccaagctgtactccacgtccatcgacatgtggtcagccggctgcatctttgcagagctggccaatgctgggcggcctctttttcccggcaatgatgtcgatgaccagttgaagaggatcttccgactgctggggacgcccaccgaggagcagtggccctctatgaccaagctgccagactataagccctatccgatgtacccggccacaacatccctggtgaacgtcgtgcccaaactcaatgccacagggagggatctgctgcagaaccttctgaagtgtaaccctgtccagcgtatctcagcagaagaggccctgcagcacccctacttctccgacttctgtccgccctaggccccgggacccccggcctccaggctggggcctggcctatttaagccccctcttgagaggggtgagacagtgggggtgcctggtgcgctgtgctccagcagtgctgggcccagccggggtggggtgcctgagcccgaatttctcactccctttgtggactttatttaatttcataaattggctcctttcccacagtcaaaaaa

SEQ ID NO: 286642 - DNA, 1000 bp, Homo Sapiens; identical to SEQ ID NO: 116312

SEQ ID NO: 286643 - DNA, 1000 bp, Homo Sapiens; identical to SEQ ID NO: 116313

SEQ ID NO: 286644 - DNA, 1000 bp, Homo Sapiens; identical to SEQ ID NO: 221595

SEQ ID NO: 286645 - DNA, 1000 bp, Homo Sapiens
atcacccaagacgccgagagtggagcaggaggaaccgatctccccggggagcaccctgcctgaggtcaagctgcggaggtccaagaagaggacaaagagaagcagcgtagtttttgcggatgagaaagcagctgcagagtcggacctgaagcggctttccaggaagcatgagttcatgagtgacaccaacctctcggagcatgcggccatccccctcaaggcgtctgtcctctctcaaatgagctttgccagccagtccatgcctaccatcccagccctggcgctctcagtggcaggcatccctgggttggatgaggccaacacatctccccgcctcagccagaccttcctccaactctcagatggtgacaagaagacactcacacggaagaaggtcaatcagttcttcaagacaatgctggccagcaaatcggctgaagaaggcaaacagatcccagactcgctgtccacggacctgtgagctgctgctgactagggctgcatgggagagccagggaggggagtttctggaagaggaaagccatgcgtggaacatcgaagcctcagagagtgggagactgtccccatcagttgtccttacttagaggagacagagaggccaatcaggtcccagagctggagtgctaacaagcccagcatcccctggggctgtgatcatggtggatgaggaagcctcaacgtagattcctgaactcaaggtaccagcaagaatgccttctcccagtgtgctctccccaacatcctaggcacagctttcataacccagtttcttaggtgtaagaaactgcttttatctcatttattaagtctcagaacttaacagaaaaggaagccttttaaatattctttttaattttattttagattaacagttttgtactttacatttttttatacaaccaaccagtttcttttctagccaatcatctctgaagagttgctgtttcttactgacaataaaaaatgttctcttggttcg

SEQ ID NO: 286646 - DNA, 1000 bp, Homo Sapiens
taataacctactgggaaagatggaggtctaaattacctccagggtttttctgggggtttatcaccagtgtgggtcccttctgataccaccaggttcactccaggcagagtggggcggaaggctgctgaggatatgggtcagttacagcagccctcacctcaaagggctggcctgcttctcagcctacattcatttgcaagcttcaatctctggaccatctggtgttcacaggtgttagagggttaggggttaggggctagttttggatttgattcataggtaggagggcttagattttaaggcacttctgaaagtcaatccctggacaaggcagtcatcacataagaacagctaccttctccacttggtggcacaagaggtagggaggggagtatgggttcatttggcttcgcattatgcaaggtgaaaccgtttgttttccctctccattttccctaactaaatgaaaaggacacattctgaaatcccttttgttggagaataagtcagtctgaggggaaatgggaggccagagatgagaaccctttgaaaagattgtaaaatactgattttcattctttcaagcttatttgtaaatacctatttgaatgctgtgtatttgtacaggaatttgagcaaaaaatgtatagagtgtgatgtccaattggtattcagcactataaatgtgtttttaacctcccgcattctgtgcttatttaaaacaaggaaacttctaaccatttcttttgtgtattcatgtttaaagaaaaaaagtgatttaaaaatgatcttacctgtaccagaaaagcaaagttaaaggaaacaaaatttgtaccattgtcccaagaggtattttactgtatatattgtggtagcatgttcaaaatccaacaagtaatgtgaattttagatgtaaatatctgccacttgattttttttccccctttccccacttccttgactgctgtgatgtgaattaaagataaatacgtgatactga

SEQ ID NO: 286647 - DNA, 1000 bp, Homo Sapiens
attcctgtgtcctgtttcttgactttcaatatctttgactggttgggccggagcctcacagctgtattcatgtggcctgggaaggacagccgctggctgccaagcctggtgctggcccggctggtgtttgtgccactgctgctgctgtgcaacattaagccccgccgctacctgactgtggtcttcgagcacgatgcctggttcatcttcttcatggctgcctttgccttctccaacggctacctcgccagcctctgcatgtgcttcgggcccaagaaagtgaagccagctgaggcagagaccgcaggagccatcatggccttcttcctgtgtctgggtctggcactgggggctgttttctccttcctgttccgggcaattgtgtgacaaaggatggacagaaggactgcctgcctccctccctgtctgcctcctgccccttccttctgccaggggtgatcctgagtggtctggcggttttttcttctaactgacttctgctttccacggcgtgtgctgggcccggatctccaggccctggggagggagcctctggacggacagtggggacattgtgggtttggggctcagagtcgagggacggggtgtagcctcggcatttgcttgagtttctccactcttggctctgactgatccctgcttgtgcaggccagtggaggctcttgggcttggagaacacgtgtgtctctgtgtatgtgtctgtgtgtctgcgtccgtgtctgtcagactgtctgcctgtcctggggtggctaggagctgggtctgaccgttgtatggtttgacctgatatactccattctcccctgcgcctcctcctctgtgttttttccatgtccccctcccaactccccatgcccagtttttacccatcatgcaccctgtacagttgccacgttactgccttttttaaaaatatatttgacagaaaccaggtgccttcagaggctctctgatttaaataaacctttcttgttttttt

SEQ ID NO: 286648 - DNA, 1000 bp, Homo Sapiens; identical to SEQ ID NO: 221597

SEQ ID NO: 286649 - DNA, 1000 bp, Homo Sapiens
agaggacactaggagactggttaggacaaaaagaccttctccctagcccttctaccccacctgacctctgcaagagggggcattgatacatcatcgggaaaaaactttgctccaggcatcactgattccctctcccacccaaggagaacgtttggtacaatcgacatcctagccccacccagaggtggccctcccaggctggtatttatctgcaaggttgtagtcaagaggtttttctccccgctttttgtttttaagcttctagacactccttgaaatgtgtgtgtgatggagggaaggggacagatttgaggactgaagctggggcttggggattgccactaagtacagctgatggtttctccccggacactcgcctactaagtacccttggggtggtgctgggtcattacttctgagccccagccccaatccagagaagcgctgttgcccgccctccacccactaggtgaacagcaggatgccctgttgggggcttcaggtctctgtgggtgggaatgcaagtgaacttgggagggggcacgggcctgtagatcagggatagcgctgttgatcccctctctgtggctccaacccgttgggtcccttgctgcaaacccatgaagctggccctcagctccctgaccccctgtcctaggtcatgaaggacactctgcagggtgaagcaccagggagaggcctcggctgtctcctgtccccggcggggtgcctgctgtccgtcccgctttcatgttactgttgcagcttgtgctgagcctgcccagttggaggagactgggcacccctgcctcctgcctcccgcctcccgccaccctgtctcagtacctcccccccccgccccctgaaacatgtgcccctgccaaggccggagacccacagccctgaaacgagaagtgcccttaaggatcaccccagcccccacagccctggaataaatttcgcaattagtttccaaaaaaaaaaaaaaaaaaaaaaaaaa

SEQ ID NO: 286650 - DNA, 1000 bp, Homo Sapiens; identical to SEQ ID NO: 116315

SEQ ID NO: 286651 - DNA, 1000 bp, Homo Sapiens
atcctcagcttcatggggacctttgagctggagcatcttcctggcctcccaatatggattcgcattggagttcactctggtccctgtgctgctggagttgtgggaatcaagatgcctcgttattgtctatttggagatacggtcaacacagcctctaggatggaatccactggcctccctttgagaattcacgtgagtggctccaccatagccatcctgaagagaactgagtgccagttcctttatgaagtgagaggagaaacatacttaaagggaagaggaaatgagactacctactggctgactgggatgaaggaccagaaattcaacctgccaacccctcctactgtggagaatcaacagcgtttgcaagcagaattttcagacatgattgccaactctttacagaaaagacaggcagcagggataagaagccaaaaacccagacgggtagccagctataaaaaaggcactctggaatacttgcagctgaataccacagacaaggagagcacctatttttaaacctaaatgaggtataaggactcacacaaattaaaatacagctgcactgaggcagcgacctcaagtgtcctgaaagcttacattttcctgagacctcaatgaagcagaaatgtacttaggcttggctgccctgtctggaacatggactttcttgcatgaatcagatgtgtgttctcagtgaaataactaccttccactctggaaccttattccagcagttgttccagggagcttctacctggaaaagaaaagaaatgaatagactatctagaacttgagaagattttattcttatttcatttattttttgtttgtttatttttatcgtttttgtttactggctttccttctgtattcataagattttttaaattgtcataattatattttaaatacccatcttcattaaagtatatttaactcataatttttgcagaaaatatgctatatattaggcaagaataaaagctaaagg

SEQ ID NO: 286652 - DNA, 1000 bp, Homo Sapiens; identical to SEQ ID NO: 116317

SEQ ID NO: 286653 - DNA, 1000 bp, Homo Sapiens
aaaaggcagcagcgaaggataaatcttcagacaaaaaagtgcaaacaaaagggaaaaggggagcaaagggaaaacaggccgaagtggctaaccaagaaactaaagaagacttacctgcggaaaacggggaaacgaagactgaggagagtccagcctctgatgaagcaggagagaaagaagccaagtctgattaataaccatataccatgtcttatcagtggtccctgtctcccttcttgtacaatccagaggaatatttttatcaactattttgtaaatgcaagttttttagtagctctagaaacatttttaagaaggagggaatcccacctcatcccattttttaagtgtaaatgcttttttttaagaggtgaaatcatttgctggttgtttattttttggtacaaccagaaaatagtgtgggatattgaattatgggaggctctgactgtctcgggtgtcagcttaacattccacagatggggggttagtttttatatcctataatacaaagcatattaaatggcaatatggagtcagtcctgcatttaatgtcttgaacattttaaattacttctattaccatgttgttttttagtagaattgtttcctaaagaaaaccactctttgatcatggctctctctgccagaattgtgtgcactctgtaacatctttgtggtagtcctgttttcctaataactttgttactgtgctgtgaaagattacagatttgaacatgtagtgtacgtgctgttgagttgtgaactggtgggccgtatgtaacagctgaccaacgtgaagatactggtacttgatagcctcttaaggaaaatttgcttccaaattttaagctggaaagtcactggaataactttaaaaaagaattacaatacatggctttttagaatttcgttacgtatgttaagatttgtgtacaaattgaaatgtctgtactgatcctcaaccaataaaatctcagttatgaaaataaaaaaaaaa

SEQ ID NO: 286654 - DNA, 1000 bp, Homo Sapiens
cactccaggactgccagaggaagcaatcaccaaaatgaagactgctttaattttgctcagcattttgggaatggcctgtgctttctcaatgaaaaatttgcatcgaagagtcaaaatagaggattctgaagaaaatggggtctttaagtacaggccacgatattatctttacaagcatgcctacttttatcctcatttaaaacgatttccagttcagggcagtagtgactcatccgaagaaaatggagatgacagttcagaagaggaggaggaagaagaggagacttcaaatgaaggagaaaacaatgaagaatcgaatgaagatgaagactctgaggctgagaataccacactttctgctacaacactgggctatggagaggacgccacgcctggcacagggtatacagggttagctgcaatccagcttcccaagaaggctggggatataacaaacaaagctacaaaagagaaggaaagtgatgaagaagaagaggaggaagaggaaggaaatgaaaacgaagaaagcgaagcagaagtggatgaaaacgaacaaggcataaacggcaccagtaccaacagcacagaggcagaaaacggcaacggcagcagcggaggagacaatggagaagaaggggaagaagaaagtgtcactggagccaatgcagaaggcaccacagagaccggagggcagggcaagggcacctcgaagacaacaacctctccaaatggtgggtttgaacctacaaccccaccacaagtctatagaaccacttccccaccttttgggaaaaccaccaccgttgaatacgagggggagtacgaatacacgggcgtcaatgaatacgacaatggatatgaaatctatgaaagtgagaacggggaacctcgtggggacaattaccgagcctatgaagatgagtacagctactttaaaggacaaggctacgatggctatgatggtcagaattactaccaccaccagtgaagctccagcctg

SEQ ID NO: 286655 - DNA, 1000 bp, Homo Sapiens
ttgtctcaagaagaaaacgaactgggaaaatttcttcgatcccaaggtttccaagataaaaccagagcaggaaagatgatgcaagcgacaggaaaggccctctgcttttcttcccagcaaaggttggccttacgaaatcctttgtgtcgatttcaccaagaagtggagacttttcggcatcgggccatctcagatacttggctgacggtgaaccgcatggaacagtgcaggacggaatatagaggagcactattatggatgaaggacgtgtctcaggagcttgatccagacctctacaagcaaatggagaagttcaggaaggtacaaacacaagtgcgccttgcaaaaaaaaactttgacaaattgaagatggatgtttgtcaaaaagtggatcttcttggagcgagcagatgcaatctcttgtctcacatgctagcaacataccagcttgcctgggaccagtggcagggaccccggaacctgaaggtgctgacaaagatgacctgctgctgttgagtgagatcttcaatgcttcctccttggaagagggcgagttcagcaaagagtgggccgctgtgtttggagacggccaagtgaaggagccagtgcccactatggccctgggagagccagaccccaaggcccagacaggctcaggtttccttccttcgcagcttttagaccaaaatatgaaagacttacaggcctcgctacaagaacctgctaaggctgcctcagacctgactgcctggttcagcctcttcgctgacctcgacccactctcaaatcctgatgctgttgggaaaaccgataaagaacacgaattgctcaatgcatgaatctgtacccttcgggagggcactcacatgccgcccccagcagctcccctgggggctagcagaagtataaagtgatcagtatgctgttttaataattatgtgccattttaataaaatgaaagggtcaacggccctgtttatattggtataaaaaaaaaaaa

SEQ ID NO: 286656 - DNA, 1000 bp, Homo Sapiens
tatgcagatggttgaagacaccctcattgaacatgctcataccaaacctctccttccaagtcagctggttcggtatagagaagttcagctccctgacagaggatggtttgtttatcagcagagaaatgaagttcacaataactgtggcatcgagatatactaccaaacagacatgcaaagcacctcagagaatatgtttctggagctcttctgtcagattatctcggaaccttgcttcaacaccctgcgcaccaaggagcagttgggctatatcgtcttcagcgggccacgtcgagctaatggcatacagagcttgagattcatcatccagtcagaaaagccacctcactacctagaaagcagagtggaagctttcttaattaccatggaaaagtccatagaggacatgacagaagaggccttccaaaaacacattcaggcattagcaattcgtcgactagacaaaccaaagaagctatctgctgagtgtgctaaatactggggagaaatcatctcccagcaatataattttgacagagataacactgaggttgcatatttaaagacacttaccaaggaagatatcatcaaattctacaaggaaatgttggcagtagatgctccaaggagacataaggtatccgtccatgttcttgccagggaaatggattcttgtcctgttgttggagagttcccatgtcaaaatgacataaatttgtcacaagcaccagccttgccacaacctgaagtgattcagaacatgaccgaattcaagcgtggtctgccactgtttccccttgtgaaaccacatattaacttcatggctgcaaaactctgaagattccccatgcatgggaaagtgcaagtggatgcattcctgagtcttccagagcctaagaaaatcatcttggccactttaatagtttctgattcactattagagaaacaaacaaaaaattgtcaaatgtcattatgtagaaatattataaatccaaagtaa

SEQ ID NO: 286657 - DNA, 1000 bp, Homo Sapiens
ctttcctcggcctcaccaacgtggcggtcatgaacctctctgggaactgtctccggaaccttccggagcaggtgttccggggcctgggcaagctgcacagcctgcacctggagggcagctgcctgggacgcatccgcccgcacaccttcaccggcctctcggggctccgccgactcttcctcaaggacaacggcctcgtgggcattgaggagcagagcctgtgggggctggcggagctgctggagctcgacctgacctccaaccagctcacgcacctgccccaccgcctcttccagggcctgggcaagctggagtacctgctgctctcccgcaaccgcctggcagagctgccggcggacgccctgggccccctgcagcgggccttctggctggacgtctcgcacaaccgcctggaggcattgcccaacagcctcttggcaccactggggcggctgcgctacctcagcctcaggaacaactcactgcggaccttcacgccgcagcccccgggcctggagcgcctgtggctggagggtaacccctgggactgtggctgccctctcaaggcgctgcgggacttcgccctgcagaaccccagtgctgtgccccgcttcgtccaggccatctgtgagggggacgattgccagccgcccgcgtacacctacaacaacatcacctgtgccagcccgcccgaggtcgtggggctcgacctgcgggacctcagcgaggcccactttgctccctgctgaccaggtccccggactcaagccccggactcaggcccccacctggctcaccttgtgctggggacaggtcctcagtgtcctcaggggcctgcccagtgcacttgctggaagacgcaagggcctgatggggtggaaggcatggcggcccccccagctgtcatcaattaaaggcaaaggcaatcgaaaaaaaaaaaaaaaaaaaaaaaaaaaaaaaaaaaaaaaaaaaaaaaaaaaaaaaaaaaaaaaaaaaaaaa

SEQ ID NO: 286658 - DNA, 1000 bp, Homo Sapiens; identical to SEQ ID NO: 221598

SEQ ID NO: 286659 - DNA, 1000 bp, Homo Sapiens; identical to SEQ ID NO: 221599

SEQ ID NO: 286660 - DNA, 1000 bp, Homo Sapiens; identical to SEQ ID NO: 116319

SEQ ID NO: 286661 - DNA, 1000 bp, Homo Sapiens
accacaccgcagcccacggctcccccgacggtctgccccaccggaccccccactgtccacccctcagagcgccccacagctggccccacaggtcccccctcagctggccccacaggtccccccactgctggcccttctacggccactactgtgcctttgagtccggtggacgatgcctgcaacgtgaacatcttcgacgccatcgcggagattgggaaccagctgtatttgttcaaggatgggaagtactggcgattctctgagggcagggggagccggccgcagggccccttccttatcgccgacaagtggcccgcgctgccccgcaagctggactcggtctttgaggagcggctctccaagaagcttttcttcttctctgggcgccaggtgtgggtgtacacaggcgcgtcggtgctgggcccgaggcgtctggacaagctgggcctgggagccgacgtggcccaggtgaccggggccctccggagtggcagggggaagatgctgctgttcagcgggcggcgcctctggaggttcgacgtgaaggcgcagatggtggatccccggagcgccagcgaggtggaccggatgttccccggggtgcctttggacacgcacgacgtcttccagtaccgagagaaagcctatttctgccaggaccgcttctactggcgcgtgagttcccggagtgagttgaaccaggtggaccaagtgggctacgtgacctatgacatcctgcagtgccctgaggactagggctcccgtcctgctttggcagtgccatgtaaatccccactgggaccaaccctggggaaggagccagtttgccggatacaaactggtattctgttctggaggaaagggaggagtggaggtgggctgggccctctcttctcacctttgttttttgttggagtgtttctaataaacttggattctctaacctttaaaaaaaaaaaaaaaaaaaaaaaaaaaaaaaaaaaaaaaaaaaaaaaaaaaa

SEQ ID NO: 286662 - DNA, 1000 bp, Homo Sapiens; identical to SEQ ID NO: 116320

SEQ ID NO: 286663 - DNA, 1000 bp, Homo Sapiens
aaaactctcattattctctaactattacacatgggcatattctgatgtttctcatcctttgccagaagactaccttacatccatcgtaattgttctctaggaaaagagaacttttttcaaaattcaaaatactttttaaggatggcacagtaccatataactggagtaataaaacatgagcttacattcttacaataactaaaccacttaaaatgatcaaggcactaatgttttggtctgaaaagctgtgtactttatagacattttcagacattttggaaatttccattaaaggtggaaaatctatttttttcctcctttgcagtgtcttagtttgaatgaaacacttcgaagttctagaattctagaaagagccttaatgtatttgatgtattctgtgataagaggtactaatagtatccagcacagatttgcttttctttgctagcacaatgtgtgttgctgtcagaatattctttttatattctgtggaaaaataaaggaaattcagattgtttaaatgcctaaaagttttgagataagttttgtttcaattagaaaaggaaataggttttaggtggcatagtggcttaactggactgaattcaaatattctttcaacttcatctcaatagtgatttttgtatcagaatcttgtccaagttgtttcattgatttagtaagtgttctgcttccaacatctttctttttaagaaattcctagtgtcttttttggcctttgaggttttggtaattgtagacctgtttcataagctttgtaattcagaaatccttgtatttagtaagtgcttgttttacataactgataattttaaaatgttttctttgtgtgctgttagtattgattcaaatgtcagcagctttaagcctaatatttatgactttcacatttggaatttaaagacaaaaatacatcaaggagttatgctgacataattctaaggagttttgttgtattttagaataaaattataaagta

SEQ ID NO: 286664 - DNA, 686 bp, Homo Sapiens
gcagaagggaaacgtgaagaaggtgaagatggcggtggccagggccggggtcttgggagtccagtggctgcaaagggcatcccggaacgtgatgccgctgggcgcacggacagcctcccacatgaccaaggacatgttcccggggccctatcctaggaccccagaagaacgggccgccgccgccaagaagtataatatgcgtgtggaagactacgaaccttacccggatgatggcatggggtatggcgactacccgaagctccctgaccgctcacagcatgagagagatccatggtatagctgggaccagccgggcctgaggttgaactggggtgaaccgatgcactggcacctagacatgtacaacaggaaccgtgtggatacatcccccacacctgtttcttggcatgtcatgtgtatgcagctcttcggtttcctggctttcatgatattcatgtgctgggtgggggacgtgtaccctgtctaccagcctgtgggaccaaagcagtatccttacaataatctgtacctggaacgaggcggtgatccctccaaagaaccagagcgggtggttcactatgagatctgaggaggcttcgtgggcttttgggtcctctaactaggactccctcattcctagaaatttaaccttaatgaaatccctaataaaactcagtgctgtgtta

SEQ ID NO: 286665 - DNA, 740 bp, Homo Sapiens
ggcagagccccgctcagtcacccgcagcaggcgtgcagtttcccggctctccgcgcggccggggaaggtcagcgccgtaatggcgttcttggcgtcgggaccctacctgacccatcagcaaaaggtgttgcggctttataagcgggcgctacgccacctcgagtcgtggtgcgtccagagagacaaataccgatactttgcttgtttgatgagagcccggtttgaagaacataagaatgaaaaggatatggcgaaggccacccagctgctgaaggaggccgaggaagaattctggtaccgtcagcatccacagccatacatcttccctgactctcctgggggcacctcctatgagagatacgattgctacaaggtcccagaatggtgcttagatgactggcatccttctgagaaggcaatgtatcctgattactttgccaagagagaacagtggaagaaactgcggagggaaagctgggaacgagaggttaagcagctgcaggaggaaacgccacctggtggtcctttaactgaagctttgccccctgcccgaaaggaaggtgatttgcccccactgtggtggtatattgtgaccagaccccgggagcggcccatgtagaaagagagagacctcatctttcatgcttgcaagtgaaatatgttacagaacatgcacttgccctaataaaaaatcagtgaaatggaaaaaaaaaaaaaaaaaaaaaaaaaaaaaaaaaaaa

SEQ ID NO: 286666 - DNA, 1000 bp, Homo Sapiens
tgcgggggctgcgctgcggcccgcgggccccgggcccgagcctgctagtgcgccacggctcgggagggccctcctggacccgggagcggaccctggtggcggtgaagcccgatggcgtgcaacggcggctcgttggggacgtgatccagcgctttgagaggcggggcttcacgctggtggggatgaagatgctgcaggcaccagagagcgtccttgccgagcactaccaggacctgcggaggaagcccttctaccctgccctcatccgctacatgagctctgggcctgtggtggccatggtctgggaagggtacaatgtcgtccgcgcctcgagggccatgattggacacaccgactcggctgaggctgccccaggaaccataaggggtgacttcagcgtccacatcagcaggaatgtcatccacgccagcgactccgtggagggggcccagcgggagatccagctgtggttccagagcagtgagctggtgagctgggcagacgggggccagcacagcagcatccacccagcctgaggctcaagctgcccttaccaccccatcccccacgcaggaccaactacctccgtcagcaagaacccaagcccacatccaaacctgcctgtcccaaaccacttacttccctgttcacctctgccccaccccagcccagaggagtttgagccaccaacttcagtgcctttctgtaccccaagccagcacaagattggaccaatcctttttgcaccaaagtgccggacaacctttgtggtgggggggggtcttcacattatcataacctctcctctaaaggggaggcattaaaattcactgtgcccagcacatgggtggtacactaattatgacttcccccagctctgaggtagaaatgacgcctttatgcaagttgtaaggagttgaacagtaaagaggaagttttgcacacccaaaaaaaaaaaaaaaaaaaaaaaaaaaaaaaaaaaaaaaaaaaaaaaaaaaaa

SEQ ID NO: 286667 - DNA, 1000 bp, Homo Sapiens; identical to SEQ ID NO: 221604

SEQ ID NO: 286668 - DNA, 1000 bp, Homo Sapiens
gactgtggtgaccagcctcgcccagggcaacggaccagtgcaggtggccatggcccctgtgaccaccaggatatcagacagcgcagtcaccatggacggccaagctgtggaggtggtgacattggaacagtgacatacagccatattatggcatcgttttctagtctacttcaaaattttttacacgtttgcagaggtgcaatcaaatggaattaagtctctcgactttggaaggaaagttttgttaacctttttttttttaaaaggaagaaagcggattttggaattgcattttttaaagcaccactcttgattttctgggattggtgaagaaactgcattgtcaatttcactgtcccaaaaaagccaaattgtggcaggacttctttctgcggaaatgtgtgtgtatacttatgtgtgtgtatgtgtgagtgtgaatatatgtatatgtgtacatatggacatacacatttacatatatataaagtatatatatacatatatatatatatatgtatgaaacccgcatggaattatctgtatgaaatcaaggtgcgctgtggaaacaataattcacccagtttagtgggtggtagggtacgtggccagacacagtcacccagtttttgttcataccagggtcatgcgttgagctactgacaaactcaggcggaggtgaccatgcccttcaccaaagctgcctcccagtggccacacagaactctccctgctggactcacctgaggaaagaggctccagcatggggtgggtcagagatgtgcttgcaaggtccagggactgcgtggtctgccagctgagatgctcctcgggctggcccaggtgctgaccttgccacaggcagatgaatgtcttgaaagctcccgggcctcagcctcccatctcctctccttcccaggaatccttgatctcatgactattaaaatgttgctctggttttaaggtcaaaaaaaaaaaaaaaaaaaaaaaaaaaaaaaaaaaa

SEQ ID NO: 286669 - DNA, 1000 bp, Homo Sapiens
aggtggatgcaagatcaaggaaatacgagagagtacaggggctcaggtccaggtggcaggggatatgctacccaactcaactgagcgggccatcactattgctggcattccacaatccatcattgagtgtgtcaaacagatctgcgtggtcatgttggagactctctcccagtcccccccgaagggcgtgaccatcccgtaccggcccaagccgtccagctctccggtcatctttgcaggtggtcaggacaggtacagcacaggcagcgacagtgcgagctttccccacaccaccccgtccatgtgcctcaaccctgacctggagggaccacctctagaggcctataccattcaaggacagtatgccattccacagccagatttgaccaagctgcaccagttggcaatgcaacagtctcattttcccatgacgcatggcaacaccggattcagtggcattgaatccagctctccagaggtgaaaggctattgggcaggtttggatgcatctgctcagactacttctcatgaactcaccattccaaacgatttgattggctgcataatcgggcgtcaaggcgccaaaatcaatgagatccgtcagatgtctggggcgcagatcaaaattgcgaacccagtggaaggatctactgataggcaggttaccatcactggatctgctgccagcattagcctggctcaatatctaatcaatgtcaggctttcctcggagacgggtggcatggggagcagctagaacaatgcagattcatccataatccctttctgctgttcaccaccacccatgatccatctgtgtagtttctgaacagtcagcgattccaggttttaaatagtttgtaaattttcagtttctacacactttatcatccactcgtgattttttaattaaagcgttttaattcctttctctgttcagctgttgatgctgagatccatatttagttttataagcttctccctggttttttttttttgg

SEQ ID NO: 286670 - DNA, 1000 bp, Homo Sapiens
gatgatattccttattcatctgctggcagtgatgatgtttataagcacatcaaggaggcaggcatgtttgctccaacacagaggacagaaggtatctccacatcagacatcatcacccgaattgtgcgggattatgatgtgtatgcgaggcggaacctgcagaggggctacacagcaaaggagctcaatgtcagctttatcaacgagaagaaataccacttgcaggagagggttgacaaagtaaagaagaaagtgaaagatgtggaggaaaagtcaaaagaatttgttcagaaggtggaggaaaaaagcattgacctcattcagaagtgggaggagaagtcccgagaattcattggaagttttctggaaatgtttggtccggaaggagcactgaaacatatgctgaaagaggggaagggccggatgctgcaggccatcagcccgaagcagagccccagcagcagccctactcgcgagcgctccccctccccctctttccgatggcccttctccggcaagacttccccaccttgctccccagcaaatctctccaggcacaaggctgcagcctatgatatcagtgaggatgaagaagactaatgtttcctccctcctttcctgtcctccctttctgtcccattaccttcagaagctctctgttgaattccaaattgtgaccccaacactaaacctaaggacagctacaaaggaaagacaactggggaaagaagacctaggactgggggaacccaaacagcctgtcctgcaagtgacatcactcacccacacgaaggagggggactgcaccttagaagcctgctctgcatccatttacccccccccaagggctttgtttcactgtttatgttcacgtgatctcaacagggaaattgtcattttctttaaaaaaaaaaaaaaaaaaaaaaaaaaaaaaaaaaaaaaaaaaaaaaaaaaaaaaaaaaaaaaaaaaaaaaaaaaaaaaaaaaaaaaaaaaaaaaaa

SEQ ID NO: 286671 - DNA, 1000 bp, Homo Sapiens; identical to SEQ ID NO: 116325

SEQ ID NO: 286672 - DNA, 1000 bp, Homo Sapiens; identical to SEQ ID NO: 221606

SEQ ID NO: 286673 - DNA, 1000 bp, Homo Sapiens
tagtactcagctggaacaagtgaatcagatgctaaatctcacccaagaagaaataacagcaacagtgaaagtaaatttgccatttgggaggcctagggtactgcagaagaacgtggaccactgtctcctttaccacagggaatatgtcagtggatttggaaaagctatgaggatgcccatgtggagttcatacacagtcccccagttgggagacacatcgcctctgcctcccactgtcccagactgtctgcgggctgatgtcagggttcctccttctgagagccaaaaatgttccttctatttagcagacaagaatatcacccacggcttcctctatcctcctgccagcaatagaacatcagatagccaatatgatgctttaattactagcaatttggtacctatgtatgaagaattcagaaaaatgtgggactacttccacagtgttcttcttataaaacatgccacagaaagaaatggagtaaatgtggttagtggaccaatatttgattataattatgatggccattttgatgctccagatgaaattaccaaacatttagccaacactgatgttcccatcccaacacactactttgtggtgctgaccagttgtaaaaacaagagccacacaccggaaaactgccctgggtggctggatgtcctaccctttatcatccctcaccgacctaccaacgtggagagctgtcctgaaggtaaaccagaagctctttgggttgaagaaagatttacagctcacattgcccgggtccgtgatgtagaacttctcactgggcttgacttctatcaggataaagtgcagcctgtctctgaaattttgcaactaaagacatatttaccaacatttgaaaccactatttaacttaataatgtctacttaatatataatttactgtataaagtaattttggcaaaatataagtgatttttttctggagaattgtaaaataaagttttctatttttccttaaaaaaaaaa

SEQ ID NO: 286674 - DNA, 1000 bp, Homo Sapiens
ggaggatcaactttttgtggcattgcctcactatgtctgatgggtaaactagaagaagttttttcagaaaaagaattgaacaggataaagaggtggtgtataatgaggcaacaaaatggttatcatggaagacctaataagcctgtagacacctgttattctttttgggtgggagcaactctgaagcttctaaaaattttccaatacactaactttgagaaaaatagaaattacatcttatcaactcaagatcgccttgtagggggatttgccaagtggccagacagtcatccagatgctttgcatgcatactttgggatctgtggcctgtcactaatggaggaaagtggaatttgtaaagttcatcctgctctgaatgtaagcacacggacttctgaacgccttctagatctccatcaaagctggaaaaccaaggactctaaacaatgctcagagaatgtacatatctccacatgactgattttagattgggagggtgggggggatttgtagcataactgtagctcaagtttaaaagccatgtataaccaagtgtgctctttttttaaaaggtagagtcttacaatcaaatctcctgctgatttcactttgggatatggtcttgagccagtaatctttatactgggtttcaagaaaatctttgttgaagtttgaaccacaactttgtcgtggttcttaaatgtttatactgtatttctaagaagttgtttgaggcaaattaactgtatgtgtgtaggttatctttttaaaaactcttcagtgcaaattgtatcttattataaaatggacacaaattttcaagtttacacttcatatagcattgataatcttcaggtgaacacttagtgatcatttaaaaagctcactgctgatcgtagaaaatttgctttaattaattaagtatctgggattattctttgaaaacagatgaccataattttttttaaagaagagtgacttattttgtcttattcttaag

SEQ ID NO: 286675 - DNA, 1000 bp, Homo Sapiens
tagctgggattacaggtgtgcaccacccgtacccagctaatttttgtattttagtagagacgggggtttcaccatgttggctgggctggtctcgaactcctgacctcaggtgatccacccgcctgagcctcccaaagtgctgggattacaggcatgagccaccacgcccggcccactctgccattgtctaagccacctctgaaagcaggttttaacaaaaggatgaggccagaactcttccagaaccatcacctttgggaacctgctgtgagagtgctgaggtaccagaagtgtgagaacgagggggcgtgctgggatctttctctctgactatacttagtttgaaatggtgcaggcttagtcttaagcctccaaaggcctggatttgagcagctttagaaatgcaggttctagggcttctcccagccttcagaagccaactaactctgcagatggggctaggactgtgggcttttagcagcccacaggtgatcctaacatatcaggccatggactcaggacctgcccggtgatgctgttgatttctcaaaggtcttccaaaactcaacagagccagaagtagccgcccgctcagcggctcaggtgccagctctgttctgattcaccaggggtccgtcagtagtcattgccacccgcggggcacctccctggccacacgcctgttcccagcaagtgctgaaactcactagaccgtctgcctgtttcgaaatggggaaagccgtgcgtgcgcgttatttatttaagtgcgcctgtgtgcgcgggtgtgggagcacactttgcaaagccacagcgtttctggttttgggtgtacagtcttgtgtgcctggcgagaagaatattttctatttttttaagtcatttcatgtttctgtctggggaaggcaagttagttaagtatcactgatgtgggttgagaccagcactctgtgaaaccttgaaatgagaagtaaaggcagatgaaaagaaaaaaaaaaaaaaa

SEQ ID NO: 286676 - DNA, 1000 bp, Homo Sapiens; identical to SEQ ID NO: 221607

SEQ ID NO: 286677 - DNA, 1000 bp, Homo Sapiens
aatgttgatggagttgaaatatatgtgatagttacaagaaatgtattcagccaccgtttgtctgtgtataggaaatacgacttaaagggctctacagtggctagagaagctagtgacaaagaaaaggccaaagaactgccaactctgaaagataatgatttcattaatgagggccaaaagatttatattgatgacaacaacaagaaggtcttcctggaaaaactaaaaaaggatgttgagtttctggcccagctgaagctcatggactacagtctgctggtgggaattcatgatgtggagagagccgaacaggaggaagtggagtgtgaggagaacgatggggaggaggagggcgagagcgatggcacccacccggtgggaacccccccagatagccccgggaatacactgaacagctcaccacccctggctcccggggagttcgatccgaacatcgacgtctatggaattaagtgccatgaaaactcgcctaggaaggaggtgtacttcatggcaattattgacatccttactcattatgatgcaaaaaagaaagctgcccatgctgcaaaaactgttaaacatggcgctggcgcggagatctccaccgtgaacccagaacagtattcaaagcgctttttggactttattggccacatcttgacgtaacctcctgcgcagcctcggacagacatgaacattggagggacagaggtggcttcggtgtaggaaaaatgaaaaccaaactcagtgaagtactcatcttgcaggaagcaaacctccttgtttacatcttcaggccaagatgactgatttgggggctactcgctttacagctacctgattttcccagcatcgttctagctatttctgactttgtgtatatgtgtgtgtgtgtgtgttgggggggggtgagtgtgtgcgcgcgtgtgcattttaaaagtcataaattaattaaaacagatccacttcggtcaaaaaaaaaaaaaaaaaaaaaaaa

SEQ ID NO: 286678 - DNA, 547 bp, Homo Sapiens
gtggcagctgggcctcaccccggcagggctgtgcgtgaccccctgagtgggggaaggcaggctgttgccatggtggcctgagcgagcagaattcctccagggacaatggcgtctcttggccacatcttggttttctgtgtgggtctcctcaccatggccaaggcagaaagtccaaaggaacacgacccgttcacttacgactaccagtccctgcagatcggaggcctcgtcatcgccgggatcctcttcatcctgggcatcctcatcgtgctgagcagaagatgccggtgcaagttcaaccagcagcagaggactggggaacccgatgaagaggagggaactttccgcagctccatccgccgtctgtccacccgcaggcggtagaaacacctggagcgatggaatccggccaggactcccctggcacctgacatctcccacgctccacctgcgcgcccaccgccccctccgccgccccttccccagccctgcccccgcagactccccctgccgccaagacttccaataaaacgtgcgttcctctcga

SEQ ID NO: 286679 - DNA, 1000 bp, Homo Sapiens
ggtgaaaaggtttggcaaatacgtgtagacctacatttattaaatcatgatggaaatattattgatgctgccagcattgctgcaatcgtggccttatgtcatttccgaagacctgatgtctctgtccaaggagatgaagtaacactgtatacacctgaagagcgtgatcctgtaccattaagtatccaccacatgcccatttgtgtcagttttgcctttttccagcaaggaacatatttattggtggatcccaatgaacgagaagaacgtgtgatggatggcttgctggtgattgccatgaacaaacatcgagagatttgtactatccagtccagtggtgggataatgctactaaaagatcaagttctgagatgcagtaaaatcgctggtgtgaaagtagcagaaattacagagctaatattgaaagctttggagaatgaccaaaaagtaaggaaagaaggtggaaagtttggttttgcagagtctatagcaaatcaaaggatcacagcatttaaaatggaaaaggcccctattgatacctcggatgtagaagaaaaagcagaagaaatcattgctgaagcagaacctccttcagaagttgtttctacacctgtgctatggactcctggaactgcccaaattggagagggagtagaaaactcctggggtgatcttgaagactctgagaaggaagatgatgaaggcggtggtgatcaagctatcattcttgatggtataaaaatggacactggagtagaagtctctgatattggaagccaagatgctcccataatactctcagatagtgaagaagaagaaatgatcattttggaaccagacaagaatccaaagaaaataagaacacagaccaccagtgcaaaacaagaaaaagcaccaagtaaaaagccagtgaaaagaagaaaaaagaagagagctgccaattaaagctaacagttgtatatctgtatatataactattaaaagggatatttattccatt

SEQ ID NO: 286680 - DNA, 1000 bp, Homo Sapiens; identical to SEQ ID NO: 115242

SEQ ID NO: 286681 - DNA, 1000 bp, Homo Sapiens
acataaagtccttcccgctgaccaaagcaaaggcgagggcgatcttgacaggaaagacaacagacaaatcaccattcgttatctatgacatgaattccttaatgatgggagaagataaaatcaagttcaaacacatcacccccctgcaggagcagagcaaagaggtggccatccgcatctttcagggctgccagtttcgctccgtggaggctgtgcaggagatcacagagtatgccaaaagcattcctggttttgtaaatcttgacttgaacgaccaagtaactctcctcaaatatggagtccacgagatcatttacacaatgctggcctccttgatgaataaagatggggttctcatatccgagggccaaggcttcatgacaagggagtttctaaagagcctgcgaaagccttttggtgactttatggagcccaagtttgagtttgctgtgaagttcaatgcactggaattagatgacagcgacttggcaatatttattgctgtcattattctcagtggagaccgcccaggtttgctgaatgtgaagcccattgaagacattcaagacaacctgctacaagccctggagctccagctgaagctgaaccaccctgagtcctcacagctgtttgccaagctgctccagaaaatgacagacctcagacagattgtcacggaacacgtgcagctactgcaggtgatcaagaagacggagacagacatgagtcttcacccgctcctgcaggagatctacaaggacttgtactagcagagagtcctgagccactgccaacatttcccttcttccagttgcactattctgagggaaaatctgacacctaagaaatttactgtgaaaaagcattttaaaaagaaaaggttttagaatatgatctattttatgcatattgtttataaagacacatttacaatttacttttaatattaaaaattaccatattatgaaaaaaaaaaaaaaaaaaaaaaaaaaaaaaaaaa

SEQ ID NO: 286682 - DNA, 1000 bp, Homo Sapiens; identical to SEQ ID NO: 116327

SEQ ID NO: 286683 - DNA, 1000 bp, Homo Sapiens
agggcaattgcgtgtgaaaattgatgtgacttgatttacacaatagtcagaaaacattttagaaattgatgactttataatgcaaccaggagtattgaaaaaaaagtaagcaatgagctcaaataattaaaaaagagagacaaaatacacttgggagaacagaaataagaattaataaaaatttaaaagattaaatgaatgagaagaaatgattcataaattttgaactaacagtaataacttcttgaaaatccaataaaattggcaaaagattgtgaaaattctggaagaataagggaagcagataatcttcagagtaatcaggtaaagcttaaacaagtgttttaaaagatgagtttttcctacattctgaaaagcaaacatgaaaaactgaacacagtttttacagatatacaatatggagtgacttatatacaaaatgaccttaaaaatatattaaactcattatagtagttaatatctaagtaaaatatgatgaaatttaatagagaattcactcctcccaaaagcaccttcatggaagattcctcattaacaggcagtcctttagtatgctgatttatacaaaatgctgaaaagaagagaaataccccaagttcttgaaaaaaaattttttgatatgactactctaacagtaataactataaatctcactttaaataatttaaaacaaattaaagtgatatatgagttaaatgaccaagcagacttgattctaggaatgttaaggaatgttcattatttgttttggataatgaagtcagcagaggaaaaaaaaatatgaccatctcaaaagatgccaacgttgtctttgataatatttaatatattttttaaaaaacaattcttgtaaaatacttttttgattagccttctgaccatgattaaaatggtgtacctcaaagtagctgctaaccttatgtgtatctgcaacaccctgaaaaattatctcatcaaaaggcacaaagaaaaaaaaaaa

SEQ ID NO: 286684 - DNA, 1000 bp, Homo Sapiens; identical to SEQ ID NO: 221610

SEQ ID NO: 286685 - DNA, 1000 bp, Homo Sapiens; identical to SEQ ID NO: 221611

SEQ ID NO: 286686 - DNA, 1000 bp, Homo Sapiens; identical to SEQ ID NO: 116328

SEQ ID NO: 286687 - DNA, 1000 bp, Homo Sapiens
ctggacacccgcgtgctctttgacccgtttgagctggacaccagcgtcacccccgggagggtgcgcgaggcactgcgccagcaggacttcaccagggccatcctcatggccctccggctcaacgagagcaaactggtgcaggaggccctggaggcggtgcccaggggcgagattgaagtggtcacctcctcccttcctgaactgtatgtggagaaagtgctggagtttttagcttcctcctttgaagtgtctcgccacctggaattctacctcctctggactcacaaactgctcatgttgcacggacagaagctgaagtccagagccgggacgctgctgcctgtcattcagttcctccagaagagcatccagcggcacctggacgacctgtcgaaactctgtagctggaaccactataacatgcagtacgcactagcagtttccaagcagcggggcacaaaacgctccctagacccgctgggaagtgaggaggaggcagaagcatctgaagatgacagcctgcatctgcttggaggaggaggcagagactcagaagaagagatgctggcctagagccagccggttgcagcgttggattgtgccggctaagacctgccagggagatgggacccttgtgccacctgggccagcaaagaggaggggtccagagaacagctgaaatactgtcactagtggtagtgacttgcttttcctgtgcacacatgtagcccatcaggacagcgagccgacgggtcacgccaggggccggcacgcactggcacctggccccaggagcggggccgtgtgaacggtgatgaatgttgaaaatgcgtctcagagaggtattcacatgaactttgtatgagacttatttatatctttaacataaaggtttgataaagaacttagggattaaaaaaaagatggagttttctaacgtgaggatgaagtctacacttcagattaaaaagggttatgttgtaaaaaaaaaaaaaaaaaa

SEQ ID NO: 286688 - DNA, 1000 bp, Homo Sapiens; identical to SEQ ID NO: 116329

SEQ ID NO: 286689 - DNA, 1000 bp, Homo Sapiens
gccctgtgcagtgggagtatggccgcctcaacctgcactatgctgttgtctctaagaggaagatcctccagcttgtagcaactggtgctgtgcgggactgggatgacccacggctctttacactcacggccctgcgacggcggggcttcccacctgaggccatcaacaacttctgtgcccgggtgggagtgactgtggcacaaaccacaatggagccacatcttctagaagcctgtgtgcgtgatgtgctgaatgacacagccccacgagccatggctgtgctggagtcactacgggtcatcatcaccaactttcctgctgccaagtccttggacatccaggtgcccaacttcccagctgatgagaccaaaggcttccatcaggttccctttgcacccattgtcttcattgagaggactgacttcaaggaggagccagagccaggatttaagcgcctggcttggggccagcctgtgggcctgaggcatacaggctacgtcattgagctgcagcatgttgtcaagggccccagtggttgtgtagagagtctggaggtgacctgcagacgggcagatgctggagagaagccaaaggcctttattcactgggtgtcacagcctttgatgtgtgaggttcgcctctatgagcgactattccagcacaagaaccctgaagatcctactgaggtgcctggtggatttttaagtgacctgaacctggcatcactacacgtggtggatgcagcattagtggactgctctgtggccctggcaaaacccttcgacaagttccagtttgagcgtcttggatatttctccgtggatccagacagccatcagggaaagcttgtctttaaccgaactgtcacactgaaggaagacccaggaaaggtgtgagctggaagcactgaacctacctcatcctcctggagggtgtggctaccctcgccaccccaaattccatgtcaataaagaacagctaaattctcctagaaaaaaaa

SEQ ID NO: 286690 - DNA, 1000 bp, Homo Sapiens
gagaaccccctggagttcctgcgggaccagccccagttccagaacatgcggcaggtgattcagcagaaccctgcgctgctgcccgccctgctccagcagctgggccaggagaaccctcagcttttacagcaaatcagccggcaccaggagcagttcatccagatgctgaacgagccccctggggagctggcggacatctcagatgtggagggggaggtgggcgccataggagaggaggccccgcagatgaactacatccaggtgacgccgcaggagaaagaagctatagagaggttgaaggccctgggcttcccagagagcctggtcatccaggcctatttcgcgtgtgaaaaaaatgagaacttggctgccaacttcctcctgagtcagaactttgatgacgagtgatgccaggaagccaggccaccgaagcccccaccctacccttattccatgaaagttttataaaagaaaaaatatatatatattcatgtttatttaagaaatggaaaaaaaaatcaaaaatcttaaaaaaacaagcaaacagtccagcttcctgtcctcctaaagtggcccctgttcccatctcccgggccagacagctgtccccccgtcctcctccccagcccagcctgctcagagaagctggcaggactgggaggcgacagatgggcccctcttggcctctgtcccagctctctgcagccagacggaaaggcggctgcttgcctctccatcctccgaaaaacccctgaggacccccccccatcctcttctaggatgaggggaagctggagccccaactttgatcctccattggagtggcccaaatctttccatctagggcaagtcctgaaaggcccaaggccccctccccagtctggccttggcctccagcctggagaagggctaacatcagctcattgtcaaggccacccccaccccagaacagaaccgtgtctctgataaaggttttgaagtgaataaagttttaaaaact

SEQ ID NO: 286691 - DNA, 1000 bp, Homo Sapiens; identical to SEQ ID NO: 221612

SEQ ID NO: 286692 - DNA, 1000 bp, Homo Sapiens
cgctatgcccacaacaatgatgacgccatgctcgagtgccgcgtgtgctgcagcctgggcagcttctatgcccaggtcaaggactacgagaaagccctgttcttcccctgcaaggcggcagagcttgtcaacaactatggcaaaggctggagcctgaagtaccgggccatgagccagtaccacatggccgtggcctatcgcctgctgggccgcctgggcagtgccatggagtgttgtgaggagtctatgaagatcgcgctgcagcacggggaccggccactgcaggcgctctgcctgctctgcttcgctgacatccaccggagccgtggggacctggagacagccttccccaggtacgactccgccatgagcatcatgaccgagatcggaaaccgcctggggcaggtgcaggcgctgctgggtgtggccaagtgctgggtggccaggaaggcgctggacaaggctctggatgccatcgagagagcccaggatctggccgaggaggtggggaacaagctgagccagctcaagctgcactgtctgagcgagagcatttaccgcagcaaagggctgcagcgggaactgcgggcgcacgttgtgaggttccacgagtgcgtggaggagacggagctctactgcggcctgtgcggcgagtccataggcgagaagaacagccggctgcaggccctaccttgctcccacatcttccacctcaggtgcctgcagaacaacgggacccggagctgtcccaactgccgccgctcatccatgaagcctggctttgtatgactcctggcagcaggcgtgggcttcctcctcgccactcctgctctttctccactgcacgccagaggcccatttactcctggggcagctgccaggtcgtcctcaccatagccaaggccttggggcctgcccagggctgctcccctgggcccagctcccctccctgcctctttgtactttgctctttatagaaaaataaactgtttgtacctgg

SEQ ID NO: 286693 - DNA, 1000 bp, Homo Sapiens
tggaaatctatcctcatcagtcattgcatttttccctgcctatacctgtgctcctttttcttactgtgttttcagtcacttcctttctgtgaaaggttgcttagctttttttttgacatttgttgttctttataaaaataacagattggatagatgtgtacatttggtgtttgaaattctctgaaaatcccattaggaaaccaggtgtgaaaagggctcagtagcttctctgagtggcgtttttagctgactggaagtgcttaatctggatcgtcttttttttttttttttttttttcaatattttaaaaggagaatttaaatactgtgcttactgtgaaatatatcagttggtgagccgggcgtggtgggtcacgcctgtaatcccagcactttgggaggccaaggcgggttgatcacccgaggtcaggagttcaagaccagcctggccaacgtggtgaaagcctgtatctattaaaagacaaaaattagctgggcgtggtagtacatgcctgtaatcccagctacactggaggctgagtcaggagaatcacttgaacgtgggaggcagaggttgcagtgagtggagatcgcaccactgccctccagcctaggtgacagaatgagactctatctcaaaaaaaaaaaaaaaatgatatcagttggtggatgctcctataggtagccaaacacattgattacctgttagattttaggatagaaatcaaagtagagcacgtcagcaagagcctctttgtctcactccatcatttaaaaccagtatattcagtagttgaagaaagagctctccctgagtcagttgcaaaacgtctatatttttagatgccactacttttttcttaaatattcattttgagactgtcatgagttagaccagtggttgagattagtagatggctcactagacatgtttttgttttgcagacattatatccattccagtcctctgcactgtacactgcagcagtgtgcaaactatg

SEQ ID NO: 286694 - DNA, 1000 bp, Homo Sapiens
ttcccgagaaactagggattatgctccaccatctagaggccatgcataccgtgattatggtcattctcgtcgggatgaaagttattctagaggatacagaaatcgtcgaagttcccgagaaactagggagtatgctccaccatctagaggccatggataccgtgattatggtcattctcgtcgacatgaaagttattctagaggatatagaaatcatccaagttcccgagaaaccagggattatgctccaccacatagagactatgcataccgtgattatggtcattctagttgggatgaacattcctctagaggatatagttatcatgatggctacggtgaggcccttggtagagatcattctgaacatctaagtggaagttcttatagagatgcacttcagagatacgggacctctcatggtgcaccacctgcaagagggcctcggatgtcttatggtggaagcacctgccacgcatatagtaatacacgagatagatatggcagaagttgggagagttactcgagctgtggtgattttcattattgtgatcgtgagcatgtttgcagaaaagaccaaaggaatccgccttctctgggtagggtgctccctgatcctcgtgaagcatgtggtagctcaagttatgtggcatctatagtagatggtggggagagtcgatctgaaaaaggagactcgagcagatattaaagcaagcattgaaaataatagttattgcataccaatccttgtttgcaaatcaaaaattgaaatgttatttctgcattgttacctgcatattactgaaagaaacatgttggttttgtggagagaggtagatactaacttcctccatgaattttttgaggtattcaaaggaaaaggaattgttttcaaagtaatttcatacttgttgatgctatttgaaaagtgtttagatgtaatatctaccttaaaattttcacaataaaatttgacatgtactgcaaaaaaaaaaaaaaa

SEQ ID NO: 286695 - DNA, 1000 bp, Homo Sapiens; identical to SEQ ID NO: 221614

SEQ ID NO: 286696 - DNA, 1000 bp, Homo Sapiens; identical to SEQ ID NO: 116330

SEQ ID NO: 286697 - DNA, 1000 bp, Homo Sapiens; identical to SEQ ID NO: 116331

SEQ ID NO: 286698 - DNA, 1000 bp, Homo Sapiens
aataactgagaaagagagagatacatcttataaactgacttctttgtggtttcaaatcagccagctcatttggttcaggcataaattagagaaatggttctggatatggtgcaaaaatgagttttcacctggtatccattataaacaatcaggaagaggtaatttttcaccttgcttttcagttagacaaggaccaggattgcactgacatggcgctgagggtttttctaagtaagaacactgagatattgggacacacatcaaaaacctggagtgctcaattggaagtagttctatgaatatggaaaggccagaggcagagtgaaataaaatgctatctcaaagtttaacacaatttaagggctcagcataagtaaacaacatatttggggtttgcttgtaaaaccaactaaataaaaaattcaaaccaattcacccagaaaaaagaccaataggtgcaaaaataaaaggaaaaccagtgaagtgccacatgacagcagtgttaagtgtttgaaaacgtttcaaagcacatatgtgccaatgtgacaacatgtggaaagcctcaggagagagtctaagataaaagcttaggctgatagacaagtagttaagagctaagagcagtactctgaaggaataggcaaaatgtttattttccttattgtttgtaaacaacaaacttggtcttacatctgtgtggtatagtagaaaggccagctgactagatctctggattctaattttggccctacctgtaacttaattttgtgaccacagttgtaccattcaccgtgcctgggctctagtttcctggtttgtaaggcagccccagcgttcatgttctgtgatagagcagaactgaacttattacctaattaactctctgctatgagttgtcaagactgatcattctgttttttctgtacacagaagtttagatgctttgtgacttaagcaggtgtgtgggctcctttaggcaggttacagttaactttctaga

SEQ ID NO: 286699 - DNA, 1000 bp, Homo Sapiens
ctgggaccctttattgtcctacttgtgactggagttatctgtgaatctctgggctggcccatggtcttctatatttttggtgcttgtggctgtgccgtatgtcttctctggttcgttctgttttatgatgaccccaaagaccacccatgtataagcatcagtgaaaaggaatacatcacatcctccctggtccagcaggtcagttcaagtagacaatctctgcctatcaaggctatacttaagtcgcttccagtctgggctatttccattggtagttttacgtttttctggtcacataacatcatgacactatacactccaatgtttatcaactccatgcttcatgttaatataaaagagaatgggttcttgtcttcccttccctatttgtttgcctggatctgtggtaacctagcaggtcagttatcagacttcttcctgaccaggaatattctcagcgtaattgctgtccggaaactcttcacagcagcaggatttctccttcctgcaatctttggtgtctgcctgccttacctgagttccaccttctacagcattgtcattttcctaatacttgctggtgcaacaggcagcttttgcttgggtggagtgtttataaatggcttggatattgctcccagatattttggatttattaaagcatgttcaactttaactggaatgataggaggactaattgcttccactttgactggattgatccttaagcaggatccggaatccgcctggtttaaaaccttcatcctgatggcagccattaatgtgactggcctaattttctaccttatagttgctacagcagaaattcaggactgggctaaagaaaaacaacacacacgtctctgaagtgtgaaacagagcacttgcagagcctgggacaacctccttattgaagggaagagggaccagcacatgaggctgaggctgaggggcagtcaccagcaccaggaagaaggtggtaggaggagtcctaggggct

SEQ ID NO: 286700 - DNA, 1000 bp, Homo Sapiens; identical to SEQ ID NO: 220414

SEQ ID NO: 286701 - DNA, 1000 bp, Homo Sapiens
cacacagacggagccagctgtattgacatttctaatgatggcaccaagctctggacgggtggtttggacaacacagtcaggtcctgggacctgcgcgaggggcggcagctgcagcagcacgacttcacctcccagatcttctccctggggtactgccccaccggggagtggctggcagtgggcatggagagcagcaatgtggaggtgctgcacgtgaacaagcctgacaagtaccagctgcacctgcatgagagctgcgtgctgtccctgaaatttgcttactgtggtaaatggtttgtgagtactggaaaagataacctcctcaatgcttggcggaccccctatggagccagcatattccagtccaaagagtcctcgtcagtgcttagctgtgacatctctgtggatgataagtacatagtcactggctcgggggacaagaaggctacagtctatgaagtcatctactgaaaacattatgtggtttaacgtttatagttgaattgggccaaaatgtttcgaatttatagaaatagaaaagttgtaactttaaaagagaaaaaaaattacaaacacctgtttccaaaccttgacagaaaactactttgagtctacaaagaggaggcgacaagtccatcagcagaaagtcacctgtctacatagaccaaatggagcaccaaggccaagcggacagaggggccatgggttgtaggattgaggaacggaatctgccgactcacatgacagcccattctttctttctgggtgatctggggatcacgccttgcccaagtgtgagattacctttctgttccttgcagttcacctcactttccgtcctttgtagagcagtggtgtctccaatgaacttgtttcctggttttgcatcttgtgaaatgtttttttgtatttttgttgaaggttaaacatttgtataaattgtaaatatatttggtttattacagtaaaggctttagtaccaataaaaaaaaaaaaaaaa

SEQ ID NO: 286702 - DNA, 1000 bp, Homo Sapiens; identical to SEQ ID NO: 116334

SEQ ID NO: 286703 - DNA, 1000 bp, Homo Sapiens; identical to SEQ ID NO: 116336

SEQ ID NO: 286704 - DNA, 1000 bp, Homo Sapiens
gtagtgcgggtacaaaatgctatttgttcgtcatactgttgtcagcagatgagccgcccactacagacggctactgcccagggacctgcccaggccccacccaagggctcccaagggttgagatttctgcagacctatagccagcacacttagtcctgccctatatagagttcctcttcgggaagcttttgataaggaattctcagaccgataggatgtctgtctgggctttgctgcgggacagtctaactgtgggggctaggggaaagcaggagagtatcgatcaaagagtaagccacacacggataatcagttactagggatggaggtgtgagggttcattatattattcattttactgttgtatatgtttgaaaatgtctataataaaaagctttaaaaaaaaaaaagaaacaaaaatagttcaggccagcaatgggccctccatgttcagtggattttatccttgtttcaattggggtaggagttccaggaggtgtggattggaggttgtctaaagaattgaactggcctttgtccctgcttcctgggagggagactttcagtccttgacatttccagggtaataggagtgtctttgttatttgtgaggccatgggatcacacctgagcttatgctaaaaggtgggatgactcagagctggggctggtcaccagacagactgaccatgtgattagaggtttgaggctttgagtcagcctgacctatggggcgggggactggaggctgagtttaatcatctggccagtgctttaatcagtacatcatgaaaccctaataaaaactctggacactaaagctcagcatagcttcctgggtggtgaagctgtggctatgccggcagggcagtgtgccctaattccacgaagagggggcatgggagcactgtgctcaagacccttccagacctttccctgtgtcttccttggcttgtggagctgatttgtatcctttataataaaactaatcataagtata

SEQ ID NO: 286705 - DNA, 1000 bp, Homo Sapiens; identical to SEQ ID NO: 116337

SEQ ID NO: 286706 - DNA, 1000 bp, Homo Sapiens
gcctgaagattctttcttctgaaagccaagcaccacaaggaaaaaaaaattattaatagctcaggttaaaaacacccatttaaacaaaaacaagagcatttgtaataggaagtgtttatacaaacagcacatttgtgatatgttgaaaagcatctctcttggcaaccaatctatgtttgaggaagattgggtaatgctgatgtgttccattcatgaaactgtatttgatacataatcctattattaattcgtatgcttagtcaacctaggaaatcaaaataatgttttgaagttcttatttgagcaatatggccttgacttggagggtagttttagttgttttgtttttaagtgactgtggtttaaagcacaaatgccccaaggtggggagacttctctctgtgattattgttgctattaaattctgaactgtatccatattttaaggaaggagctaaaaatggaaattcatgaaacataaatggtatcaagaactttatcagtatgctttgttgaaagcagaaattaagataataattgagttcaattcgcctctccgcattgcctattgatacactttactaatcatgaaattctaacctaaaaggaaaacattttcctgcttgtcttagaagaaagtggaataattccactgattgtgataatggtttcaatttctacacaatataaatatccagtataaaggaaagcgttaagtcggtaagctagaggattgtaaatatcttttatgtcctctagataaaacacccgattaacagatgttaaaccttttaatgttttgatttgctttaaaaatggccttcctacacattagctccagctaaaaagacacattggagagcttagaggataagtctctggagcagaatttatcacacacaaaagttacaccaacagaataccaagcagaatgatgaggacctgtaaaataccttgtgccctattaaaaaaaaaaaaaaaaaaaaaaaaaaaaaaaaaa

SEQ ID NO: 286707 - DNA, 1000 bp, Homo Sapiens
agtgcttctggcgatgacatttctaagctacagcgtactccaggagaagaaaagattaataccttaaaagaagaaaacactcaagaagcagcagtcctgaatggtgtttcataaactgaagaagttcctagtttacagttcttttacattacatttacaatagtgcttgtacaagcttgccaaagatagaatatggatcgccagtctttacatcgcactttcagttcctccatttggaattcaaaaaggggagggatcctgaagaaatcatatgttaaacatactttgacacctactgtgttataaaatatatcatcagatgtgccttgagaatagtatatgtaacattaaaaaaaagttgctggctataggaaatgttattttgttttcaaaatatggcagagatggggggtggtgggtggggtgggatccctaacgtaatattctttatgaaagcattagctgcttttgttacatttttaatatgcaaccacttcttcacctgaggaaaactagaatgaaatgcagtctaaaatattttgcactgaattgtaatttcttcattagtttagtctggaaactggtctgttttaatgtgttttttaaatgctgtatgtagaggaaaatctgcagaccactggaatacatttgttaaactctcatctgcagggacactgggcgatacttggcagtgactgttctaccttgaggctttgtttggtttatttattaaagtgtacagtatttaaaaatcaaacatagctttagttaaaacactaagctgaattagtcatgtccattcagacataacctgaactactgaaaagatcaatttccagaaggtttattctgtataaactacatgttagtcttcagtagagtatcttttttttttccttttttttttttttatttcggttgtttgatgtgcaatatgtttttgtatgcaggtagtaaataaactttgatcttccatttgctgaaaaaaaaaaaaaaaaaa

SEQ ID NO: 286708 - DNA, 1000 bp, Homo Sapiens; identical to SEQ ID NO: 116339

SEQ ID NO: 286709 - DNA, 1000 bp, Homo Sapiens
acagccggcagratagctgagtttttcaccgatcttctgacgtggcgtccactggcccaggccacacataatttcctgcgtggcctccatttccacaaagactactttcagcatcctcacttctccacatggaaagctaccactctggatgggctccccaaccagctgacaccctcggagccccacctgtgcctgctggatgttggctacctcatcaataccagctgcctgcccctcctgcagcccactcgggacgtggacctcatcctgtcattggactacaacctccacggagccttccagcagttgcagctcctgggccggttctgccaggagcaggggatcccgttcccacccatctcgcccagccccgaagagcagctccagcctcgggagtgccacaccttctccgaccccacctgccccggagcccctgcggtgctgcactttcctctggtcagcgactccttccgggagtactcggcccctggggtccggcggacacccgaggaggcggcagctggggaggtgaacctgtcttcatcggactctccctaccactacacgaaggtgacctacagccaggaggacgtggacaagctgctgcacctgacacattacaatgtctgcaacaaccaggagcagctgctggaggctctgcgccaggcagtgcagcggaggcggcagcgcaggccccactgatggccggggcccctgccacccctaactctcattcattccctggctgctgagttgcaggtgggaactgtcatcacgcagtgcttcagagcctcgggctcaggtggcackgtcccagggtccaggctgagggctgggagctcccttgcgcctcagcagtttgcagtggggtaaggaggccaagcccatttgtgtaatcacccaaaaccccccggcctgtgcctgttttcccttctgcgctaccttgagtagttggagcacttgatacatcacagactcatacaaaaaaaaaaaaaaaaaa

SEQ ID NO: 286710 - DNA, 1000 bp, Homo Sapiens; identical to SEQ ID NO: 116340

SEQ ID NO: 286711 - DNA, 1000 bp, Homo Sapiens
gagaaggaactgcccctgtatgcgcgccccatcttcctgcgcctcctgcctgagctgcacaaaacaggaacctacaagttccagaagacagagctacggaaggagggctttgacccggctattgtgaaagacccgctgttctatctagatgcccagaagggccgctacgtcccgctggaccaagaggcctacagccgcatccaggcaggcgaggagaagctgtgattccccccatccctctgagggccggcggatgctggatccggagccccaggttccgccccagagcggtcctggacaaggccagaccaaagcaagcagggcctggcacctccatcctgaggtgctgcccctccatccaaaactgccaagtgactcattgccttcccaacccttccagaggctttctgtgaaagtctcatgtccaagttccgtcttctgggctgggcaggccctctggttcccaggctgagactgacgggttttctcaggatgatgtcttgggtgagggtagggagaggacaaggggtcaccgagcccttcccagagagcagggagcttataaatggaaccagagcagaagtccccagactcaggaagtcaacagagtgggcagggacagtggtagcatccatctggtggccaaagagaatcgtagccccagagctgcccaagttcactgggctccacccccacctccaggaggggaggagaggacctgacatctgtaggtggcccctgatgccccatctacagcaggaggtcaggaccacgcccctggcctctccccactcccccatcctcctccctgggtggctgcctgattatccctcaggcagggcctctcagtccttgtgggtctgtgtcacctccatctcagtcttggcctggctatgaggggaggaggaatgggagagggggctcaggggccaataaactctgccttgagtcctcctaaaaaaaaaaaaaaaaaaaaaaaaaaaaaaaaaaaaaaaaaaaa

SEQ ID NO: 286712 - DNA, 1000 bp, Homo Sapiens; identical to SEQ ID NO: 116341

SEQ ID NO: 286713 - DNA, 1000 bp, Homo Sapiens
ccttgacccttccccttgccctggaactgtgatcgtgacaggtggcgggtgtggctgtcactgcacagcgcccacggctacagctgcgccggatctgggcgaccacgttttgcctctccaaaaagagcttcctttcgtgacgagacgcggacgcaggtccaccctcgggccctagctctgtagactaactctcggctgctgccccagcccgcgccagacagcccacggatccgttctcagcggagccagattcatcgcacacgtgcgggacggttccacacagccccggcctttcgcggtgacacaatggttagggaacggttagacgcgctctacatccgctttaaagacagaggtctagacgtgagatccgcgtcgggacagggttttaagtgacaaagaagggcgagtggcttctctgggccgggttcgtactccagcacagcgcccttctaacgggcgggaggaaggccgctgctcgcagggctaggtggagacacacttcccagatcaccgcaggcgggttttacccggagagctctggccgttcggcctccctgccgggtggcttcttcaatcccgtctccttcccaagctcccggctttttctaatcaggcaggcgtctgtcaaccctctccacttctgggctgaagcctccccaagccccgtgcgccaacctgtgtggggtcttcttcgggcctccctctccgccccgctcctgctcctacctgcagcacccccagctccgactccagactctctgcatcaggtctccccactccacgctccgggcgccccaactccaacaccacgtcctgccgcgcaggttcttccccgcgcggaggagcgcgcagggtgggcggcttaccatagcaagtgatcctgcgatagggaacgcgcccttgccccgaggctgcactaccacaggaaataacggccttcgtggcctcgagttttttatgaataataaaacgcgctgtaaaaaccgtggacggaaaa

SEQ ID NO: 286714 - DNA, 1000 bp, Homo Sapiens; identical to SEQ ID NO: 221620

SEQ ID NO: 286715 - DNA, 1000 bp, Homo Sapiens
aagaggaggttctggaagaagaggatggaggagaaacttcctcccaggcagactcggtcctcctgcaggagatgcaggcattgacacagaccttcaacaacaactggtcctatgaagggctgaggcacatgtctgggtctgagctgaccgagctgctggaccaggtggagggtgccatccgtgacttctcggaggagctggtgcagcagctggcccgccgggacgagctggagtttgagaaggaagtgaagaactcctttatcacggtgcttattgaggttcagaacaagcagaaggagcagcgagaactgatgaaaaagaggcggaaagagaaagggctgagcctgcagagcagccggatagagaagggaaaccagatgcctctcaagcgcttcagcatggaaggcatctccaacattctgcagagtggcatccgccagacctttggctcctcaggaactgacaaacagtatctgaacacagtcattccttacgagaagaaagcctctcctccctcagtggaagacctgcagatgctgacaaacattctctttgccatgaaggaggataatgagaaggtgcctactttgctaacggactacattttaaaagtgctctgccctacctaaccttgccctttggagcagcctcgctgcaggaggtcactgagcaagagtcattccatcacagggactgcatgagaccatgtaacctccgacatgtatttaaacgtgtatagcttaacctggattaaacacgagcaagcgcgcggggtcctttgccgttggcttctagtgctagtaatcattggatgcatgatggggcagggccggtgatggtgcctcccccttgctggtgtcaggagaggggaaggcagccgctttcaccgctcattatgtagtctggctacagccctcaaaaacagcttatactcttaagactaattttgaaataaaaccttcatttaattaaaaaaaaaaaaaaaaaaaaaaaaaaaaaa

SEQ ID NO: 286716 - DNA, 1000 bp, Homo Sapiens; identical to SEQ ID NO: 116343

SEQ ID NO: 286717 - DNA, 1000 bp, Homo Sapiens; identical to SEQ ID NO: 116344

SEQ ID NO: 286718 - DNA, 1000 bp, Homo Sapiens
gaaataacaaattttcaagtaaagccatggctgaaaccttttacctttctaacattgtgcctcaggattttgataataattctggatattggaacagaatagaaatgtactgtcgagagctgacagaaaggtttgaagatgtttgggtggtatctgggcctttgaccttacctcagactagaggcgatggaaagaaaatagttagttaccaggtgattggcgaggacaacgtggcagtcccctcacacctttataaggtaatcctggcccgcagaagctcagtatctaccgaaccactggcgctaggggcctttgtggtacccaatgaagccatcggcttccagccccagttaactgaattccaagtgagcctccaggacctagagaagttgtcagtactggtgttttttcctcatttggatagaactagtgatatccggaatatctgctctgtggacacctgtaagctcctggatttccaggagttcaccttgtacttgagtacaagaaagattgaaggagcccgatcagtgctcagactggaaaagatcatggaaaacttgaagaatgcagagattgaaccagatgattactttatgagtcgctatgagaagaagctagaagaactcaaagctaaggagcagtcaggaacccagataagaaagccatcctagtttttatctcaagatgtgtcataccgtctgtaatgaagcaggcatgccctctttaggctaacatattttagtggctttgctttttgctttttaaaaagtttttctctttaagagatgtggtctcgccgtgtcatccaggctggagtgcggtggtggaatcatagctcactatagcctcaaacttctgggcttaagcaatcctcctgcctctgccccctgagcagctgggactacaggcacacaccatcaccctcagctactagtggctttgctttaaagaaacagtggaatcctaaatttatgactaaaaattcccccaaaagatg

SEQ ID NO: 286719 - DNA, 1000 bp, Homo Sapiens; identical to SEQ ID NO: 221621

SEQ ID NO: 286720 - DNA, 1000 bp, Homo Sapiens
ggagttcaacgtcccagcagtcttggtaaaaggagggagcctgctgagccaggagggagaaaagaagattgaccagcttgctagaaaaatacttagcttttctttttctttttttgtggaggggggacggagaggaacaaggatggggaggtaggaatgaggtatagaaaagagatagcatcttctttggcacaagactagtggcttaccgcttaccttagagttttgttttttttttttcaaacccatcaaaatctacttatttatgaatccaaggggtggcagcatcactctgttctagcattctttgtggagatggtctggtgcctagctgggagtgagcagcagcccatcccctgttcactttctctagcccatcattacctgtgaactgcagtggggcagtcatggcaaatagaattgggctggggtttctccttcttttcagttcattgtttgccctgctaggaattagaagacagacaccatgtcccaggacagtgttacttcttctgcatgatgtgtggtagactccctttgctggcttgtgcagtgatactgagaaaatacatgaacagaaactgcccaggtggaacagcacgtaacctagtgagtgactgtactcctttctaggaatgctgattcagagtgcacctctttgactaggtcccaggatccccttgtccctggagtagggactaactatagcacaaagtaatatgtgccaatgctatttgtgaaatgtttggtctttctaaacgactaaaggatttgttgggtttttgcttaagttttgaaccaaatcctagagccagctgataatatttaataatctggaggagagaataatgatgtaccaataagtggagattcctccttatgatgtatgctaggttatggaagatgtaaaatattcaactttttcctcctttttttggactttgtattttactgcatgttttcttcatttttaatcaataaagagtaaattgtccttaaa

SEQ ID NO: 286721 - DNA, 1000 bp, Homo Sapiens
cccacactgtggactgcctccagggcatcctgagcgtgattccgctgcagctgctgtccttccacctggctgttctccgaggatatgacgttgacttccccagaaatctggccaagtctgtaactgtggaatgaggctgagaccgtgacaagaccatcaccacctttcatctgattccagacctgtcccaacagcagggatgctacatgggaagagaagtggacatcccacatgttctgcgtgctcctgtagagcttgacagcttccacgtgccttctacccaagtgcttttgcttacagcagatactgtttctctgtgtcctgaagtcgccagaggagaagggaatcattgtttacacatggggatcagagcagacttctccactactgtgcaatagagatacagctctcttcagagtaactgtgaaccttttataaccaacactagagttagttttaaaagacaagatatttataatgacgactgtatagcttttaagttatttttctagtatgtggctttctgtagccgtggtaacggccaaactgttcatcctagctacccatgctctgtgtccaggcttgctcctggcaggtggcattcatctcagatgtgagcacaaggcattggccctctggactcctttctccttttctttcctctctaggctgctcctgaatcctgttctctgacatccgtggagcccctcctgcatccacctatgcctcctataagtccagttgaaatctcagcctccttcaacattttcttctcgtgtgtggcccacatccctccacttctccaacttctgtttaatctgatcacggctctttttaagccctggcagcattttggtccctgctccttgcccatagtaaaacagcttgaaatatcccatgcaagagagtagtttcaagtgggcgactctgctctctatttaaaagcgtgcacaatcaaaagtactatgcaattttaggacaataaagaacatacagttcc

SEQ ID NO: 286722 - DNA, 1000 bp, Homo Sapiens
tgaaagattcagacctcccatagcccgagtgattgatgtatctaatgggaaagttcatgttgctgaaagctgtttggaagaaacaggtggcctgggagtagatattgtcctagatgctggagtgagattatatagtaaagatgatgaaccagctgtaaaactacaactactaccacataaacatgatatcatcacacttcttggtgttggaggccactgggtaacaacagaagaaaaccttcagttggatcctccagatagccactgccttttcctcaagggagcaacgttagctttcctgaatgatgaagtttggaatttgtcaaatgtacaacagggaaaatatctttgtatcttaaaggatgtgatggagaagttatcaactggtgttttcagacctcagttggatgaacccattccactgtatgaggcaaaagtttccatggaagctgttcagaaaaatcaaggaagaaaaaagcaagttgttcaattttaattttcttctttctcagacctcagtcggatgaacatattccagtatttgaagccagaattttctttggaaattgttgagaaaaaccaaggaagataaaacaagttgcatttttaagcacgtttctctgctaagacaagatgctcagttgacacatttgaaaagtgtttgaaaaattcttgtgcaaatgatcaagataattctataattaacatcttaagggaatttttctaaaaaccttttcattgtttctatatattttgcccctgctataaaattccttccatgaagaaaactgctgctttcagcaaaagtcacactactcttgataaaagctgttgcaggcctttgctaagctatcaaagtaacgtattaattttgtatcaactccgttctcaacaccttccttaagtctttgctgtcataatttaagcatttgagtatattttgaagtcttaaaagacttagcccataggcacttaaaaaaaaaaaaaaaaaaaaaaaaaa

SEQ ID NO: 286723 - DNA, 1000 bp, Homo Sapiens
gtggacggcgaccgcctcatcagggaccccttccctgagatccaaaaggtcgagaggttcctaaagctgtcgccgcagatcaatgcttcgaacttctactttaacaaaaccaagggcttttactgcctgcgggacagcggccgggaccgctgcttacatgagtccaaaggccgggcgcacccccaagtcgatcccaaactactcaataaactgcacgaatattttcatgagccaaataagaagttcttcgagcttgttggcagaacatttgactggcactgatttgcaataagctaagctcagaaactttcctactgtaagttctggtgtacatctgaggggaaaaagaattttaaaaaagcatttaaggtataatttatttgtaaaatccataaagtacttctgtacagtattagattcacaattgccatatatactagttatatttttctacttgttaaatggagggcattttgtattgtttttcatggttgttaacattgtgtaatatgtctctatatgaaggaactaaactatttcactgaaaaaaaaaaaaagattttttctggagacgctatgtttttttgaatataattaacttgcccccaactcaaaatagctgtctgtgttgcaatcattgcaaaatctaaattcttttgttacttaaaaaaacatgtttttcatggctattacaatcctctctctcccctctcctttctgcattgctctttttaatttttaatgtctcattgtgatcatcagatttatttttacttggattgtaagatttatctcctcggcgattccttgtcatttttggaggtcacagttttactcattcccatgtgtaaacttcaagtaaacaaagcaatattcaggatggagaagcagttagtgactggctagaggtctcttgggatccatcttgacctcaaagaatatttgcacatgcttctgatctcagcagttataataaagaggattaaacccttggccttca

SEQ ID NO: 286724 - DNA, 1000 bp, Homo Sapiens; identical to SEQ ID NO: 220415

SEQ ID NO: 286725 - DNA, 1000 bp, Homo Sapiens
ccacgggctttgacaaatcaagactggggaccaaagactttgtgggtccaagtgaaagaggaggtggcagagctcgaggaacctttcagtttcgagccagaggaagaggctggggcagaggcaactactctgggaacaataacaacaacagcaacaacgattttcaaaaaagaaaccgggaagaggagtgggacccagagtacacacccaaaagcaagaagtattacttgcatgatgaccgtgaaggcgaaggcagtgacaagtgggtgagccggggccggggccgaggagcctttcctcggggtcggggccggttcatgttccggaaatcaagtaccagccccaagtgggcccatgacaagttcagtggggaggaaggggagattgaagacgacgagagtgggacagagaaccgagaagagaaggacaatatacagcccacaaccgagtaggggccacccttgacgggattcctgcccaggggagagaggcgctgggaagatggctggtgaggagcttaacagaggaacctcaagaagattctgaaaatcctacccccaccccccaccagccgcacagattgtactaccgcgagaggcatccctggcgctgtctcccactggacagaggaggctggccatggggcccaggggtcaggcccagcttttgagcagaatacaacgcattgggctttagctgtttttctcatttgttggtgtgtggggtgggggcaggggtagggcgggagagcgatgcttggatttttgtttcctattagaaaccaacagttttgttctaatttcatttcatttggagctaagatgactaatttgatgattttcgatctcttttcccctgtcctgattttaaaagccccctccttttttttttttttttttctttttttaggcatatgtagtaatattagaaacatttaatttgggaaactttgattcttgaaagagaaaacaaaagcatgtgaataaactttgctcgtgcc

SEQ ID NO: 286726 - DNA, 1000 bp, Homo Sapiens; identical to SEQ ID NO: 221623

SEQ ID NO: 286727 - DNA, 1000 bp, Homo Sapiens; identical to SEQ ID NO: 116345

SEQ ID NO: 286728 - DNA, 1000 bp, Homo Sapiens; identical to SEQ ID NO: 116346

SEQ ID NO: 286729 - DNA, 1000 bp, Homo Sapiens; identical to SEQ ID NO: 116347

SEQ ID NO: 286730 - DNA, 1000 bp, Homo Sapiens; identical to SEQ ID NO: 221625

SEQ ID NO: 286731 - DNA, 1000 bp, Homo Sapiens
agtggtctcagaacaaaaggacactctgggcaacacccagattaagcagaaaagcaggcccgggaacaaaggcaagtttgtcaccaaagaccaagccaactgcagatgggctgctactgagcaggaggagggcatctctctcaaggttgagtgcactcaattggaccatgaattttcctgtgtctttgctggcaatccaacctcatgcctaaagctcaaggatgagagagtctattggaaacaagttgcccggaatctgcgctcacagaaagacatctgtagatattccaagacagctgtgaaaaccagagtgtgcagaaaggattttccagaatccagtcttaagctagtcagctccactctatttgggaacacaaagcccaggaaggagaaaacagagatgtcccccagggagcacatcaaaggcaaagagaccaccccctctagcctagcagtgacccagaccatggccaccaaagctcccgagtgtgtggaggacccagatatggcaaaccagaggaagactgccctggagttctgtggagagacttggagctctctctgcacattcttcctcagcatagtgcaggacacgtcatgctaatgaggtcaaaagagaacgggttcccttaagagatgtcatgtcgtaagtccctctgtatactttaaagctctctacagtccccccaaaatatgaacttttgtgcttagtgagtgcaacgaaatatttaaacaagttttgtattttttgcttttgtgttttggaatttgccttatttttcttggatgcgatgttcagaggctgtttcctgcagcatgtatttccatggcccacacagctatgtgtttgagcagcgaagagtctttgagctgaatgagccagagtgataatttcagtgcaacgaactttctgctgaattaatggtaataaaactctgggtgtttttcagaaatacattcaaaaaaaaaaaaaaaaaaaaaaaaaaaaaaaaaaaaaaaa

SEQ ID NO: 286732 - DNA, 1000 bp, Homo Sapiens
tactcatggaggtgacccccccggaggagctgcgtctgccagccccacccagcccagagaggaggcccccagtccccccacctcctcgccgccgccgtcgtcgccggttactgttctgggacaaggagactcagatctccccggagaaattccaggaacaactgcaaaccagagcccactgctgggaatgtcctatggtgcagccgcccgagaggaccatcagaggccctgcggagttgttcagaaccccaactctctctggctggctaccccctgaactactgggtctctggacccattgtgcccagccacccccaaaagccctcaggcgagagctgcctgaggaggcagccgctgaggaggaaaggagaaagattgaagttccaagtgagattgaggtcccgagggaggccctggagcccagtgttccccttatggtgtctttagagatctccctagaggcagctgaagaggagaagtcccgcatcagcctcatcccaccagaagaacggtgggcctggcctgaggtggaggcgccagaagctcctgcattgcccgtggtgcctgaactccctgaggtgcccatggagatgcctttggtgctgcccccagagctcgagctgctctcactggaagcagtgcacagggcagtggcactggagctgcaggctaacagggagcccgacttcagcagcctggtgtcacctctcagcccccgcaggatggctgcccgggtcttctacctgctcctggtgctctcagcgcaacagattcttcacgtgaaacaagaaaagccatatggtcgcctcctgatccagccggggcccagattccactgaggttagagtccatttacaaagctgccaggaaaccggccacttctagtaaaccacgtcgtgcctcactgggtcctgcttacctcatttctgaatgtgcatttccagccttcttgctctcagagctattgttcaagcagaaaacaagctgcttttattacagt

SEQ ID NO: 286733 - DNA, 1000 bp, Homo Sapiens; identical to SEQ ID NO: 116349

SEQ ID NO: 286734 - DNA, 1000 bp, Homo Sapiens; identical to SEQ ID NO: 116350

SEQ ID NO: 286735 - DNA, 1000 bp, Homo Sapiens; identical to SEQ ID NO: 116352

SEQ ID NO: 286736 - DNA, 931 bp, Homo Sapiens; identical to SEQ ID NO: 29576

SEQ ID NO: 286737 - DNA, 1000 bp, Homo Sapiens
gctaaagaaatccatgaagggcgcgggaacaaacgaagatgccttgattgaaatcttaactaccaggacaagcaggcaaatgaaggatatctctcaagcctattatacagtatacaagaagagtcttggagatgacattagttccgaaacatctggtgacttccggaaagctctgttgactttggcagatggcagaagagatgaaagtctgaaagtggatgagcatctggccaaacaagatgcccagattctctataaagctggtgagaacagatggggcacggatgaagacaaattcactgagatcctgtgtttaaggagctttcctcaattaaaactaacatttgatgaatacagaaatatcagccaaaaggacattgtggacagcataaaaggagaattatctgggcattttgaagacttactgttggccatagttaattgtgtgaggaacacgccggcctttttagccgaaagactgcatcgagccttgaagggtattggaactgatgagtttactctgaaccgaataatggtgtccagatcagaaattgaccttttggacattcgaacagagttcaagaagcattatggctattccctatattcagcaattaaatcggatacttctggagactatgaaatcacactcttaaaaatctgtggtggagatgactgaaccaagaagataatctccaaaggtccacgatgggctttcccaacagctccaccttacttcttctcatactatttaagagaacaagcaaatataaacagcaacttgtgttcctaacaggaattttcattgttctataacaacaacaacaaaagcgattattattttagagcatctcatttataatgtagcagctcataaatgaaattgaaaatggtattaaagatctgcaactactatccaacttatatttctgctttcaaagttaagaatctttatagttctactccattaaatataaagcaagataataaaacggaattc

SEQ ID NO: 286738 - DNA, 1000 bp, Homo Sapiens; identical to SEQ ID NO: 221627

SEQ ID NO: 286739 - DNA, 1000 bp, Homo Sapiens
ccctggctcaggcagagggagatggttagactcttgcagggctaaaactctaatttggaattgaatattgtggatatcttagttaaaggccatgcttacagcttagaaatgaagccttaagctgcatcaagttacgaagtgattaatttccttctcagcaaacctccgggaggttccagaatgagttcttcctgacaggttgtcttcactgggagcgtggggcccccaggccccaccagcaccgtcctcccctaatgaggggccctgccgaggcatcagctgctctgctcagttagtttttattcccggggtaccaagcagctgcacagtcggtgcctgggaggcacgtagaggcccagagagtccctgggggttctgctctgaccgtgtgggtggtgatccttgtcaggatgtacagtccttgctcccaccccatccaggatggccgcctgtccctgactattgagtcctgttgttgtaagccaggcatggagggctcctgcccttctgctgagccacagcccattgcagcactgtgctggccagacttcagctgccttgggaactgaagccctgccactgttgctagtcaggggcttggttctcccacttacactgttgacatctattttctgaagtgtgtttaaattattcagtgctaatcattgttttttcctttgtaaatgttgattcagaaaaggaaagcacaggctaagcagttgaaggttccccaccattcagtgagagcagaacccccattccccagcctctgctggtagcatgtcgcagtttccatgtgtttcaggatcttcgggctgtcgttagacaggttaatgaagaacacttctcaacagtttcctttttgttttcctttataattcactaaaataaagcatctattagtgtctgatttaggaatgtaaaatgattctgtattaatgtaaataagattatctattgcaaaaagatatttcaaacctaaaaaaaaaaaaaaaaaaaa

SEQ ID NO: 286740 - DNA, 1000 bp, Homo Sapiens
gtctcagaacggttgcccatcaaccggcgggacctggaccccaatgctgggcgctttgtccgctaccagttcacgcctgccttcctccgcctgaggcaggtgggagccacggtggagttcacagtgggagacaagcctgtcaacaacttccgcatgatcgagaggcactacttccgcaaccagctactcaaaagcttcgacttccactttggcttctgcatccccagcagcaagaacacctgcgagcacatttacgacttcccccctctctccgaggagctgatcagcgagatgatccgccacccgtatgagacccagtctgacagcttctacttcgtggatgaccggctggtgatgcacaataaagcagactattcctacagcgggacaccctgaccccacggctgccctgaccccaggaggctccagttctgggctgggagctgtgacctccccaacgctcacccctcaaccccaagtcctctgcttggggagttctccaggagctccggaccctgagtcaatgttgggaggaagggtacctggtgtccccagtcaagcccatgaagcccatgcggcctgctacatggggtggggtcgtagggaggctgtttgcctccacgtctaggaaggcctgtgagaggagcagtcaggacttccggacaacttagctgggccctacttgggcccaagtttcagaatagtgttcccctatcaaggctgtgactagatcaggcagggatccattccctgtcccctgcccactaccttcaggccatttagagttgtaaatttacaaagatccacggtgggctccagctgccaagccacccaagggagtctgggccctaggcctagccccatccctccccatgaggggccaagacactgcctaaggtgtgggagggactggctgagattgcagcccatggtaggagctggaccaactgtatatagttttcaataaactttttccttttctgttcaaaaaaaaaaaaaa

SEQ ID NO: 286741 - DNA, 1000 bp, Homo Sapiens; identical to SEQ ID NO: 116354

SEQ ID NO: 286742 - DNA, 1000 bp, Homo Sapiens
gcaggtggaaacaaaaattacagacatctgtggacttcccgttagaaaatcttgacttgtcacagtatgttattggtccaaagaacaatttgaagaaatataatttgttttctgtttcaaatcactacggtgggctggatggaggccactacacagcctattgtaaaaatgcagcaagacaacggtggtttaagtttgatgatcatgaagtttctgatatctccgtttcttctgtgaaatcttcagcagcttatatcctcttttatacttcattgggaccacgagtaactgatgtagccacataaggagacataggttataaactagttatcttttaaaaggctcagcaacacaactcttgaaatgcttatcaggataatggtagctatagctggccatttagaggaattctaggacagtgggagctgtgttactagcactatataattccggtcagtgctgacaaataacatttaacaagtattgcagtaatcatcacttacaggtaccatttatttcaaaacaacttttttagtctgctccaaagttaaaataattaactagctaagcattattattcgactggtctaaaaactattgttatctttttttttccttttcactgttatggccttttcacatttctaaatcccatcttgatatactatgaatactctagaatgatgtaaagcagataggaatgtatgtgtacatatttattgcatacttgcacatcaaatcgacgtacatagtttaacacgtggtccttttgtgaaacctagaactcagaggattgctttttttctttcagcctattttgagtaacttcagtgctttcttagggaaatgacagggcaaagcaatttttctgttggctttgggctgtatttgtgcactaaatctttattctaaaaaaaaaaatggaaactttaatttttttaaaacgagaatttcatttacagctacattaaaatcttaatgagaaaaataaaaaaaaaaa

SEQ ID NO: 286743 - DNA, 1000 bp, Homo Sapiens; identical to SEQ ID NO: 116355

SEQ ID NO: 286744 - DNA, 1000 bp, Homo Sapiens
cccccactcctctaagacaaagtagattcttacaaggccctttcctttggaacaagacagccttcacttttctgagttcttgaagcatttcaaagccctgcctctgtgtagccgccctgagagagaatagagctgccactgggcacctgcgcacaggtgggaggaaagggcctggccagtcctggtcctggctgcactcttgaactgggcgaatgtcttatttaattaccgtgagtgacatagcctcatgttctgtgggggtcatcagggagggttaggaaaaccacaaacggagcccctgaaagcctcacgtatttcacagagcacgcctgccatcttctccccgaggctgccccaggccggagcccagatacgggggctgtgactctgggcagggacccggggtctcctggaccttgacagagcagctaactccgagagcagtgggcaggtggccgcccctgaggcttcacgccgggagaagccaccttcccaccccttcataccgcctcgtgccagcagcctcgcacaggccctagctttacgctcatcacctaaacttgtactttatttttctgatagaaatggtttcctctggatcgttttatgcggttcttacagcacatcacctctttgcccccgacggctgtgacgcagccggagggaggcactagtcaccgacagcggccttgaagacagagcaaagcgcccacccaggtcccccgactgcctgtctccatgaggtactggtcccttccttttgttaacgtgatgtgccactatattttacacgtatctcttggtatgcatcttttatagacgctcttttctaagtggcgtgtgcatagcgtcctgccctgccccctcgggggcctgtggtggctccccctctgcttctcggggtccagtgcattttgtttctgtatatgattctctgtggttttttttgaatccaaatctgtcctctgtagtattttttaaataaatcagtgtttacatt

SEQ ID NO: 286745 - DNA, 1000 bp, Homo Sapiens; identical to SEQ ID NO: 116356

SEQ ID NO: 286746 - DNA, 1000 bp, Homo Sapiens; identical to SEQ ID NO: 116357

SEQ ID NO: 286747 - DNA, 1000 bp, Homo Sapiens
gtcagtcattatgacttatactaattcctagtgaaggcctaatgcacttgtaaaacaggattttctaggtgaattcctgatgaataccagatttactatgtatatgtggtgtgtctgaagttcttaacaaacatgggcaatattctggaaatgaaacaagttataactgagcaccatttgggttgataccaagtgcataagattcaaactttgagtgacatttagtccatttatggttgatattaggtttaatacctagaattcaaattgattattgctagtggccaactaaacctgtacaaaatagctgacagttttataactaatttcaatataaaaattgttttaatggcatttgttgaaagaaaaaagcatggctaaaatgtatcaaatgccatatttttaaattttggactttaagcatcttaatgagggcatataacaaattaattttagtacaatcttaaatatttttaataaatcctttcattttaaaaagagaattgccaatacagaaaaggagtatccaaacaatgtctcaacctgataatttccttagcagaattacctattgcaacttctgttcagaaatacacagcttgtttttttgcccaaggatgagtctacattttaagaactgcaatggtataaaggaacttaaggattctgagaatcatagtaataacatacattggaatagtactttataatttacaatccccatttacatcatttcaccttaatgttgaggacaatgttttgaaacaaatactatttttcctactttgcttttgagaaaattgacactcagacttgccctaatcatgcactttacttaaggaaagatcgagaaatcaaatgaagttctcctgactctctggtttagtgctcttttgttattatcctttaaatcaaactgggctataatagcaataaaagttagacgaagtgtagaaaataaaataaatttcataatgttaaaaaaaaaaaaaaaaaaaaa

SEQ ID NO: 286748 - DNA, 1000 bp, Homo Sapiens; identical to SEQ ID NO: 221629

SEQ ID NO: 286749 - DNA, 1000 bp, Homo Sapiens
gattttttgccatcgttgataaaaatgcaaagtcaaataaaaggtgtcttggtttgatgtcatagaatgatccaaggagagaaaaaaggtagttactgttttcaccagaaaaggtaatgagtgaaggaaagaatagtagcagaaagcacagtttgtgagtaaagctgtctggaattaagttaccaaaaatacaaagcaaaaggactattattttgggttgaagctccaaaactgacagcatctgataatctgttggtttatttcacttttcattaaatgaacattgatgagagaagatgccacttacccaagctttagagaatccctagtggaagattatatgataaactttcagtcctgacataacactagggcatttctagagtgtcattgctaaaacctcactgaacagatgcagccaaggtctgtgttcagcacttggtctctgttgttacgtaaaataataagcatttaaaatagtttacagatatttttgaccagttccttttagagattctttcagagaagaaaccagatctgacctgtttattgttggcgcttgttgaaaacgagctttctttcccatgatagtgcttcgtttttgaagtgttgaagctgtgctccccttaaatcgtggcaggagagattaaggtaattacaacactcagttctatgtcttacaagcactttgtcttgtctctgcaagaaaattcgattccagtcatttcccataaaatacagacattttaccaacataatatgctttgattgatgcagcattatgctttgggcagtattacaaaatagctggcgagtgctttctgtatttaaatattgtaaaaagaaaataagttataactgttataaagcagaacttttgttgcattttttaaactgttgaagtcactgtgtatgtttgtttggtcaatgtttccgcagtatttattaaaacatactttttttttcttcaaataaaaaagtaaccatgtctttgtctaaa

SEQ ID NO: 286750 - DNA, 1000 bp, Homo Sapiens
cattgccccaaatggagccttacagttggcaagtccaggcacagatggagtacagggacttcagacattaaccatgacaaattcaggcagtactcagcaaggtacaactattcttcagtatgcacagacctctgatggacagcagatacttgtgcccagcaatcaggtggtcgtacaaactgcatcaggagatatgcaaacatatcagatccgaactacaccttcagctacttctctgccacaaactgtggtgatgacatctcctgtgactctcacctctcagacaactaagacagatgacccccaattgaaaagagaaataaggttaatgaaaaacagagaagctgctcgagaatgtcgcagaaagaagaaagaatatgtgaaatgcctggaaaaccgagttgcagtcctggaaaatcaaaataaaactctaatagaagagttaaaaactttgaaggatctttattccaataaaagtgtttgattcctaagaaagaaaatatttttgtggacatgcataaaaattaaatggatttcctagtggagttttataaattaaaaggtcaaaactgaagctttttatttaggcttttccaaatcaaggataaatatcttacgcacgatatctagtgacagaggagaaagtggaaaatgacctcaaggaagctacgggcacaactggaagctttgtagaaattaaacatattcaaggagcaagaaatgaactttcagcagtctaaattttctaaataaccaatagttgccaatctaaaatggcagagaagatgaaatttgataaactgaattttttttaaaaatccatttaccctacaggtttgcatttgtttgctgaaatttacctttttttagttatatatatgtgtgtgtgtgtgtgtaatttctgccaataaattctaaattacaaaggtaagagaaaacctagtacattactaaatatataaagtatatgttctgattatgtaaaaaaaaaaaaaaaaaa

SEQ ID NO: 286751 - DNA, 1000 bp, Homo Sapiens; identical to SEQ ID NO: 116360

SEQ ID NO: 286752 - DNA, 1000 bp, Homo Sapiens; identical to SEQ ID NO: 116361

SEQ ID NO: 286753 - DNA, 1000 bp, Homo Sapiens
gggctccgggatttctgtgtctctgcctgtcggggacagacttccagattcactctcctttgggcccagtgatgatgacagggggactcccacctccagtcagcccagtgtgccccaggctggatccaacacccacaggagaggctctggggctctcattttcaccatcccagaagaaggaaattctcagcccaagggaaccaaagggcaaaacaagcaagatgaggatgaggaagtccctgatcggctttcctacctagatgagcaggcagggactcccccgtgctcagtccttttgccacctcacagagctcagagatacatggatgggcacctggtaccacgccgccgtctgctgccccccacacctgcaggtcggaagccctccttcaccatccagtgtctgcagcgccagggcagttgtgaggatttacccatcccaggcacctatcatcgtgggcgaaattcagggcccaatagggctcagggttcctgggcaacaccacctcagcggggtcggctcctgtatgccccgctgttgttggtggaagagggcgcagcgggggaggggtacctcggcagatccagtggcccactgcgcaccttcacctgtctgcacgtgcctggaacccactcggaccccagccatgggaagaggggcagtgccgacagcttggtggaggctgtgcttatctcagagggtctgggcctctttgctcgagacccacgtttcgtggccctggccaagcaggagattgcagatgcgtgtcgcctgacgctggatgagatggacaatgctgccagtgacctgctggcacagggaaccagctctctctatagcgacgaggagtccatcctctcccgcttcgatgaggaggacttgggagacgagatggcctgcgtccacgccctctgaattcccacccctccccaactgctcaataaacctcctgccctcccctccccagcaggaggcaggcatggaccacaaaaaaaaaaa

SEQ ID NO: 286754 - DNA, 1000 bp, Homo Sapiens; identical to SEQ ID NO: 116364

SEQ ID NO: 286755 - DNA, 1000 bp, Homo Sapiens
cgccccctgtgacttttcatatttccgttttccacttgtggaaaaaaagtgctaaagttttcttcccagagagagcataattccgaaacaaaactgtgacaatcttttgggttgattctcgactgcttttcgagcatgcggagccagcaggcctccctgaaacactgcttctcggccagcccgtcctcctctacctctctcctctccgcgccctccgacctctctcggccccctcaccccagctccgacctctctcagccccatcgccccaactccaacctctcggccccatcgccccaccgcagctactcccctttcttccaaacttttgcagaaaaaacaaaaaaactacaaacaaaagcagccctctgcctcctccccagggaagaccctgaccgtgtacatagccctggtgctcctgcccagccacccctcagatgcgttcgcctctggccctggggtgtgtctcggtgacgttttctatcagacgtgctccctcccatcctccagccctgcccaccctccctccactcctctcaactgcctcagcgatttcaagaaggaaataaagggataaagaaattcatgcttgcaccgagtacaaggacagacagcaggcacggcccgcagcctggcatctgtgcgtgtggcgtggcccgtggcttggcatctgtgtgcgtggtgtggcccgtggcctggcatctgtgtgcgtggcgtggcccgtggcctggcatctgtgtgtgtggcgtggcccgtggcctggcatctgtgcgcgtggcgtggcccgtggcctggcatctgtgtgcgtggctatcaggagttctaggaactcagtgcaatacgggagtgacccagctactgaaccagccacgaacagcccgccagaggcctgaagctgagcgtgtacgttaatgtgaatgtatatagtctttgcagaggtccaaatgatattcatgatggtaataaacgagatgtttgccaaataaaaaacagaaaccgc

SEQ ID NO: 286756 - DNA, 1000 bp, Homo Sapiens; identical to SEQ ID NO: 221634

SEQ ID NO: 286757 - DNA, 1000 bp, Homo Sapiens; identical to SEQ ID NO: 116365

SEQ ID NO: 286758 - DNA, 1000 bp, Homo Sapiens; identical to SEQ ID NO: 221636

SEQ ID NO: 286759 - DNA, 1000 bp, Homo Sapiens; identical to SEQ ID NO: 116366

SEQ ID NO: 286760 - DNA, 1000 bp, Homo Sapiens; identical to SEQ ID NO: 116368

SEQ ID NO: 286761 - DNA, 1000 bp, Homo Sapiens
gtcttcccagagggccggctggaacagtacatcccaagtcggccattgaaaactcaagagcttcgagagccagtgttgtcagcagccattgccacgaagatggcgcaatttcatggcatggagatgcctttcaccaaggagccccactggctgtttgggaccatggagcggtacctaaaacagatccaggacctgcccccaactggcctccctgagatgaacctgctggagatgtacagcctgaaggatgagatgggcaacctcaggaagttactagagtctaccccatcgccagtcgtcttctgccacaatgacatccaggaagggaacatcttgctgctctcagagccagaaaatgctgacagcctcatgctggtggacttcgagtacagcagttataactataggggctttgacattgggaaccatttttgtgagtgggtttatgattatactcacgaggaatggcctttctacaaagcaaggcccacagactaccccactcaagaacagcagttgcattttattcgtcattacctggcagaggcaaagaaaggtgagaccctctcccaagaggagcagagaaaactggaagaagatttgctggtagaagtcagtcggtatgctctggcatcccatttcttctggggtctgtggtccatcctccaggcatccatgtccaccatagaatttggttacttggactatgcccagtctcggttccagttctacttccagcagaaggggcagctgaccagtgtccactcctcatcctgactccaccctcccactccttggatttctcctggagcctccagggcaggaccttggagggaggaacaacgagcagaaggccctggcgactgggctgagcccccaagtgaaactgaggttcaggagaccggcctgttcctgagtttgagtaggtccccatggctggcaggccagagccccgtgctgtgtatgtaacacaataaacaagcttcttcttcccaccctg

SEQ ID NO: 286762 - DNA, 1000 bp, Homo Sapiens
agcctgtgattgtgtttattgatgatgttgaacaagtggtaactttaaaggattctgtatgccaagtgaaaaaaaaagatgtctgacctccttcatatgcaaaaatataccttcagagactgtcagtaggctggaagaagtggatattgaagttttgacatcaatgatgaggctccagttgtctatgcattgactgatggtgaaatggctggagtgattctgaatcaaggtgattgtgattatagtgacaatgaagatgatgctattaatactgcataaaaagtgcctgtagatgacatggtgaaaatatttgacaggcttatggaaggactacagcagcacgcattcataacagaacaagaaattatctcagcttataaaatcaaacagagacttctagacaaaaaccattgttgatgaggcagatgcctctagaagagacgtttaaaagccatcaaacacaatgcctcatcttccctggaggacccacttcctgatccctcaactgtgtctgatgtttcttctcatgtaagaaataaaaaataaaaataaaaaaatatatattggtatgtaactacaggaaaaaaataaaaaatatatagtggacagtaacctttcaatcaaaactcagtatcataagtagagactgaaaacttgccgttattgattgttgttattaacagctgatacaggtattctgctgatgctactgctgcctagttaccatgaacacgttttttcactattaatggtgcgtcatattttttacttttaagtacttacgtgtgagtaagtgtaagaaaatgattgcttatcagtagtatcaatgatttactcaatatctgaatcaccttgattcagaaccatttcagctgtttcaccatcagtcaatgaataacagcctcattgatgtcaaaaacttcaatatccacttctttcagcctactgtagactctggaagtatactttttgcatatgtaaggaagtcagattttttttt

SEQ ID NO: 286763 - DNA, 1000 bp, Homo Sapiens
gataaggctgagatgagtgctgggagtggtggacattcctgctcgtgcaaagatggccactttccccgcagctgcagggcctcgcgctcggccctcgccaggccagccccactccttgtaccaagtgtgaactggggtcattcggtctgtgatctcgttgcactgctccaagtctggctgtgtccaggcggtccatgttgaaaatggaggatggctgctgacttctgactggctgagcagtgggttccttcaggttccttgccaaccctcctcccctgcccacaacttctccaaacaaagcaggctgtttgctcacttcttcaaaaggaggaatgataacccaaatctgcccaagtgacacttgagaaggttttggctggggttcctggtggatttcttactacctaacgcccaagaaaaccaactaaggactctcaaaccatacctggtgggggttcttcgctcaacctcttcttccctaggtcaaagccactatcatctgatgtgttagggatgggttctgattggcagaaattaatcagctcccaatgggagcccacggaactaagtagggtcccaagaaaaaaaacgggagctatttcacagagctgagcttctgccaaatttcattcctcaaacctttcaggaggggtggttggcgtttctaaaatgtttatgggatttgagttgcaggtgtccacttaactgactagctttgataaacaatgtcagattttaactatgaaaacgacattaccttgtgcatttttatattgattcctattttttttttaagattaaagtttaaatgttttccactagtcatttcacttctaacttggtataggaagcttagctctctacatacctatcatgtgccctgtatcacagaagattcaggaaaaatgcacttgggaatcaaagaaaatggaacttctttttgaaaagacaagcaaccatgttaactgtattgacacatcctcaataaaacctgttgtat

SEQ ID NO: 286764 - DNA, 1000 bp, Homo Sapiens
ctgaaggatgccatgtttgctctaaattaagacagcattgatctcctggaggctggttctgctgcctctacacaggggccctgtacagtgaatggtgccattttcgaaggagcagtgtgacctcctgtgacccatgaatgtgcctccaagcggccctgtgtgtttgacatgtgaagctatttgatatgcaccaggtctcaaggttctcatttctcaggtgacgtgattctaaggcaggaatttgagagttcacagaaggatcgtgtctgctgactgtttcattcactgtgcactttgctcaaaattttaaaaataccaatcacaaggataatagagtagcctaaaattactattcttggttcttatttaagtatggaatattcattttactcagaatagctgttttgtgtatattggtgtatattatataactctttgagcctttattggtaaattctggtatacattgaattcattataatttgggtgactagaacaacttgaagattgtagcaataagctggactagtgtcctaaaaatggctaactgatgaattagaagccatctgacagcaggccactagtgacagtttcttttgtgttcctatggaaacattttatactgtacatgctatgctgaagacattcaaaacgtgatgttttgaatgtggataaaactgtgtaaaccacataatttttgtacatcccaaaggatgagaatgtgacctttaagaaaaatgaaaacttttgtaaattattgatgattttgtaattcttatgactaaattttcttttaagcatttgtatattaaaatagcatactgtgtatgttttatatcaaatgccttcatgaatctttcatacatatatatatttgtaacattgtaaagtatgtgagtagtcttatgtaaagtatgtttttacattatgcaaataaaacccaatacttttgtccaatgtggttggtcaaatcaactgaataaattcagtattttgcctt

SEQ ID NO: 286765 - DNA, 425 bp, Homo Sapiens; identical to SEQ ID NO: 116369

SEQ ID NO: 286766 - DNA, 1000 bp, Homo Sapiens; identical to SEQ ID NO: 117428

SEQ ID NO: 286767 - DNA, 1000 bp, Homo Sapiens; identical to SEQ ID NO: 221638

SEQ ID NO: 286768 - DNA, 838 bp, Homo Sapiens; identical to SEQ ID NO: 221639

SEQ ID NO: 286769 - DNA, 1000 bp, Homo Sapiens
cctagtggagtatagcatcgtgatccagcagctctcaaatggcaaatgggtcccctttgatggcgatgacattcagctggagtttgtccgcattgatccttttgtgaggaccttcctgaagaagaaaggtggcaaatacagtgttcagttcaagttgcccgacgtgtatggtgtattccagtttaaagtggattacaaccggctaggctacacacacctgtactcttccactcaggtatccgtgcggccactccagcacacgcagtatgagcgcttcatcccctcggcctacccctactacgccagcgccttctccatgatgctggggctcttcatcttcagcatcgtcttcttgcacatgaaggagaaggagaagtccgactgaggggctagagccctctccgcacagcgtggagacggggcagggaggggggttattaggattggtggttttgttttgctttgtttaaagccgtgggaaaatggcacaactttacctctgtgggagatgcaacactgagagccaaggggtgggagttgggataatttttatataaaagaagtttttccactttgaattgctaaaagtggcatttttcctatgtgcagtcactcctctcatttctaaaatagggacgtggccaggcacggtggctcatgcctgtaatcccagcactttgggaggccgaggcaggcggctcacgaggtcaggagatcgagactatcctggctaacacggtaaaaccctgtctctactaaaagtacaaaaaattagctgggcgtggtggtgggcacctgtagtcccagctactcgggaggctgaggcaggagaaaggcatgaatccaggaggcagagcttgcagtgagctgagatcacgccattgcactccagcctgggcaacagtgttaagactctgtctcaaatataaataaataaataaataaataaaaataaagcgagatgttgccctcaaaaaaaaaaaaaaaaaaaaaaaaaaaa

SEQ ID NO: 286770 - DNA, 487 bp, Homo Sapiens
ccttgctatagaagacctgggacagaggactgctgtctgccctctctggtcaccctgcctagctagaggatctgtgaccccagccatgaggaccctcgccatccttgctgccattctcctggtggccctgcaggcccaggctgagccactccaggcaagagctgatgaggttgctgcagccccggagcagattgcagcggacatcccagaagtggttgtttcccttgcatgggacgaaagcttggctccaaagcatccaggctcaaggaaaaacatggactgctattgcagaataccagcgtgcattgcaggagaacgtcgctatggaacctgcatctaccagggaagactctgggcattctgctgctgagcttgcagaaaaagaaaaatgagctcaaaatttgctttgagagctacagggaattgctattactcctgtaccttctgctcaatttcctttcctcatctcaaataaatgccttgttac

SEQ ID NO: 286771 - DNA, 1000 bp, Homo Sapiens; identical to SEQ ID NO: 116372

SEQ ID NO: 286772 - DNA, 1000 bp, Homo Sapiens; identical to SEQ ID NO: 221641

SEQ ID NO: 286773 - DNA, 1000 bp, Homo Sapiens; identical to SEQ ID NO: 116374

SEQ ID NO: 286774 - DNA, 1000 bp, Homo Sapiens; identical to SEQ ID NO: 221642

SEQ ID NO: 286775 - DNA, 1000 bp, Homo Sapiens; identical to SEQ ID NO: 221643

SEQ ID NO: 286776 - DNA, 1000 bp, Homo Sapiens; identical to SEQ ID NO: 221644

SEQ ID NO: 286777 - DNA, 1000 bp, Homo Sapiens
gctaacctttgttcggcagcttgaaatttacagggcgagtaggcctgggaaacctctgagggtttactttcttatatacggaggttcaactgaggaacaacgctatctcactgctttgcggaaagaaaaggaagcttttgaaaaactcataagggaaaaagcaagcatggttgtccctgaagaaagagaaggcagagatgaaacaaacttagacctagtaagaggcacagcatctgcagatgtttccactgacactcggaaagccggtggccaggaacagaatggtacacagcaaagcatagttgtggatatgcgtgaatttcgaagtgagcttccatctctgatccatcgtcggggcattgacattgaacccgtgactttagaggttggagattacatcctcactccagaaatgtgcgtggagcgcaagagtatcagtgatttaatcggctctttaaataacggccgcctctacagccagtgcatctccatgtcccgctactacaagcgtcccgtgcttctgattgagtttgaccctagcaagcctttctctctcacttcccgaggtgccttgtttcaggagatctccagcaatgacattagttccaaactcactcttcttacacttcacttccccagactacggattctctggtgcccctctcctcatgcaacggcggagttgtttgaggagctgaaacaaagcaagccacagcctgatgcggcgacagcactggccattacagcagattctgaaacccttcccgagtcagagaagtataatcctggtccccaagacttcttgttaaaaatgccaggggtgaatgccaaaaactgccgctccttgatgcaccacgttaagaacatcgcagaattagcagccctgtcacaagacgagctcacgagtattctggggaatgctgcaaatgccaaacagctttatgatttcattcacacctcttttgcagaagtcgtatcaaaaggaaaagggaaaaagtga

SEQ ID NO: 286778 - DNA, 1000 bp, Homo Sapiens; identical to SEQ ID NO: 116377

SEQ ID NO: 286779 - DNA, 1000 bp, Homo Sapiens; identical to SEQ ID NO: 116378

SEQ ID NO: 286780 - DNA, 1000 bp, Homo Sapiens; identical to SEQ ID NO: 221647

SEQ ID NO: 286781 - DNA, 1000 bp, Homo Sapiens
atcatttagcatatcttctaacttgcaaaggcatgttcgcaacatccacaataaagagaagccatttaagtgtcacttatgttataggtgttttggtcaacaaaccaatttagacagacacctaaagaaacatgagaatgggaacatgtccggtacagcaacatcgtcgcctcattctgaactggaaagtacaggtgcgattctggatgacaaagaagatgcttacttcacagaaattcgaaatttcattgggaacagcaaccatggcagccaatctcccaggaatgtggaggagagaatgaatggcagtcattttaaagaagaaaaggctttggtgcccagtcaaaattcagacttgctggatgatgaagaagttgaagatgaggtgttgttagatgaggaggatgaagactatgatattactggaaaaacaggaaaggaaccagtgacaagtaatttacatgaaggaaacccggaggatgactatgaagaaaccagtgccctggagatgagttgcaagacatccccagtgaggtataaagaggaagaatataaaagtggactttctgctctagatcatataaggcacttcacagatagcctcaaaatgaggaaaatggaagataatcaatattctgaagctgagctgtcttcttttagtacttcccatgtgccagaggaacttaagcagccgttacacagaaagtccaaatcgcaggcatatgctatgatgctgtcactgtctgacaaggagtccctccattctacatcccacagttcttccaacgtgtggcacagtatggccagggctgcggcggaatccagtgctatccagtccataagccacgtatgacgttatcaaggttgaccagagtgggaccaagtccaacagtagcatggctctttcatataggactatttacaagactgctgagcagaatgccttataaacctgcagggtcactcatctaaagtctagtgaccttaaactgaatgattt

SEQ ID NO: 286782 - DNA, 1000 bp, Homo Sapiens
cgcccgctgtcgagagcatgcccatgtctgtgtacgcctccaccgcctcctgctctgacgtgtcagcctgctgcgaagtggagtccgaggtcatgatgagtgactatgagagcggggacgacggccacttcgaagaggtgacgatcccgcccctggattcccagcagcacacggaagtctgactctcaactccccccaaagtgcctgactttagtgaacctagaggtgatgtgagtaatccgcgctgttctttgcagcagtgcttccaagctttttttggtgagccgaatgggcatggctgcgctggatcctgcgcctctggacgtgctagccatttccagtgtcccaactactgtcatcgtgaggttttcatcggctgtgccatttcccaacgtcttttgggatttacatctgtctgtgttaaaataatcaaacgaaaaatcagtcctgtgttgtcagcatgattcatgtatttatatagatttgattattttaattttcctgtctcttttttttgtaaattttatgtacagatttgatttttcatagttttaactagatttccaagatattttgtgcatttgtttcaactgaattttggtggtgtcagtgccattatctagcaccctgatttttttttttttactataaccagggtttcattctgtctttttccactgaagtgtgacattttgttagtacatttcagtgtagtcattcatttctagctgtacataggatgaaggagagatcagatacatgaacatgtcttacatgggttgctgtatttagaattataaacatttttcattattggaaagtgtaacggggaccttctgcatacctgtttagaaccaaaaccaccatgacacagtttttatagtgtctgtatatttgtgatgcaatggtcttgtaaaggtttttaatgaaaactaccattagccagtctttcttactgacaataaattattaataaaatacttgagctttaaaaaaaaaa

SEQ ID NO: 286783 - DNA, 1000 bp, Homo Sapiens; identical to SEQ ID NO: 221648

SEQ ID NO: 286784 - DNA, 1000 bp, Homo Sapiens; identical to SEQ ID NO: 116379

SEQ ID NO: 286785 - DNA, 1000 bp, Homo Sapiens; identical to SEQ ID NO: 116380

SEQ ID NO: 286786 - DNA, 1000 bp, Homo Sapiens; identical to SEQ ID NO: 116382

SEQ ID NO: 286787 - DNA, 1000 bp, Homo Sapiens
agaagatttctcccaggaaatctttgtacagctttaagttgtgtcagattctctgaaaacattttttagaaagcaaaatttttatatttgttcaatttcagctatacccaagtagatttacatgtatatgaagcaaatatttttaaaaatttctgtttgtacatattctgcatgttttataatttcaaaatgcatcacttacataggtatttctcccacagaaatgatgaaagtgaccagaaaaaaacaaaaacaaaacccctttactctgtaggtcattgaaacgaagtaagctggcagctggttttattggaatgacagtgttctcggaaggagcagcctacaagataacttgaatttgccaattctgcaaaatctgtgcttttttgaaaatttaagagtggggacgtgaaactgtattctgtgccttccatcatgatttccacatgaaagcactttaaggcactgattttaagataatgtttttggaaaacccaatgcatatgggtttctgaaatattttatggacttatttctccccaggaaatgattcttacggaaaaaaattgcttttgtatgtagaacaggaactttttgtattacagtgatgcaatagacatgtctaatgtaacttctacttttccttttgaaagctcagtgtctgtgctatgacttgctctcatcacaatattgttgaattccacaatgtatggacattaaacactggcagactgttcactttttcttttttttttttggtaaaatattacttcaaacccctttttcttgctttatttttcagtgttttattgctttatgaactgtttaaccctgaaatccctctaggttatctatactgtataaaaaagcaattacccttaaaactgtactctggcctacttttctattttgcaattaaatatctttttcacatatgttcattgtagacttatgtttttatcacatcttattaacacattaaaaatgttatcctactgca

SEQ ID NO: 286788 - DNA, 1000 bp, Homo Sapiens
ccacggccaaaggcagcagctcctggcagacaagtcggccgccagcccagggcgcctcatggccccctcaggccaagccgccccccaaagcctgcacacagccaaggcctaactatgcctcgaacttcagtgtgatcggggcgcgggaggagcggggggtccgcgcacccagctttgctcaaaagccaaaagtctctgagaacgactttgaagatctgttgtccaatcaaggcttctcctccaggtctgacaagaaagggccaaagaccattgcagagatgaggaagcaggacctggctaaagacacggacccactcaagctgaagctcctggactggattgagggcaaggagcggaacatccgggccctgctgtccacgctgcacacagtgctgtgggacggggagagccgctggacgcccgtgggcatggccgacctggtggctccggagcaagtgaagaagcactatcgccgcgcggtgctggccgtgcaccccgacaaggctgcggggcagccgtacgagcagcacgccaagatgatcttcatggagctgaatgacgcctggtcggagtttgagaaccagggctcccggcccctcttctgaggccgcagtggtggtggctgcgcacacagctccacaggttgggagccgtcgtgggacctgggtccccaccgtgaggaccccgtgggcgacagcaggtgtggccagggtggggctccgagccccgggtcaccgcccgcccagcgttccaggcacatgaagagaaagcattccaaagcctctgattgttgtttcctttttctcctcccgaaggaacagctgattcatgctcctcccgcaattgtcacgtctgtgatttatttggtgtttcgggcgtggcctctggagccccggcacgtggtgggccacgctgctggcgctcatgggccctggtgtttgcaccgcactttgtaatcagtcccgtggttgtctgtacagaattaaactattttccgatg

SEQ ID NO: 286789 - DNA, 1000 bp, Homo Sapiens
tggtacacatctctggaggctgagtcggttcatgaggtctcttatcaaaaatattactcagtttgcaagactgcattgtaactttaacatacactgtgactgacgtttctcaaagttcatattgtgtggctgatctgaagtcagtcggaatttgtaaacagggtagcaaacaagatatttttcttccatgtatacaataatttttttaaaaagtgcaatttgcgttgcagcaatcagtgttaaatcatttgcataagatttaacagcattttttataatgaatgtaaacattttaacttaatggtacttaaaataatttaaaagaaaaatgttaacttagacattcttatgcttcttttacaactacatcccattttatatttccaattgttaaagaaaaatatttcaagaacaaatcttctctcaggaaaattgcctttctctatttgttaagaatttttatacaagaacaccaatataccccctttattttactgtggaatatgtgctggaaaaattgcaacaacactttactacctaacggatagcatttgtaaatactctaggtatctgtaaacactctgatgaagtctgtatagtgtgactaacccacaggcaggttggtttacattaatttttttttttgaatgggatgtcctatggaaacctatttcaccagagttttaaaaataaaaagggtattgttttgtcttctgtacagtgagttccttcccttttcaaagctttctttttatgctgtatgtgactatagatattcatataaaacaagtgcacgtgaagtttgcaaaatgctttaaggccttcctttcaaagcatagtccttttggagccgttttgtaccttttataccttggcttatttgaagttgacacatggggttagttactactctccatgtgcattggggacagtttttataagtgggaaggactcagtattattatatttgagatgataagcattttgtttgggaacaatg

SEQ ID NO: 286790 - DNA, 1000 bp, Homo Sapiens
ggtgctaatacgataggctgaatgtctgaggctaccaggtttatcacataaaaaacattcagtaaaatagtaagtttctcttttcttcaggggcattttcctacacctccaaatgaggaatggattttctttaatgtaagaagaatcatttttctagaggttggctttcaattctgtagcatacttggagaaactgcattatcttaaaaggcagtcaaatggtgtttgtttttatcaaaatgtcaaaataacatacttggagaagtatgtaattttgtctttggaaaattacaacactgcctttgcaacactgcagtttttatggtaaaataatagaaatgatcgactctatcaatattgtataaaaagactgaaacaatgcatttatataatatgtatacaatattgttttgtaaataagtgtctccttttttatttactttggtatatttttacactaaggacatttcaaattaagtactaaggcacaaagacatgtcatgcatcacagaaaagcaactacttatatttcagagcaaattagcagattaaatagtggtcttaaaactccatatgttaatgattagatggttatattacaatcattttatatttttttacatgattaacattcacttatggattcatgatggctgtataaagtgaatttgaaatttcaatggtttactgtcattgtgtttaaatctcaacgttccattattttaatacttgcaaaaacattactaagtataccaaaataattgactctattatctgaaatgaagaataaactgatgctatctcaacaataactgttacttttattttataatttgataatgaatatatttctgcatttatttacttctgttttgtaaattgggattttgttaatcaaatttattgtactatgactaaatgaaattatttcttacatctaatttgtagaaacagtataagttatattaaagtgttttcacatttttttgaaagacaaaaa

SEQ ID NO: 286791 - DNA, 1000 bp, Homo Sapiens; identical to SEQ ID NO: 221650

SEQ ID NO: 286792 - DNA, 1000 bp, Homo Sapiens; identical to SEQ ID NO: 118911

SEQ ID NO: 286793 - DNA, 1000 bp, Homo Sapiens; identical to SEQ ID NO: 116383

SEQ ID NO: 286794 - DNA, 1000 bp, Homo Sapiens
ttcaaggacaatacatgtcttaaaaatgcaattcaagcctttggcaatggctccgatgtgaccgtgtggcagccagccttcccagtacagaccaccactgccactaccaccactgccctccgggttaagaacaagcccctggggccagcagggtctgagaatgaaattcccactcatgttttgccaccgtgtgcaaatttacaggcacagaagctgaaatccaatgtgtcgggcaatacacacctctgtatttccaatggtaattatgaaaaagaaggtctcggtgcttccagccacataaccacaaaatcaatggctgctcctccaagctgtggtctgagcccactgctggtcctggtggtaaccgctctgtccaccctattatctttaacagaaacatcatagctgcattaaaaaaatacaatatggacatgtaaaaagacaaaaaccaagttatctgtttcctgttctcttgtatagctgaaattccagtttaggagctcagttgagaaacagttccattcaactggaacattttttttttttccttttaagaaagcttcttgtgatccttcggggcttctgtgaaaaacctgatgcagtgctccatccaaactcagaaggctttgggatatgctgtattttaaagggacagtttgtaacttgggctgtaaagcaaactggggctgtgttttcgatgatgatgatgatcatgatgatgatgattttaacagttttacttctggcctttcctagctagagaaggagttaatatttctaaggtaactcccatatctcctttaatgacattgatttctaatgatataaatttcagcctacattgatgccaagcttttttgccacaaagaagattcttaccaagagtgggctttgtggaaacagctggtactgatgttcacctttatatatgtactagcattttccacgctgatgtttatgtactgtaaacagttctgcactcttgtacaaaagaaaaaac

SEQ ID NO: 286795 - DNA, 1000 bp, Homo Sapiens
ccttgctctgtggcttttcccaacacaatcagtgctagtgctggggaggaacagtcaagagcagtcagttgcttgcttattttttctggatgagtctgggacacactgtaactttaacacatttaagaagtaggtgtgtggccttttcagaaggtggcatggtcctcaagtgagttcttagtattttatatcagcaaaataattcaattttgcaggttgcaaacaaatataaaacctgtttctgtttatgaatattattcttttagaatagaataagtacatgctgctgtaataaaattgcctttaatcacttaacaagcctaaccttgactcaaacagtgaatgcctatagaaataataaatgaaaaaaactagtatttttatatcataaaacaatgtcatttatagcttatcattcatgtattgtccagcagacattaaaagccctgtggataattaagttatcttcatacctgcaaaatggtggaggctattttcattaaaactgtcagaatttgcttaccataattatgatacagtccaaagaatgcagtcactttttatcatgttaactaattgttctcttttgaagatctatggttgactaattaaacaataattcaagtagagtgtcccagaaaaaaaccacttgggctccctgtttggagtctggctggctctgagcattgccaatggcccctactcacctgactttgtatcctctccttttagaggctttgcattctgcacccagcttcactaacagtgggctgaaaacatccttgggttgagtgtttcatttgggagttatttggccagggccttttgaacagtagtgtccccatgaagtgctagataatatatgtgtaagagtcagcttttttttttttttttaactctaacacccttcagaaatttctaactactttgtaactgcatggcttaacctggtgataaaagcagttattaaaagtctacgttttccaaaaaaaaaaaaaaa

SEQ ID NO: 286796 - DNA, 1000 bp, Homo Sapiens; identical to SEQ ID NO: 221652

SEQ ID NO: 286797 - DNA, 1000 bp, Homo Sapiens
cagagctacacctttcataacaggctcagatcactcagctccctgtgacctttgtattcacccaggcttccttctcagtagctctagctgggggaggtgtcagctgggcccctcctgtgctatctccccagaggacatccctgactccacccctttcttcctcccaaactctgcacctcttcctcagctgctccagaccggccagggtaaccagctaaccatgcctggcatctggaagccagcaggccagagggtggcccaaaggctgatgaacggtagggaagggtgagcagattcctatgttggtgggcaccaatattccaagggcagctctctttgctgaatgagggccttctcgtgaggtactgacaacaccagcaactcgagagctgggaaactcaaggaggaggaagaaaatcaaaaccaccctactccctggggtgaggaaagaacaggaggggaggaggaggagtgtgctctgcacttgccttgctccagcatggggtggcagcagaggaatgtcacaggtcagcagcctaggcctccagctataaatagtccggagggcccgagaggctcccgcccgtccagcagggctgtcagcttcctgtgtggcagcacctggcacactggctctggccagcattatgctaaaaccctgttactctccaatgaaccagggaggcgggctcctctctgcgcctatcccttgagaattctgtcttaccagtgaagggtggggctgcccagatcaggcagcaggagtgaggggcacagtcaccccaggccttgctgagcccaggtctgggtactgagtgtccagagctgcctccccaggaggttaaggtgggggcaaaggggaagcttcaagcactttgcctacttttgttcactccccagtgcactgtgactcaggccttcccatcaggcctatttgtctacccaataaagcgtgttttttccagaaaaaaaaaaaaaaaaaaaaaaaaaaaaaaaaaaa

SEQ ID NO: 286798 - DNA, 1000 bp, Homo Sapiens
ggtcctcagttgctgagatactcaagtacacactgtgggaagtcagctgttctggcacagtgagtgaacagctcaggaactcagaaaccaagaatctgtgtctcctggaaacagctcaataagttattacttttccacaaatcagtatatggctttttatgtgggtcctctgactgatgctttcagattaaaattgtttccaagatagagagccgactccactttcatagttattgtttctggtcactatataggcatcacatttttgtgtggatatgaaacttaggaaggatcctcttgactccttgtgatgtggcaataaattttttttaaaaaactgaaaatacttaggaaggatccgcataatttttttctgcaacttaaatgaaatgcatcattcttgttaattataccatggtgaattaatcacttttgaagcaatatcagttattttttgaataataacttttctaaagccttaagtcttaatattaaatatatgattagccaggcacggtggctgacacctgtaatcccagcactttgggaggccaaggtggggggattacccgaggtcaggaattcgagaccagcctgaccaacatggagaaaccccgtctctactaaaaatacaaaattagccggtcatggtggtgcatgtctgcaaacccagctactcgggaggctgaagcaggagaatcacttgaacctgggaggcagaggttgtggtgagccaacatcacaccattgcactccagcctgggcaacaagagtaaaactctgtctcaaaaataaataaataaaatagataaataaatatatgattaactaattttaaaaatgttaaaatgtattcttaaattcattttaattttgtacaataacctgctagacacatttttaaaatgcaacatgtgtacttaatttctttatgtaatctatgtatatacatttatgaattaaagtaattgttggttatcttaaaaaaaaaaaaaaaaaa

SEQ ID NO: 286799 - DNA, 1000 bp, Homo Sapiens; identical to SEQ ID NO: 221653

SEQ ID NO: 286800 - DNA, 1000 bp, Homo Sapiens
agaatccccagttttcccctctcatcccacagtcccttctctcctggtctggtgtatgcaaattgtatggaaaaagggctgtgttaatattcataagaatacaagaacttaggaagagtgaggttggtgtgtcactggtcaacctttgtgctcccagatcccatcacagtttggcgattgtggagggcctcctgaaggaggagatgagtaaatatatttttttggagacagggtctcactgtgttgcccaggctggagtgcagtagtgcagtcgtggctcactgcagcctccacctcctgggctctccagcgatcttcccacatcagcctcccgagtagctgggaccacaaatgtgagcccacccatgcctggctaatttttgtactttttgtataaatggagtctcactatgtttccccaggctgatcttgaactcctgggctcaagagatcctcctgccttggcctcccaaagtgctcagattagagatgtgagccgccatgtctggccagataaattaagtcaaacatttggtttccagaaaataaagacaaatagagaaggttagatttttttttttccaacaagtggataaaagtctgtgactcgggggaaagtggaaggagaaatgcagccgatatagagtcattatgtttgcaaagcccctggtcatacaggccagggaacataagaccgcaattctaagtttctagataaacagcgatctccaagtcaagactgaggatgaagagggagaatgtcagaactcaagtgaagggcaatcagggcagactgcctggaggagtgatgccagaaggtttgggaagaaggtgtgggacaagaagaaagggtatttattcattcattcaacagaggtttatgtagggcactgtgctgggtggggctggggacacaacaatgactgaggcagcctggccttgccttcacagggctcaccatacacaagtaaataaaaaatatgtaatgtttggaattgct

SEQ ID NO: 286801 - DNA, 1000 bp, Homo Sapiens
tgttccttacacctctgtcttccttccagtcttttacacagctgtgttcctgactggagtgctggggaaccttgttctcatgggagcgttgcatttcaaacccggcagccgaagactgatcgacatctttatcatcaatctggctgcctctgacttcatttttcttgtcacattgcctctctgggtggataaagaagcatctctaggactgtggaggacgggctccttcctgtgcaaagggagctcctacatgatctccgtcaatatgcactgcagtgtcctcctgctcacttgcatgagtgttgaccgctacctggccattgtgtggccagtcgtatccaggaaattcagaaggacagactgtgcatatgtagtctgtgccagcatctggtttatctcctgcctgctggggttgcctactcttctgtccagggagctcacgctgattgatgataagccatactgtgcagagaaaaaggcaactccaattaaactcatatggtccctggtggccttaattttcaccttttttgtccctttgttgagcattgtgacctgctactgttgcattgcaaggaagctgtgtgcccattaccagcaatcaggaaagcacaacaaaaagctgaagaaatctataaagatcatctttattgtcgtggcagcctttcttgtctcctggctgcccttcaatactttcaagttcctggccattgtctctgggttgcggcaagaacactatttaccctcagctattcttcagcttggtatggaggtgagtggacccttggcatttgccaacagctgtgtcaaccctttcatttactatatcttcgacagctacatccgccgggccattgtccactgcttgtgcccttgcctgaaaaactatgactttgggagtagcactgagacatcagatagtcacctcactaaggctctctccaccttcattcatgcagaagattttgccaggaggaggaagaggtctgtgtcactctaa

SEQ ID NO: 286802 - DNA, 1000 bp, Homo Sapiens
aaccatctatatgatgaatgtggcattagtggacttgatatttataatgactttaccctttcgaatgttttattatgcaaaagatgaatggccatttggagagtacttctgccagattcttggagctctcacagtgttttacccaagcattgctttatggcttcttgcctttattagtgctgacagatacatggccattgtacagccgaagtacgccaaagaacttaaaaacacgtgcaaagccgtgctggcgtgtgtgggagtctggataatgaccctgaccacgaccacccctctgctactgctctataaagacccagataaagactccactcccgccacctgcctcaagatttctgacatcatctatctaaaagctgtgaacgtgctgaacctcactcgactgacattttttttcttgattcctttgttcatcatgattgggtgctacttggtcattattcataatctccttcacggcaggacgtctaagctgaaacccaaagtcaaggagaagtccataaggatcatcatcacgctgctggtgcaggtgctcgtctgctttatgcccttccacatctgtttcgctttcctgatgctgggaacgggggagaacagttacaatccctggggagcctttaccaccttcctcatgaacctcagcacgtgtctggatgtgattctctactacatcgtttcaaaacaatttcaggctcgagtcattagtgtcatgctataccgtaattaccttcgaagcatgcgcagaaaaagtttccgatctggtagtctacggtcactaagcaatataaacagtgaaatgttatgaataataaggttctttcatttcaatcccatcaaaattcacttcactaactactctggcgtcaatggatattctgtataatactatcaagtcccttttctcttgaaaaaataaattcattatcttcattttaaaaacttatataaaacatttttgtgaattaaaaaaaaaaaaaaa

SEQ ID NO: 286803 - DNA, 1000 bp, Homo Sapiens
ggcatttggctatttggaaactgtcaatttttgccttttggaagtattgattattgtctttctaactgtattgattatttctggcaacatcattgtgatttttgtatttcactgtgcacctttgttgaaccatcacactacaagttattttatccagactatggcatatgctgacctttttgttggggtgagctgcgtggtcccttctttatcactcctccatcacccccttccagtagaggagtccttgacttgccagatatttggttttgtagtatcagttctgaagagcgtctccatggcttctctggcctgtatcagcattgatagatacattgccattactaaacctttaacctataatactctggttacaccctggagactacgcctgtgtattttcctgatttggctatactcgaccctggtcttcctgccttcctttttccactggggcaaacctggatatcatggagatgtgtttcagtggtgtgcggagtcctggcacaccgactcctacttcaccctgttcatcgtgatgatgttatatgccccagcagcccttattgtctgcttcacctatttcaacatcttccgcatctgccaacagcacacaaaggatatcagcgaaaggcaagcccgcttcagcagccagagtggggagactggggaagtgcaggcctgtcctgataagcgctatgccatggtcctgtttcgaatcactagtgtattttacatcctctggttgccatatatcatctacttcttgttggaaagctccactggccacagcaaccgcttcgcatccttcttgaccacctggcttgctattagtaacagtttctgcaactgtgtaatttatagtctctccaacagtgtattccaaagaggactaaagcgcctctcaggggctatgtgtacttcttgtgcaagtcagactacagccaacgacccttacacagttagaagcaaaggccctcttaatggatgtcatatctga

SEQ ID NO: 286804 - DNA, 1000 bp, Homo Sapiens; identical to SEQ ID NO: 116387

SEQ ID NO: 286805 - DNA, 1000 bp, Homo Sapiens
cctgatcatccggtctcacagcactggaaggagtacaacctgcatgacctccctcaagagtaccaacccctccgtggccacctttagcctcatcaatggaaacatctgtcacgagcggtatgtctagattgacccttgattttgccccctgagggacggttttgctttatggctagacaggaacccttgcatccattgttgtgtctgtgccctccaaagagccttcagaatgctcctgagtggtgtaggtgggggtggggaggcccaaatgatggatcaccattatattttgaaagaagccatcaagtcttaagtttttcatttcaacttgtgaacgtttcttctgatgtgaagcaaaccttcccttttcagaaaagggaacaagtagaaaattattttttaagcctcaagccctgttaaatggtcgtggccaattatgtcatagaaactgtatgaacaaccagatttacatagcagagaaatcatacattgaatgcttactttgtgaaagacttcaccttgtcatttctttaagcagacgctagtactttagaaatataacttgactctgttttcaggaatatctgtaatacacaaaccaaggaacaacttttatttacactcctaatatgaaaagtcaatcctgtgagagagctccatgtatgagggacactctccaagttgataacaatggaagcgagtttaatataaaacaattccctaagcatttattttttttttaaaaagatgttactgaggacctagaagaaatgctcaatacatactttgaaagcaaaaatacaatcaaacacattgacacgtatataaagatccacgcgtggctgtgcgtgatatctcacactctgaattcttacttgatggaggttttgtttgctgctacggttttaatcatccagggtgccattccaccatagaagagcaatccttttaggaaaaaaaaaatcatgctattaattaatcaaatatctataaatgcata

SEQ ID NO: 286806 - DNA, 1000 bp, Homo Sapiens; identical to SEQ ID NO: 116389

SEQ ID NO: 286807 - DNA, 947 bp, Homo Sapiens
ggctcggggccggggccagcacccacactgggtctccacagcggcatggaggcctgcgtgtcttcactgctggtgctggccctgggggccctgtcagtaggcagctcctttgggacccagatcatcgggggccgggaggtgatcccccactcgcgcccgtacatggcctcactgcagagaaatggctcccacctgtgcgggggtgtcctggtgcacccaaagtgggtgctgacggctgcccactgcctggcccagcggatggcccagctgaggctggtgctggggctccacaccctggacagccccggtctcaccttccacatcaaggcagccatccagcaccctcgctacaagcccgtccctgccctggagaacgacctcgcgctgcttcagctggacgggaaagtgaagcccagccggaccatccggccgttggccctgcccagtaagcgccaggtggtggcagcagggactcggtgcagcatggccggctgggggctgacccaccagggcgggcgcctgtcccgggtgctgcgggagctggacctccaagtgctggacacccgcatgtgtaacaacagccgcttctggaacggcagcctctcccccagcatggtctgcctggcggccgactccaaggaccaggctccctgcaagggtgactcgggcgggcccctggtgtgtggcaaaggccgggtgttggccggagtcctgtccttcagctccagggtctgcactgacatcttcaagcctcccgtggccaccgctgtggcgccttacgtgtcctggatcaggaaggtcaccggccgatcggcctgatgccctggggtgatggggaccccctcgctgtctccacaggacccttcccctccaggggtgcagtggggtgggtgaggacgggtgggagggacagggagggaccaataaatcataatgaagaaacgctc

SEQ ID NO: 286808 - DNA, 785 bp, Homo Sapiens; identical to SEQ ID NO: 29597

SEQ ID NO: 286809 - DNA, 790 bp, Homo Sapiens
aacctgctctttagatttcgagcttattctcttctagcagtttcttgccaccatgtcggaaaccgctcctgccgagacagccaccccagcgccggtggagaaatccccggctaagaagaaggcaactaagaaggctgccggcgccggcgctgctaagcgcaaagcgacggggcccccagtctcagagctgatcaccaaggctgtggctgcttctaaggagcgcaatggcctttctttggcagcccttaagaaggccttagcggccggtggctacgacgtggagaagaataacagccgcattaagctgggcctcaagagcttggtgagcaagggcaccctggtgcagaccaagggcactggtgcttctggctcctttaaactcaacaagaaggcggcctccggggaagccaagcccaaagccaagaaggcaggcgccgctaaagctaagaagcccgcgggggccacgcctaagaaggccaagaaggctgcaggggcgaaaaaggcagtgaagaagactccgaagaaggcgaagaagcccgcggcggctggcgtcaaaaaggtggcgaagagccctaagaaggccaaggccgctgccaaaccgaaaaaggcaaccaagagtcctgccaagcccaaggcagttaagccgaaggcggcaaagcccaaagccgctaagcccaaagcagcaaaacctaaagctgcaaaggccaagaaggcggctgccaaaaagaagtaggaagctggcgtgtgaaaaccgcaacaaagccccaaaggctcttttcagagccaccca

SEQ ID NO: 286810 - DNA, 1000 bp, Homo Sapiens
tgaaggtagaggtgctgcctgccctgaccgacaactacatgtacctggtcattgatgatgagaccaaggaggctgccattgtggatccggtgcagccccagaaggtcgtggacgcggcgagaaagcacggggtgaaactgaccacagtgctcaccacccaccaccactgggaccatgctggcgggaatgagaaactggtcaagctggagtcgggactgaaggtgtacgggggtgacgaccgtatcggggccctgactcacaagatcactcacctgtccacactgcaggtggggtctctgaacgtcaagtgcctggcgaccccgtgccacacttcaggacacatttgttacttcgtgagcaagcccggaggctcggagccccctgccgtgttcacaggtgacaccttgtttgtggctggctgcgggaagttctatgaagggactgcggatgagatgtgtaaagctctgctggaggtcttgggccggctccccccggacacaagagtctactgtggccacgagtacaccatcaacaacctcaagtttgcacgccacgtggagcccggcaatgccgccatccgggagaagctggcctgggccaaggagaagtacagcatcggggagcccacagtgccatccaccctggcagaggagtttacctacaaccccttcatgagagtgagggagaagacggtgcagcagcacgcaggtgagacggacccggtgaccaccatgcgggccgtgcgcagggagaaggaccagttcaagatgccccgggactgaggccgccctgcaccttcagcggatttggggattaggctcttttaggtaactggctttcctgctggtccgtgcgggaaattcagtcttgatttaaccttaattttacagcccttggcttgtgttatcggacattctaatgcatatttataagagaagtttaacaagtatttattcccataaaaaaaaaaaaaaaaaaaaaaaaaaaaaaaaaaaaaaaa

SEQ ID NO: 286811 - DNA, 1000 bp, Homo Sapiens; identical to SEQ ID NO: 116392

SEQ ID NO: 286812 - DNA, 1000 bp, Homo Sapiens
gtggtgtgattttcaccatttataaggagtctaaaaggccattttcagaatccaaacagacagttctaattgttggaacgttgctctatgcatgctattgggtcatgcttttgacgctgtatgtagttctcatcaataagtgtggcaggcggaagaagggacaacaatatgacatggtgcttgatgtatgatcttccatgttttgacgtttgcagtcacacacaacaccttagttcctctaggggctgtacagtattgtggcatcagataatgccaccaaaggagacatatcactgctgctgggacttgaacaaagacatttatatgggtttattttcattctgccaaagtaaaacaatacatcaacaagaagaaactcagatttaacctgttatttctatgaaaatgggatgaattctttgtttatgcactttttccttactgtgcatccgcctgaaagtgttttggcctatatacctcactagccatgctttatgtgggttatcatggaagaaaaggattttggaaactcaaggaaaagttctttcaacctatacaacctaacttatggactgtttgatagatgataattttttttttttaggaaggattttctttttaactttaccaaatgaaatgccaaaggaagttttaaaggccgtggctgtgctgtatttgatataattgtactgtgtttttaaattgtgtatgccaatcttaaagacaaattttgcatattctctattttacttttctgccaaaataaacctgttcttccttttttaaaataaaataagttcttaaaaaatttatacttaaaaaatcctgcccaaaatgtgaagcttggttgactgatgttcatgatagaaagaataaaatgtttctctctctctaccttttaaaattgaatagtttatttctgtgaaagaagtatttaaactttcaatattttaactttttgtttttatttcttttagaaaaggccaatatacctatcgcg

SEQ ID NO: 286813 - DNA, 1000 bp, Homo Sapiens
gcctcctgaggctgtttttggctgttttccctctgctgcttttggggaatgaggggaagccattttccagtgacttgcaatccaggctgttctcagcgttttgagtttaaaacctgggatcctgactaagcctttgacttaagggttgcttgcttgccctccaaatgtcctttctcagaggggccagctaacccgtgcagaaccagcactaaggtggacagcagacaagagggcaagcctctagtgtaccaagtgcttcctacaaagacgcaaggtgtgctctgagccacagatgggcaaaccctggtgctttccttcatctcccacgaactcaagggttttccaggtgtagctaacagttgccacatcacacagacctcgagtttctggtaagactgctggttgacatcagacccaacccatgaaggctggaaggcagcaggcatttgctaaggcagctgatccaggcaatcgttctgctggccaagaagttaaactattttgagcattagaatggaggaaatccggtcagccaagtgcagagttcagacttcgctaagggcttgtttttcttcagcatttacttgaagattaatgtaggatgacaggctctcctggctgtcctaccatcagctctgccttgcactgtggtcgtcaactttcctcaaatcaaaaacaggcaggtacaggtagtgggctcacaacgtttgacctcgactggtttttctaagttattttgtacatttttcagcagcaaaaccaaactgggtcttcagctttatccccgtttcttgcaagggaagagcctttatacaattggacgcattttggtttttcctcattgagaattcaaatcctcttttgtattgtttctacaataatttgtaaacatatttatttttacctgcttttttttttttttttaattttcaggtcaagttttttatactgcacttatttgtcaaaataaagattctcacatatgccggttatctcgaaa

SEQ ID NO: 286814 - DNA, 1000 bp, Homo Sapiens; identical to SEQ ID NO: 116393

SEQ ID NO: 286815 - DNA, 1000 bp, Homo Sapiens
agctgtgtacagaatgtgtaatcttttttcttttctcttttttttgttttgttttgttttgtttttgtttttttacttttttcttcttggctaattcttggcagggatctttctggaggaaaagctggggccagccagggcaggagaggtgtgaaatctgccacgaggggcctgctgtttgccacccagcccaacttcctgttgctggcccctgccctctgcccttttgcctgtcctcaggccgctggaacaaaggaaggacagctcattcctcatgggcgatcactccgcatctatagggtcgagcctaggggagcttgagggagggctggggcctccttgtcctggatttccagctctccccatgccccctccctgagcaccaccggcaccgcctcccaaacagggctgctggtttccgcagccactgctccacctcccccaaatcgtcatggaaagggtggagaatggaggggaaccaggcgtccttggaggcagcttgggagggtgactgtgtagtgtcacccacaagggaggctagggcaatggagcaggccaccagcagcagctgtgcagcatggaactcaggccaggctccgaggctgggggatctgcttggagttttctgccccccaccccaaacttctgtcgaggagcaaggcttgccagcaagtcagaaggatttgaaccgagcagccaatctttccagccctcccctaccgacctctgcctggagacgcagcagcctgtgtcctccagggcctctggtttgttgtattatagtatatttcgctgtggaaaatgtcacgtttagtcaccttggagcccactcacctggtcctgttgttttaccccatcccttctctcgcgcgcctattgatttgtttctgaggagagtacaccgttcactattgtagagtaacccctgtgactcaatattaccatagtgcgatgtcgttttgtgctattttgaacaattaaaagactttttttgaaataa

SEQ ID NO: 286816 - DNA, 1000 bp, Homo Sapiens; identical to SEQ ID NO: 221665

SEQ ID NO: 286817 - DNA, 1000 bp, Homo Sapiens
atgggtcccattgagtgcttgaaggagtttgtcactccagacacagacatcaaggtgaccttgagtatctttgagctggcatctgctgcaggtgtgggctgtgacattgacccagccttggtggctgccattgctaatctgaaagctgatacttcatctcctgaggaggaatataaggtggcctgcctgctcttgatctttctggcagtttccctcccactccttgccactgacccttcttccttttatagcattgagaaggatggttacaacaacaatattcattgcttgaccaaagccatcatccaggtgtctgctgccctcttcacgctctacaacaagaacattgaaactcacctcaaggaatttctggtggtggcctctgtcagcctcttgcagctgggccaggagactgacaagcttaaaaccagaaatcgagaatccatttctctgctcatgcgcttggtggtggaggagtcatccttcctgaccctggacatgctggagtcctgtttcccttatgtcctgcttcgaaatgcctatcgggaggtgtctcgggccttccacctaaactgaatgcctgccagtacccactgaagagccctttggaccttcctaaacccttgccatagtggaagctgtggtcactttcgcagggggtgggaatggggtggggtcactaaggagagagggtcaggagccagagttgatgagcagatctgtggaagaacaatccagggctgagaaatcgtagagcagtgaggcaggctgggagcatggaggacagcttatggaaaaagttagggcgtggggccacatgtgtgaattttacaatgaaaaaaggagtaacgtacaagtatattttctatcttctggtgacttgagcttgagctctgacaggcatgggcctctccgaccttcatcactattcttaggataatgctggcgggcagagatgatcaatcatcatattaaatcataatgagcttataatcctccc

SEQ ID NO: 286818 - DNA, 1000 bp, Homo Sapiens; identical to SEQ ID NO: 221666

SEQ ID NO: 286819 - DNA, 1000 bp, Homo Sapiens
ttcagaattgaagatggtgacctattcagagcctttttgtccttgtcaacagactgggacagtgtctgattcccccttcaccccccccacccccgccttgccacacacagctaatattctaatggtaaatttctctgtatcaggtggggaaatgtgctgaaggacagtatgtatcccttgcttcatttttaggtcgtaggtttggaatgtcttgtcccagttcttcaaacactcttaaatttttcttaagtaatgtaaaaatggaactgccaattttatttctcttgcaaaaatagtaaatacttgatgttacattattcccaggtttaatgaaagaacccaacttagtttttcagtgaatttgacacctattttttagtgatgaaatttttctttgagaactggcaaggatgcagtcagctgtttgcagtttttagcctgattttggggtctatagagattgctttattggatacttcaagtcattcttgcttgcacttcccctattgacacatgaaagctgtgttggtgttttattgtacatacttcagatgcacataggaatagaagtgtgttataaatctagctttctttatgatgtttctgataatacgagaattgaaaactttaccttctcttgtacatagtcagactatttgtattaaatttacatttcattctaagttcaaaagtttgaaaattattagttttgcaagatcacacactaatgtaaccattttatgaaggttgaagtggatttatgcaggcagttctatatatagaaatacaattctttttaaatttttaggaccaatacaaaataacaaaaatgtaatggaatcagactgaattaaagtaaggctgtatattgaaagtcatattataaaaggtttgctttctttaagtgttatttatcttaaattataatcgttaaatgtttggaagataatttttgaatcataacgtcagcataacttcatttgacttctcaataatcttg

SEQ ID NO: 286820 - DNA, 1000 bp, Homo Sapiens; identical to SEQ ID NO: 116394

SEQ ID NO: 286821 - DNA, 1000 bp, Homo Sapiens
tggctcccctgtcgctggggctggagacggccggaggcgtgatgactgccctgatcaagcgcaactccaccatccccaccaagcagacgcagatcttcaccacctactccgacaaccaacccggggtgctgatccaggtgtacgagggcgagagggccatgacgaaagacaacaatctgttggggcgcttcgagctgagcggcatccctccggcccccaggggcgtgccccagatcgaggtgaccttcgacatcgatgccaacggcatcctgaacgtcacggccacggacaagagcaccggcaaggccaacaagatcaccatcaccaacgacaagggccgcctgagcaaggaggagatcgagcgcatggtgcaggaggcggagaagtacaaagcggaggacgaggtgcagcgcgagagggtgtcagccaagaacgccctggagtcctacgccttcaacatgaagagcgccgtggaggatgaggggctcaagggcaagatcagcgaggccgacaagaagaaggtgctggacaagtgtcaagaggtcatctcgtggctggacgccaacaccttggccgagaaggacgagtttgagcacaagaggaaggagctggagcaggtgtgtaaccccatcatcagcggactgtaccagggtgccggtggtcccgggcctgggggcttcggggctcagggtcccaagggagggtctgggtcaggccccaccattgaggaggtagattaggggcctttccaagattgctgtttttgttttggagcttcaagactttgcatttcctagtatttctgtttgtcagttctcaatttcctgtgtttgcaatgttgaaattttttggtgaagtactgaacttgctttttttccggtttctacatgcagagatgaatttatactgccatcttacgactatttcttctttttaatacacttaactcaggccattttttaagttggttacttcaaagtaaataaactttaaaattcaa

SEQ ID NO: 286822 - DNA, 1000 bp, Homo Sapiens; identical to SEQ ID NO: 221668

SEQ ID NO: 286823 - DNA, 1000 bp, Homo Sapiens
ccctaagagacaactcaacaatgggttacatggcagcaaagaaacacctggagataaaccctgaccattccattattgagaccttaaggcaaaaggcagaggctgataagaacgacaagtctgtgaaggatctggtcatcttgctttatgaaactgcgctcctgtcttctggcttcagtctggaagatccccagacacatgctaacaggatctacaggatgatcaaacttggtctgggtattgatgaagatgaccctactgctgatgataccagtgctgctgtaactgaagaaatgccaccccttgaaggagatgacgacacatcacgcatggaagaagtagactaatctctggctgagggatgacttacctgttcagtactctacaattcctctgataatatattttcaaggatgtttttctttatttttgttaatattaaaaagtctgtatggcatgacaactactttaaggggaagataagatttctgtctactaagtgatgctgtgataccttaggcactaaagcagagctagtaatgctttttgagtttcatgttggttctttcacagatggggtaacgtgcactgtaagacgtatgtaacatgatgttaactttgtgtggtctaaagtgtttagctgtcaagccggatgcctaagtagaccaaatcttgttattgaagtgttctgagctgtatcttgatgtttagaaaagtattcgttacatcttgtaggatctactttttgaacttttcattccctgtagttgacaattctgcatgtactagtcctctagaaataggttaaactgaagcaacttgatggaaggatctctccacagggcttgttttccaaagaaaagtattgtttggaggagcaaagttaaaagcctacctaagcatatcgtaaagctgttcaaatactcgagcccagtcttgtggatggaaatgtagtgctcgagtcacattctgcttaaagttgtaacaaatacagatgagt

SEQ ID NO: 286824 - DNA, 1000 bp, Homo Sapiens; identical to SEQ ID NO: 116395

SEQ ID NO: 286825 - DNA, 1000 bp, Homo Sapiens
ctcaagaccccttcaggcatcaagttgaccatcaacaaactcctggacatggcagcccaaattgcagaaggcatggcattcattgaagagcggaattatattcatcgtgaccttcgggctgccaacattctggtgtctgacaccctgagctgcaagattgcagactttggcctagcacgcctcattgaggacaacgagtacacagccagggagggggccaagtttcccattaagtggacagcgccagaagccattaactacgggacattcaccatcaagtcagatgtgtggtcttttgggatcctgctgacggaaattgtcacccacggccgcatcccttacccagggatgaccaacccggaggtgattcagaacctggagcgaggctaccgcatggtgcgccctgacaactgtccagaggagctgtaccaactcatgaggctgtgctggaaggagcgcccagaggaccggcccacctttgactacctgcgcagtgtgctggaggacttcttcacggccacagagggccagtaccagcctcagccttgagaggaggccttgagaggccctggggttctccccctttctctccagcctgacttggggagatggagttcttgtgccatagtcacatggcctatgcacatatggactctgcacatgaatcccacccacatgtgacacatatgcaccttgtgtctgtacacgtgtcctgtagttgcgtggactctgcacatgtcttgtgcatgtgtagcctgtgcatgtatgtcttggacactgtacaaggtacccctttctggctctcccatttcctgagaccaccagagagaggggagaagcctgggattgacagaagcttctgcccacctacttttctttcctcagatcatccagaagttcctcaagggccaggactttatctaatacctctgtgtgctcctccttggtgcctggcctggcacacatcaggagttcaataaatgtctgttgatgactgccg

SEQ ID NO: 286826 - DNA, 1000 bp, Homo Sapiens
gagcccatagcagagccgatgcgccgcagtgtgtctgaagcagcactggcccagccccagggcccactgggcacggattccctcaagaacctgaccctgagggacttgagcctgaggggaaactccgagacgtcgtcggacacccccgagatgtcgctgtcagctgagacacttagcccctccacaccctccgatgtcaacttcttattaccacctgaggatgcaggggaagaggctgaggccaaaaatgagctgagccccatggacagaggcctgggcgtccgtgccgccttccccgagggtttccacccccgacgctccagccagggtgccacacagatgcccctctactcctcacccatagtcaagaaccccttcatgtcgccgctgctggcacccgacagcatgctcaagagcctgccacctgtgcacatcgtggcgtgcgcgctggaccccatgctggacgactcggtcatgctcgcgcggcgactgcgcaacctgggccagccggtgacgctgcgcgtggtggaggacctgccgcacggcttcctgaccctagcggcgctgtgccgcgagacgcgccaggccgcagagctgtgcgtggagcgcatccgcctcgtcctcactcctcccgccggagccgggccgagcggggagacgggggctgcgggggtagacgggggctgcggggggcgacactaaaagcctgttgttcccatctgcgccggcctccgtcatgaatgccttccgggccgggcggaaggggacgcgggctgtgccttacttaagtcgggggtggcaagggggcggggcgggggcccgaaagctgagaccctcgccacggggagggggacgcgcacacacaccggtcaccgagacggctggacctgcacgccaccgctgccttttgctgctgctgctgcggcgaccgccgcagggacggggactggccctcccttgcaggtcggtttggtttgttgtaaataaaagtatttaatta

SEQ ID NO: 286827 - DNA, 1000 bp, Homo Sapiens; identical to SEQ ID NO: 116396

SEQ ID NO: 286828 - DNA, 1000 bp, Homo Sapiens; identical to SEQ ID NO: 116397

SEQ ID NO: 286829 - DNA, 1000 bp, Homo Sapiens
ttagggaagcctctgtatgcatgcaactgctctttggcattgatgtgaaggaagtggaccccactagccactcctatgtccttgtcacctccctcaacctctcttatgatggcatacagtgtaatgagcagagcatgcccaagtctggcctcctgataatagtcctgggtgtaatcttcatggaggggaactgcatccctgaagaggttatgtgggaagtcctgagcattatgggggtgtatgctggaagggagcacttcctctttggggagcccaagaggctccttacccaaaattgggtgcaggaaaagtacctggtgtaccggcaggtgcccggcactgatcctgcatgctatgagttcctgtggggtccaagggcccacgctgagaccagcaagatgaaagttcttgagtacatagccaatgccaatgggagggatcccacttcttacccatccctgtatgaagatgctttgagagaggagggagagggagtctgagcatgagatgcaaccagggccagcgggcagggaaatgggccaatgcatgcttcagggccacacccagcagtttccctgtcctgtgtgaaatcaggcccattcttccctctgtgtttgatgagagaagtcagtgttctcagtagtagaaggcacagtgaatggaagggaacacattgtatactgcctttaggtttctcttccatcgggtgacttggagatttctttttgtttccctttggtaattttcaaatattgttcctgtaataaaagttttagttagcttcaacatctaagtgtatggatgatactgaccacacatgttgttttgcttatccatttcaagtgcaagtgtttgccattttgtaaaacattttgggaaatcttccatcttgctgtgatttgcaataggtattttcttggagaatgtaagaacttaacaataaagctgaactggtgttgtgaaacagagaaataaaaggagaaggtcattaaaaaaaaaa

SEQ ID NO: 286830 - DNA, 1000 bp, Homo Sapiens
ttgtacatccttgtcacctgcctgggcctctcctacgatggcctgctgggcgacaatcagatcgtgcccaagacaggcctcctgataatcgtcctggccataatcgcaaaagagggcgactgtgcccctgaggagaaaatctgggaggagctgagtgtgttggaggcatctgatgggagggaggacagtgtctttgcgcatcccaggaagctgctcacccaagatttggtgcaggaaaactacctggagtaccggcaggtccccggcagtgatcctgcatgctacgagttcctgtggggtccaagggccctcgttgaaaccagctatgtgaaagtcctgcaccatttgctaaagatcagtggaggacctcacatttcctacccacccctgcatgaatgggcttttagagagggggaagagtgagtctgagcacgagttgcagccagggccagtgggagggggtctgggccagtgcaccttccaaggccccatccattagtttccactgcctcgtgtgacatgaggcccattcttcactctttgaagagagcagtcagtattgttagtagtgagtttctgttctattggatgactttgagatttatctttgtttcctgttggaattgttcaaatgttccttttaacggatggttgaatgaacttcagcatccaagtttatgaatgacagtagtcacacatagtgctgtttatatagtttaggagtaagagtgttgttttttattcagattgggaaatccattccattttgtgaattgtgacaaataacagcagtggaaaaagtatgtgcttagaattgtgaaagaattagcagtaaaatacatgagataaagacctcaagaagttaaaagatacttaattcttgccttatacctcactctattctgtaaatttgaaaaaaaagcatggatacctggatatccttggcttctttgagaatttaagagaaattaaatctgaataaataaaaaaaaaaaaaaaa

SEQ ID NO: 286831 - DNA, 1000 bp, Homo Sapiens
acagaacgggataagtttcagatttctcttcagcagaatgatgaaaagcaacagggagcttttataagtactgaggaaactgaattggaacacaccagcactgtggtggaggtctgtgaggcaattgcgtcagttcaggcagaagcaaatacagtttggactgaggcatcacaatctgcagaaatctctgaagaacctgcggaatggtcaagcaactatttctaccctacttatgatgaaaatgaagaagaaaataggcccctcatgagacctgtgtcggagatggctctcctatattgatgaagctactatgtcaaatggcaagtagctctttcctgcctgcttctcagctcatttggaaaaatactgcgcaaaagacattgagctcaaatgatgcagatgttgttttcaggttaatggacacgcaaagaaaccacagcacatacttcttttctttcatttaataaagcttttaattatggtacgctgtctttttaaaatcatgtatttaatgtgtcagatattgtgcttgaaagattctcatctcagaatacttttggacttgaaaattatttcttctctactttgtaaccaaatgcaatcggtgtgccttggattatttagtttattaatgaattaagtcaaaattacggctgcaaaatggctaaggtcaagtaaagcacaacattatgatttaatatgcttttgttgaaaccacagcttttgtgcccattgttttaacttgtgtgaaacaatacaaagcccagaaattcttttcggggcatgagtaaattttgttcagggctactgtctgtatgtgcccagataaaattttcatgagagtagtttacaaaagccgtatttaaaagttaatattttcacactttttttctggatttctgcttataattaatgtaacttaaattagttgtgctctgctattttctgtatatttcatgttgtaattctttttttcaaataaaaattaattcttcaggtt

SEQ ID NO: 286832 - DNA, 1000 bp, Homo Sapiens
ttttttttttttttttagacggagccttgcctgttgccagactggagtgcagtggcacgatctcggctcactgcaacctctgcctcccgggttcaagccattctgcctcagcctcccaagtagctgggagtacagcgtctgccaccatgcctaatttttttctatttttaggagagaccggttttcaccacgttggccaggatggtctcgatatctgatctcgtgatccgcctgcctctgcctcccaaagtgctgggattacaggtgtgacccactgcgcacagccccagctaattttcatatttttagtagagacagggttttgccatgttgcccaggctggtcttgaactcctaacctcgggtgatccacccaccttggcctcccaaagtgttaggattacaggcatgagccactgcgcccggctgagtgtactagtagttaagagaataaactagatctagaatcagagctggattcaattcctgtccttcacatttactagctgtgcaaccttgggcacataacttaatgtctttgagccttagttttttcatctgtaaaacagggataataacagcaccccatagagttgtgacgaggattgagataatctaagtaaagcacagtccctaggacatagtaaatgattcatatatccgaactactgttataattattccttcttactctcctcttctagcatttcttccaattattacagtccttcaagattccatttcttaacagtctccaatcccatctattctctgcctttactatatgttgaccattccaaagttcttatctctagctcagacatctactacagcactgtgatgctttatgcaactaactgtttacatatctgtcccctgctactagattgtgagctccttgagggaaaggaacatgatttatttgtccttttcccccagcacctagagtagtgcttggtgcatgatagtaggccttcaataaattttttctaaatgaatga

SEQ ID NO: 286833 - DNA, 1000 bp, Homo Sapiens; identical to SEQ ID NO: 221672

SEQ ID NO: 286834 - DNA, 1000 bp, Homo Sapiens
ttaggtaatgaattgtagccagttgttaatatcttaatgcagatttttttaaaaaaaacataaaatgatttatctgtattttaaaggatccaacagatcagtattttttcctgtgatgggttttttgaaatttgacacattaaaaggtactccagtatttcacttttctcgatcactaaacatatgcatatatttttaaaaatcagtaaaagcattactctaagtgtagacttaataccatgtgacatttaatccagattgtaaatgctcatttatggttaatgacattgaaggtacatttattgtaccaaaccattttatgagttttctgttagcttgctttaaaaattattactgtaagaaatagttttataaaaaattatatttttattcagtaatttaattttgtaaatgccaaatgaaaaacgttttttgctgctatggtcttagcctgtagacatgctgctagtatcagaggggcagtagagcttggacagaaagaaaagaaacttggtgttaggtaattgactatgcactagtatttcagactttttaattttatatatatatacattttttttccttctgcaatacatttgaaaacttgtttgggagactctgcattttttattgtggtttttttgttattgttggtttatacaagcatgcgttgcacttcttttttgggagatgtgtgttgttgatgttctatgttttgttttgagtgtagcctgactgttttataatttgggagttctgcatttgatccgcatcccctgtggtttctaagtgtatggtctcagaactgttgcatggatcctgtgtttgcaactggggagacagaaactgtggttgatagccagtcactgccttaagaacatttgatgcaagatggccagcactgaacttttgagatatgacggtgtacttactgccttgtagcaaaataaagatgtgcccttattttacctaaaaaaaaaaaaaaaaaaaaaaaaaaaaa

SEQ ID NO: 286835 - DNA, 1000 bp, Homo Sapiens
ccagcttttgctggaaaaggaaaaattgcaggcaagacagcagcagttgctaaagaaaattgaacacgctcggacttgctagacgcttctcaaaactggacagtcactgccactttgcacattttgattttttttttaaacaaacattgtgttgacattaagaatgttggtttactttcaaatcggtcccctgtcgagttcggctctgggtgggcagtaggaccaccagtgtggggttctgctgggaccttggagagcctgcatcccaggatgctgggtggccctgcagcctcctccacctcacctccatgacagcgctaaacgttggtgacggttgggagcctctggggctgttgaagtcaccttgtgtgttccaagtttccaaacaacagaaagtcattccttctttttaaaatggtgcttaagttccagcagatgccacataaggggtttgccatttgatacccctggggaacatttctgtaaataccattgacacatccgccttttgtatacatcctgggtaatgagaggtggcttttgcggccagtattagactggaagttcatacctaagtactgtaataatacctcaatgtttgaggagcatgttttgtatacaaatatattgttaatctctgttatgtactgtactaattcttacactgcctgtatactttagtatgacgctgatacataactaaatttgatacttatattttcgtatgaaaatgagttgtgaaagttttgagtagatattactttatcactttttgaactaagaaacttttgtaaagaaatttactatatatatatgcctttttcctagcctgtttcttcctgttaatgtatttgttcatgtttggtgcatagaactgggtaaatgcaaagttctgtgtttaatttcttcaaaatgtatatatttagtgctgcatcttatagcactttgaaatacctcatgtttatgaaaataaatagcttaaaattaaatgaaaaaaaaa

SEQ ID NO: 286836 - DNA, 1000 bp, Homo Sapiens
gggggtgcagatggtactgctgaggtcccgggcttagtgtgagcatcttgccagcctcaggcttgagggagggctgggctagaaagaccactggcagaaacaggaggctccggcccacaggtttccccaaggcctctcaccccacttcccatctccagggaagcgtcgccccagtggcactgaagtggccctccctcagcggaggggtttgggagtcaggcctgggcaggaccctgctgactcgtggcgcgggagctgggagccaggctctccgggcctttctctggcttccttggcttgcctggtgggggaaggggaggaggggaagaaggaaagggaagagtcttccaaggccagaaggagggggacaaccccccaagaccatccctgaagacgagcatccccctcctctccctgttagaaatgttagtgccccgcactgtgccccaagttctaggccccccagaaagctgccagagccggccgccttctcccctctcccagggatgctctttgtaaatatcggatgggtgtgggagtgaggggttacctccctcgccccaaggttccagaggccctaggcgggatgggctcgctgaacctcgaggaactccaggacgaggaggacatgggacttgcgtggacagtcagggttcacttgggctctctctagctccccaattctgcctgcctcctccctcccagctgcactttaaccctagaaggtggggacctggggggagggacagggcaggcgggcccatgaagaaagcccctcgttgcccagcactgtctgcgtctgctcttctgtgcccagggtggctgccagcccactgcctcctgcctggggtggcctggccctcctggctgttgcgacgcgggcttctggagcttgtcaccattggacagtctccctgatggaccctcagtcttctcatgaataaattccttcaacgccaaaaaaaaaaaaaaaaaaaaaaaaaaaaaaaaaaaaaaaaaa

SEQ ID NO: 286837 - DNA, 1000 bp, Homo Sapiens
gtcaccatcaccaaatcggtaaaggtgcacttggagaaagagaccaaagaagaggggaagccactgcagcaggagaaagagaaggagaaagcgggaggagagggaggaagtgaggaggaagggagtgataaaggtgccaagggatccaggaaggaagacatagctgtcaatggggaggtagaaggaaaagaggaggtagagcaggagaccaaggaaaaaggcagtgggagggaagaggagaaaggcgttgtcaccaatggcctagacttgagcccagcagatgaaaagaaggggggtgataaaagtgaggagaaagtggtggtgaccaaaacggtagaaaaaatcaccagtgaggggggagatggtgctaccaaatacatcactaaatctgtaaccgtcactcaaaaggttgaagagcatgaagagacctttgaggagaaactagtgtctactaaaaaggtagaaaaagtcacttcacacgccatagtaaaggaagtcacccagagtgactaagatttgagtccattgcaaaaggttaagccatatgacaatttcaaaatgcatgtgattggcagcttcaaaacagaacgggttctcccatgggggctccagacattgtattttactttgtgcaatatgaggggactgcatgcaagctcagggtgctccctcctcagtctttgggggattcaaatgcatgatattgtatgtacctgggaaatttgccgatttcctaagctgttggaagggggtcacttaaggggggatgtcttgagatgtattatgcaaagtaccaactgagccaaaaacaataaatgaaacacagaactcagccttaagaaagctatatatgaataattatgtttacctcactggtgcatttaaaatggacttttgttcatgggagaacctcgttgacatgcacagtttgcaatcttatgttgatcgatgttaaacgtcacagcagtacttgctcaataaaggtcatattggaaacata

SEQ ID NO: 286838 - DNA, 1000 bp, Homo Sapiens; identical to SEQ ID NO: 221673

SEQ ID NO: 286839 - DNA, 1000 bp, Homo Sapiens; identical to SEQ ID NO: 221674

SEQ ID NO: 286840 - DNA, 1000 bp, Homo Sapiens; identical to SEQ ID NO: 221675

SEQ ID NO: 286841 - DNA, 1000 bp, Homo Sapiens
tggcggatgtggtgaaagatgcatatgaaacagccaagatgctgtgtgaacagtattacctggtagctccagagctggaagttgaagaattcaatgccaaagcgccagacaaacctattcaggtggtttatgtgccctcacatctgtttcatatgctatttgagttgttcaagaactcaatgagagcgacagttgaactctatgaagacagaaaagagggctaccctgctgttaaaaccctcgttactttgggtaaagaagacttatccattaagatcagtgacctaggtggtggtgtcccacttcgaaaaatagatcgtctttttaactacatgtattctactgctcctaggcccagcctggagcctaccagagctgcccctttggctggatttggttatggtttgccaatttcccgtctgtatgctagatattttcaaggagatctgaaactgtattccatggaaggagtgggtactgatgctgtcatttatttgaaggctctttcaagtgagtcatttgagagacttccagtttttaataagtccgcatggcgccattacaagaccacgcctgaagccgatgattggagcaatcccagcagtgaacccagggatgcttcaaaatacaaagcaaaacagtaatataccaccttgatttccattacaaagtatctgatttgtctgaataaaggtgtcccactcactgttccaggaattcttgcagtgtagaggtattcacaacagcaagcagggatttggcctgccatcaattttatttaaaaagcaattaagtttgcagtttgtcctcataaacgttgtaggttgaaactgaaaaataagttaaaatgatcaatcaagataaaaggtgatctatccatccaatggaatattatttggccttaaaaaggaaggacatctgatatgtgctgcaacatgggtgaatcttgaagtcattatgctaagtgaaataaaccagacataaaaggacaaatacatcg

SEQ ID NO: 286842 - DNA, 1000 bp, Homo Sapiens
cgggagcgcgagccagcaagggccaaggccattccggaaatctacctcacccgtctgctgtccatgaagggcacgctgcagaagtttgtggacgacaccttccaggccattctcagcgtgaaccggcccatccccatcgccgtcaagtacctgtttgaccttctggatgagctagcagagaagcacggcatcgaggacccagggaccctgcacatctggaagaccaacagtctgctgctgcggttctgggtgaatgccttgaagaacccacagctcatctttgatgtacgggtgtcggacaatgtggacgccatccttgctgtcatcgcccagaccttcattgactcctgtaccacctcggagcataaagtgggccgggattccccagtgaacaaactgctctacgcccgggagatcccacgctacaagcagatggtggagaggtactatgcggacattcgccagagctctccggcgagctaccaggagatgaactctgctttggctgagctctccgggaactacacttctgctccccactgtctggaggctctgcaagaactctacaaccacatccacaggtactatgatcagattatcagtgccctggaggaggaccctgtgggccagaagctgcagctggcctgccgcctgcagcaggtcgccgccctggtggaaaacaaagtgactgacctgtgagctctggctcagacagcagcaagccggatccaccaacaccgcagcgccttatgaccccggaaccgagccagccactgaggggagctggcagagcctgggggcacagggtgcaaagccaggcactgtgcccagcagtgggctccctgcctgccacctcccctgccagcccacccaccttccccccacctgagattgtttctaatttataaggatccccctccttccccctctccccattgtatttatttgcctgctggaaaatcacatccggaaataaaatagaaatatgtctttttatttt

SEQ ID NO: 286843 - DNA, 1000 bp, Homo Sapiens
gaggacgtgcatgtcatcggccacagcctgggcgcgcacacggccgcggaggcgggcaggaggctggggggccgcgtgggcaggatcacagggctggatccagcagggccgtgcttccaggatgaacctgaggaggttcggttggatccatctgacgccgtgtttgtggatgtgattcacacagattcttctcccatagttccttccctaggtttcggaatgagccaaaaggtgggccatctggatttctttccaaatggaggaaaggaaatgcccggatgtaagaaaaatgtcctttcaaccattactgatattgatggaatatgggaaggaattggtggctttgtgtcttgcaatcacctaagaagcttcgagtattactcaagcagcgtcctcaaccctgatggcttcctgggctatccctgtgcctcctacgatgagtttcaggagagtaagtgtttcccttgtccagctgaaggatgccccaaaatggggcactatgctgaccaatttaaggggaaaacaagtgctgtggaacaaacctttttcctgaacacaggagagagtggtaactttactagttggagatataaggtatcagtcacactttctggaaaagagaaagtgaatgggtacatcaggattgctttgtatggaagtaatgaaaactcgaaacaatatgagattttcaaaggatccctcaaaccagatgcaagtcacacgtgtgctattgatgtggattttaatgttggaaaaatacagaaagttaaattcctctggaacaaacgtgggataaatctatctgagcccaaactgggggcttcccaaatcacagtgcaaagtggtgaagatgggactgagtataatttttgtagcagcgacactgtggaagaaaacgtcttgcaatctctttacccttgttaaaaacgtggtgcggctattgcggtaataaaatctttaatgcactcagaaaaaaaaaaaaaaaaaaaaaaaaaaaaaa

SEQ ID NO: 286844 - DNA, 1000 bp, Homo Sapiens
aggaatgtaaatgtcttactggaaatgacaagtttttgcttgatttttttttttaaacaaaaaatgaaatataacaagacaaacttatgataaagtatttgtcttgtagatcaggtgttttgttttgtttttttaattttaaaatgcaaccctgccccctccccagcaaagtcacagctccatttcagtaaaggttggagtcaatatgctctggttggcaggcaaccctgtagtcatggagaaaggtatttcaagatctagtccaatctttttctagagaaaaagataatctgaagctcacaaagatgaagtgacttcctcaaaatcacatggttcaggacagaaacaagattaaaacctggatccacagactgtgcgcctcagaaggaataatcggtaaattaagaattgctactcgaaggtgccagaatgacacaaaggacagaattcctttcccagttgttaccctagcaaggctagggagggcatgaacacaaacataagaactggtcttctacactttctctgaatcatttaggtttaagatgtaagtgaacaattctttctttctgccaagaaacaaagttttggatgagcttttatatatggaacttactccaacaggactgagggaccaaggaaacatgatgggggaggcagagagggcaagagtaaaactgtagcatagcttttgtcacggtcactagctgatccctcaggtctgctgcaaacacagcatggaggacacagatgactctttggtgttggtctttttgtctgcagtgaatgttcaacagtttgcccaggaactgggggatcatatatgtcttagtggacaggggtctgaagtacactggaatttactgagaaacttgtttgtaaaaactatagttaataattattgcattttcttacaaaaatatattttggaaaattgtatactgtcaattaaagtgtttttgtgtaaactggttcaaaaaaaaaaaaaaaaaaaaaaaaa

SEQ ID NO: 286845 - DNA, 1000 bp, Homo Sapiens; identical to SEQ ID NO: 116400

SEQ ID NO: 286846 - DNA, 1000 bp, Homo Sapiens
ttgctgtcttctaccaggggctgctgactccagttacccatggaatgcaggacctgggaggggtagccattagggtctttcaaaactctttggatctaagcatttgtctctccttaagtgccaatcacaattggatatggaaggactgtgatttctgcaatgaacccaaacttttagagtaaaaagccaaatttaaattataagaaagaagggaaaaaagagaaaaactcaagtctattacttgtagagtccaattcttagcaatggaatcgctctaggattctagtttgggctttgtctggatttgcttttctcagttgtgctttgaagtgaataagctttgttacaaattaattttttattagttccaatattagttggagttaacttgaattgattgtatgtagcacagcacttttgcagtaagattggtgtgaaatactaaacactatggattttgtaggtgtcaggttaaatggtcaagggatacctacattaagtcatatattaggtattgatgatcttacttcttttctgttcccctgtacaaaacacttacctaacccagcttgtggttttaggacagccaaagctcactgttgttggttagtcctaatcactacacgggtctcataaatgagacttgtttgaattttggtacattggagcatgttggttggtattacacggcagcatttcgaatgagtgcagctctgtgtctgtcagaaaggagagataagactactttgaagggaattaaatatgtgagtcctctttttaatggtgctttttgtaacctttaatgctgaggtacagagctgcttttcaatatttcataaaggagtggcagacaagagtggattttaaagctgttcttcaaacgtaatttgtcactggactctgacacacctggaaattatatgatatgatacatacagaaatgttgtgggttttttccataaaactttaataaaagtattatacagcaataaaaaaaaaa

SEQ ID NO: 286847 - DNA, 1000 bp, Homo Sapiens
gtgaagttgtcccctatgaggagaatcgagtagagctgataccaaccaaagaaaataacacaggatacattaatgcctcccacatcaaggtggtggttggcggggcagaatggcactacatagccacccaggggcccctgccacacacgtgccacgacttctggcagatggtgtgggagcagggagtgaatgtgattgccatggtcactgcagaggaggagggtggacgaaccaaaagccaccgatactggcccaaactaggttcaaagcacagctcagccacctatggcaagttcaaggtcaccacgaagtttcgaacggattctgtttgctatgcaaccacgggcttgaaggtcaagcaccttttgtctgggcaagaaaggacggtgtggcatttacaatatactgactggccagatcacggctgtccagaagatgtccaaggatttttatcctacttggaggagatccagtcggtccgtcgccataccaacagcatgctggaaggcaccaagaaccggcacccgcccatcgtggtccactgtagtgctggggtgggaaggaccggcgtgctcattctttctgagctgatgatctactgcttggaacataacgaaaaggtggaagtgcccatgatgctgaggctcctcagggagcagaggatgttcatgatccagactatcgctcagtacaagtttgtctaccaagtcctcatccagttcctccaaaactccagactcatttaatcaccccaatccagctcctggaggagggacccagctccatcgcgctggaggagagtcacctccagacaacatctgctccccccacaggggtgcaggtggctggcagcaaacaggctctctgaagacagtagccaagattattcacacataccatgtattattttatatgagataatttatttttttcccctttggaataacttttgtgaattattataatgcagtttccctagtaatatagtacttttcatttg

SEQ ID NO: 286848 - DNA, 1000 bp, Homo Sapiens
cagcaccagttatgtttgaatgaaccctccttttctctgagattctggtccctggaaatccctttctgctagtggtgagcatgtaagtgttaagtttttaatctgggagcagggcataggaagaaaatgtcagtagtgctaatgcattttgcactagaacgcttcgggaaaatattcatgcttgccatctgttcatttctaaatttatattcataaagttacagtttgatacaggaattattaggagtaattcttttctgtttctgtttataatgaagaacactgtagctacattttcagaagttaacatcaagccatcaaacctgggtatagtgcagaaaacgtggcacacactgaccacacattaggctgtgtcaccattgtgtggtgtacctgctggaagaattctagcatgctacttggggacataatttcagtgggaaatatgccactgaccgattttttttttttcctctttgcagtggggctaggacagttgattcaacaaagtatttttttcttttttctcagtcctaatttgaacaggtcaaagatgtgttcaggcattccaggtaacaggtgtgtatgtaaagttaaaaataggctttttaggaactcactctttagatatttacatccagcttctcatgttaaatatttgtccttaaagggtttgagatgtacatctttcatttcgtatttctcataggctatgccatgtgcggaattcaagttaccaatgtaacactggccagcgggcccagcaatctccatgtgtacttattacagtcttatttaaccaggggtcctaaccactaacattgtgactttgctttgagacctttcctctcctgggtactgaggtgctatgaagccaactgacaaagatgcatcacgtgtcttaggctgatgccactacccgatttgtttatttgcaatttgagccatttaaagaccaataaacttccttttttaaaaaaaaaaaaaaaaaaaaaaaaaa

SEQ ID NO: 286849 - DNA, 1000 bp, Homo Sapiens; identical to SEQ ID NO: 221677

SEQ ID NO: 286850 - DNA, 1000 bp, Homo Sapiens
gttttgtgactttcaacttttgtacagttatgtgaaggatgaaaggtgggtgaaaggaccaaaaacagaaatacagtcttcctgaatgaatgacaatcagaattccactgcccaaaggagtccagcaattaaatggatttctaggaaaagctaccttaagaaaggctggttaccatcggagtttacaaagtgctttcacgttcttacttgttgtattatacattcatgcatttctaggctagagaaccttctagatttgatgcttacaactattctgttgtgactatgagaacatttctgtctctagaagttatctgtctgtattgatctttatgctatattactatctgtggttacagtggagacattgacattattactggagtcaagcccttataagtcaaaagcatctatgtgtcgtaaagcattcctcaaacattttttcatgcaaatacacacttctttccccaaatatcatgtagcacatcaatatgtagggaaacattcttatgcatcatttggtttgttttataaccaattcattaaatgtaattcataaaatgtactatgaaaaaaattatacgctatgggatactggcaacagtgcacatatttcataaccaaattagcagcaccggtcttaatttgatgtttttcaacttttattcattgagatgttttgaagcaattaggatatgtgtgtttactgtactttttgttttgatccgtttgtataaatgatagcaatatcttggacacatttgaaatacaaaatgtttttgtctaccaaagaaaaatgttgaaaaataagcaaatgtatacctagcaatcacttttactttttgtaattctgtctcttagaaaaatacataatctaatcaatttctttgttcatgcctatatactgtaaaatttaggtatactcaagactagtttaaagaatcaaagtcatttttttctctaataaactaccacaacctttcttttttaaaaaaaaaaa

SEQ ID NO: 286851 - DNA, 1000 bp, Homo Sapiens
tcagcagcttatacccacagaagccagtgccagttgacgctgaaagaatcaggcaaaaaagtgagaatgaccttcaaactaaatatttaaaataggacatactccccaatttagtctagacacaatttcatttccagcatttttataaactaccaaattagtgaaccaaaaatagaaattagatttgtgcaaacatggagaaatctactgaattggcttccagattttaaattttatgtcatagaaatattgactcaaaccatattttttatgatggagcaactgaaaggtgattgcagcttttggttaatatgtctttttttttctttttccagtgttctatttgctttaatgagaatagaaacgtaaactatgacctaggggtttctgttggataattagcagtttagaatggaggaagaacaacaaagacatgctttccatttttttctttacttatctctcaaaacaatattactttgtcttttcaatcttctacttttaactaataaaataagtggattttgtattttaagatccagaaatacttaacacgtgaatattttgctaaaaaagcatatataactattttaaatatccatttatcttttgtatatctaagactcatcctgatttttactatcacacatgaataaagcctttgtatctttctttctctaatgttgtatcatactcttctaaaacttgagtggctgtcttaaaagatataaggggaaagataatattgtctgtctctatattgcttagtaagtatttccatagtcaatgatggtttaataggtaaaccaaaccctataaacctgacctcctttatggttaatactattaagcaagaatgcagtacagaattggatacagtacggatttgtccaaataaattcaataaaaaccttaaagctgaaaaaaaaaaaaaaaaaaaaaaaaaaaaaaaaaaaaaaaaaaaaaaaaaaaaaaaaaaaaaaaaaaaaaaaaaaaaaaa

SEQ ID NO: 286852 - DNA, 1000 bp, Homo Sapiens
aggctactcactggtatcaggtggtactgacaaccacctggtgctggtggacctgcggcccaagggcctggatggagctcgggctgagcgggtgctagagcttgtatccatcactgccaacaagaacacctgtcctggagaccgaagtgccatcacaccgggcggcctgcggcttggggccccagccttaacttctcgacagttccgtgaggatgacttccggagagttgtggactttatagatgaaggggtcaacattggcttagaggtgaagagcaagactgccaagctccaggatttcaaatccttcctgcttaaggactcagaaacaagtcagcgtctggccaacctcaggcaacgggtggagcagtttgccagggccttccccatgcctggttttgatgagcattgaaggcacctgggaaatgaggcccacagactcaaagttactctccttccccctacctgggccagtgaaatagaaagcctttctattttttggtgcgggagggaagacctctcacttagggcaagagccaggtatagtctcccttcccagaatttgtaactgagaagatcttttctttttcctttttttggtaacaagacttagaaggagggcccaggcactttctgtttgaacccctgtcatgatcacagtgtcagagacgcgtcctctttcttggggaagttgaggagtgcccttcagagccagtagcaggcaggggtgggtaggcaccctccttcctgtttttatctaataaaatgctaacctgccctgagtttccattactgtgggtggggttcccctgggccaaacagtgatttgtctccctcaatgtgtacaccgctccgctcccaccaccgctaccacaaggacccccggggctgcagcctcctctttctgtctctgatcagagccgacaccagacgtgattagcaggcgcagcaaattcaatttgttaaatgaaattgtattttgaaaaaaaaaaaaaaaaaa

SEQ ID NO: 286853 - DNA, 1000 bp, Homo Sapiens
gccgcccactcggcccggtggacaagtaccgcgtgcgcaagaagttcccgctgccacgcaccatctgggacggcgagcagaagacgcattgcttcaaggagcggactcggagcctgttgcgggagtggtacctacaggacccctaccccaaccccagcaagaaacgcgaactggcgcaggccaccggcctcactcccacacaagtaggcaactggtttaagaaccggcggcagcgcgaccgcgccgcggcggccaagaacaggctccagcaccaggccattggaccgagcggcatgcgctcgctggccgagcccggctgccccacgcacggctcggcagagtcgccgtccacggcggccagcccgaccaccagcgtgtccagcctgacggagcgcgcggacaccggcacctccatcctctcggtaacctccagcgactcggaatgtgatgtatgatagccaaggccgccctcctccctctccttcccctcctcccccactccttcccctccgcctcctagccctcctcctcttcctcctcttccttctcctcctccatccccagaacaaaccgaaatcaggatacccaaccatacacacatacaagtccacacacactcccaccccagccaaaaatatataaaaaacaagaaaataacaaattaaccgcaaactatcaacaacccccaaccaccatctaccactacggccaccccaaaggaccccgacgccaacagacagtcaaacgctgatgttgcgggcagaaaacataaaagaggtgacaattgtatactttctaggacaagcacggcttctcctttcggttcccatggacccggcaccccacctgcatgacgatttatttgtatctgggaaaatattctctctagttaaaaatgatttaaagagtcgactatacaaagatcaatcaccaccacgaggacaagagggcaatgagcatgaacagacagagtaagaaacaagtcgccgtctccgttccg

SEQ ID NO: 286854 - DNA, 1000 bp, Homo Sapiens; identical to SEQ ID NO: 221678

SEQ ID NO: 286855 - DNA, 984 bp, Homo Sapiens; identical to SEQ ID NO: 116401

SEQ ID NO: 286856 - DNA, 1000 bp, Homo Sapiens; identical to SEQ ID NO: 116402

SEQ ID NO: 286857 - DNA, 1000 bp, Homo Sapiens
gaagaacaatccatccacaaattacacaacactgccagacgaaattatgaaccagaaattgtcgcccttcatgagaaagggaattacaggagactggaaaaatcactttacagtagccctgaatgaaaaatttgataaacattatgagcagcaaatgaaggaatctacactgaagtttcgaactgagatctaagaaggtctttctttacttaacatatctgatattaaagatttcttttcattattctccactttttcttattttagattgctagaaaagacataatcatggattatgttgacattttctttttaaatttttgtttaactttttttttttttttttgagacagagtctcactctgttgcctaggctggaggacagtggcacaatcatggctgattgcagccttgacctccttgactcaattgatcctcccatctcagcctcccaagtagctaggactacagacatgtgcaaccatgtttggctaatttttttaatgtttttttgtagagatgaggtcttattatattgtccaggctggtcttgaattcctgggctcaagcttcccaagtagctgcaacaacaggcacacaccaccatgctcaactaattttatttctattttttgtatagacaggggcttgctatagtgtccaggctggtctgaaacccttgagctcaagtgatcttcccacaccagcctcccaaaatactgggattacaggcttgagcctccatgcctggcccaggtaacatgtttattgagctgtacatgcatatgagaaataagaaacttttttttcctactatcatctcttaaattttgttttctttttcttttgcttcctcttcttcttttctattttttataaatatcatgcacaactataacctatgggaatgatgtagtaacacagattattcatcttgttagagttgtattaaaaataaacaagcatttcaaattaaaaaaaaaaaaaaaaaaaaaaaaaa

SEQ ID NO: 286858 - DNA, 1000 bp, Homo Sapiens
cggttttgagagggagggcgtgaggatcaatgacagacagtgcaccggcatcgagggggaagattttatctcctttcagatcaacaacaccaaagggaattgtggaaacattgtgcagtccaatggcacgcatatcatgtataaaaacacactctggatcgaaagcgccaacaacactggcaacatcatcaccagggaccgcacgatcaatgtggaattttcatgtgcttatgagctggatatcaagatctccttggattctgttgtgaagcctatgctaagtgtaattaacctgacagttccaacccaagaaggcagcttcatcaccaagatggctctctacaaaaacgcctcctacaaacatccttaccgccagggtgaagtagtgttgacgactcgagatgtgctgtatgtaggggtttttgtggttggagctgacgccacacatttaatcctaacactcaacaaatgctatgccacacccacccgagatagcaatgataagctccgatatttcatcattgaaggagggtgtcagaacctcaaagataacaccattggcatcgaggagaatgcagtctccctgacctgtcgctttcacgtcaccgtctttaaattcataggggattacgacgaagttcaccttcactgtgcagtgtcactctgcgactcagaaaagtactcctgtaaaatcacttgcccacacaattccaggattgccacagattacacaaaagagcccaaagaacagatcatttcagtgggacctattaggagaaaaaggctggactggtgtgaggacaatggagggtgtgagcagatttgcacgagccgggtggatgggcctctctgcagctgtgtaacaggaaccctgcaggaggacggcaagagctgcagagcctctaattcttcaatggaacttcaagtctggacgcttcttctcatcatgatccagatttcattatggcattttgtctataaatcaggcacgacctcataa

SEQ ID NO: 286859 - DNA, 1000 bp, Homo Sapiens
gtgatgcggccaatggcatgcagtacctgagtgagaagcagttcatccacagggacctggctgcccggaatgtgctggtcggagagaacctagcctccaagattgcagacttcggcctttctcggggagaggaggtttatgtgaagaagacgatggggcgtctccctgtgcgctggatggccattgagtccctgaactacagtgtctataccaccaagagtgatgtctggtcctttggagtccttctttgggagatagtgagccttggaggtacaccctactgtggcatgacctgtgccgagctctatgaaaagctgccccagggctaccgcatggagcagcctcgaaactgtgacgatgaagtgtacgagctgatgcgtcagtgctggcgggaccgtccctatgagcgacccccctttgcccagattgcgctacagctaggccgcatgctggaagccaggaaggcctatgtgaacatgtcgctgtttgagaacttcacttacgcgggcattgatgccacagctgaggaggcctgagctgccatccagccagaacgtggctctgctggccggagcaaactctgctgtctaacctgtgaccagtctgacccttacagcctctgacttaagctgcctcaaggaatttttttaacttaagggagaaaaaaagggatctggggatggggtgggcttaggggaactgggttcccatgctttgtaggtgtctcatagctatcctgggcatccttctttctagttcagctgccccacaggtgtgtttcccatcccactgctcccccaacacaaacccccactccagctccttcgcttaagccagcactcacaccactaacatgccctgttcagctactcccactcccggcctgtcattcagaaaaaaataaatgttctaataagctccaaaaaaaaaaaaaaaaaaaaaaaaaaaaaaaaaaaaaaaaaaaaaaaaaaaaaaaaaaaaaaaaaaaaaaaaaaaaaaa

SEQ ID NO: 286860 - DNA, 1000 bp, Homo Sapiens
gttcaggagaagatgggcataatgaataaaggagtcatttatgcgctttgggattatgaacctcagaatgatgatgagctgcccatgaaagaaggagactgcatgacaatcatccacagggaagacgaagatgaaatcgaatggtggtgggcgcgccttaatgataaggagggatatgttccacgtaacttgctgggactgtacccaagaattaaaccaagacaaaggagcttggcctgaaacttccacacagaattttagtcaatgaagaattaatctctgttaagaagaagtaatacgattatttttggcaaaaatttcacaagacttattttaatgacaatgtagcttgaaagcgatgaagaatgtctctagaagagaatgaaggattgaagaattcaccattagaggacatttagcgtgatgaaataaagcatctacgtcagcaggccatactgtgttggggcaaaggtgtcccgtgtagcactcagataagtatacagcgacaatcctgttttctacaagaatcctgtctagtaaataggatcatttattgggcagttgggaaatcagctctctgtcctgttgagtgttttcagcagctgctcctaaaccagtcctcctgccagaaaggaccagtgccgtcacatcgctgtctctgattgtccccggcaccagcaggccttggggctcactgaaggctcgaaggcactgcacaccttgtatattgtcagtgaagaacgttagttggttgtcagtgaacaataactttattatatgagtttttgtagcatcttaagaattatacatatgtttgaaatattgaaactaagctacagtaccagtaattagatgtagaatcttgtttgtaggctgaattttaatctgtatttattgtcttttgtatctcagaaattagaaacttgctacagacttacccgtaatatttgtcaagatcatagctgactttaaaaacagttgtaataaactttttgatgct

SEQ ID NO: 286861 - DNA, 1000 bp, Homo Sapiens
cccgcttgctgggtacctggtccccactgctgagctggcccttggggagaggtgattctcagggctggagcctggggtgtcctacagtgactccctgggagccgcctgcttcttctctccatatggaagcccaactggggttgcgtctgaggcctgccccctgggctggggcctcagaccccctcagccttgggaccgtgcccacgagggtcttccctcctgcacacagggcagtccttactcccccaccactcaggccacagtggggctgcaggcaggcggctcctcctcacccacctctgggtccttggctcccgggggccccacctcggcacacactgtgccccacaaaacttcagtgtggtacaaggtggagaaagcatatcccaccaacctccagtgtcagggtccaggagagcctgggggtggggggactgccttgtctctagtagtgtggcctgtgccagcaccacagccggtcagaggagcgcaggcagcgcagggctggcacgtgacaggctcgtcagccacctgggaacacagttctgggcaaagaggatccgaggttgagaggaaggagggtcccggtgtatcctggccctgggggtctgggcgtccagctcagccctggcctggctgggtggtattctggtagggatatggcaggactcctggcagggccacctgcaggaccctgtcctgcagtcccacactgtgcagacccagtcccacactgtggccaggccttacatctggctggaaagcagagcctcctgggaacacatctggctgcacaggctgaaatatccacccagcaggcagagtggcgtggcctccccatgggcacagtggtgacccccttgattcccaccgtacaaccccctccaccccccactcagtgcctccacatgctgcctggcacagaccaggcctttgacaaataaatgttcaatggatgcaaaaaaaaaaaaaaaaaaaaaaaaaaaaaaaaaaaaaaaaa

SEQ ID NO: 286862 - DNA, 1000 bp, Homo Sapiens
gtttgagtgtctagcaaaggaaaaattgatgaataaaatgaaggtctggtgtatatgttttaaaatactctcatatagtcacactttaaattaagccttatattaggcccctctattttcaggatataattcttaactatcattatttacctgattttaatcatcagattcgaaattctgtgccatggcatatatgttcaaattcaaaccatttttaaaatgtgaagatggacttcatgcaagttggcagtggttctggtactaaaaattgtggttgttttttctgtttacgtaacctgcttagtattgacactctctaccaagagggtcttcctaagaagagtgctgtcattatttcctcttatcaacaacttgtgacatgagattttttaagggctttatgtgaactatgatattgtaatttttctaagcatattcaaaagggtgacaaaattacgtttatgtactaaatctaatcaggaaagtaaggcaggaaaagttgatggtattcattaggttttaactgaatggagcagttccttatataataacaattgtatagtagggataaaacactaacttaatgtgtattcattttaaattgttctgtatttttaaattgccaagaaaaacaactttgtaaatttggagatattttccaacagcttttcgtcttcagtgtcttaatgtggaagttaacccttaccaaaaaaggaagttggcaaaaacagccttctagcacacttttttaaatgaataatggtagcctaaacttaatatttttataaagtattgtaatattgttttgtggataattgaaataaaaagttctcattgaatgcacctattaatcgttttagttgctattcatattctcattcgttttttaaaaactgatatattctgaatttattcttccattgagaaaaaaatgttcagttacttgtaactactgagcagaatttaatcaatcctttattaaattcagaacattattgaa

SEQ ID NO: 286863 - DNA, 1000 bp, Homo Sapiens
ggcaagaaaaagcatagtaacttgtgctttgagagctcaatatttgtatcttatcagtacagaagaaatatttctgtgtaacttgatcttctgtctagtacttgtcttataggtaaccaacactgaaaactttgtagtgatgactaccaaagaaatacatagtaaaacaaccttttatttccaaattgttaaagagccagccattgatgctgctacatgagttccatgctcaagagccattgtaagagattaaggggtttctaggtttttggtgattttttgtttgtttttttctttgttttttagggtttttttttcttctttaattttttgattaaaacatacacacagctgttagcataaagtcgtggggggcattttctggaatgctcagcagttctgattaactgccaagcccaggttgcctctcatgaggcaactgaaaaaatcctgtgtcttgatagcatgggtgctgtgtgtgtgcatgtgtgtgtctgcattcatgccttaactcgggttactgcacaactttagttcttgacttagtctgcaccgtcatctagattgtattgtacatctcggtctgaacttcatcctggcaaaaacaaagttgcaggcacaacagtttaagaatgcattcctccagaagagtatctggtcaggttgaccctgagccttctttggacttgatttggaacttagcctggaaagcgaaagtggactgtccaacagaaagatgtcaacaaggaaaagaggagagccaagcgctagcatgccttttgcctctgcatatctgtgcacactgtatgttgttcatgatagcttgtctacaacttgactaggttggagttctggtaatagtggcaatcttgacattcttggtcagagtttagagagatgtaagactttcaattaatgtcttatttactcctttatgttgattagtctttgatacatgtgctgaatcagaaacctaaataaagataattttttaaaatgt

SEQ ID NO: 286864 - DNA, 1000 bp, Homo Sapiens
cactggacagtgttctcaagaagtggcaaggagagactcaagagttctgccccaatgccaaggttgtgctggttggctgtaaactggacatgcggactgacctggccacactgagggagctgtccaagcagaggcttatccctgttacacatgagcagggcactgtgctggccaagcaggtgggggctgtgtcctatgttgagtgctcctcccggtcctctgagcgcagcgtcagggatgtcttccatgtggctacagtggcctcccttggccgtggccataggcagctgcgccgaactgactcacgccggggaatgcagcgatccgctcagctgtcaggacggccagaccgggggaatgagggcgagatacacaaggatcgagccaaaagctgcaacctcatgtgaggggctaggagagggcagagtgtgaagaggggtggtgagggacacaattgttcccctgcctgcgcccaggcttcctgacctcctgatcctggctgggaagttagggcaggcagagcgagcaattctgggcaggggagctggagggcagaagggtatcatcgtttctcatctcctcctccctcctcttctccagtggatgttgagggagctaacagggctggcatctggggcatgaactgggatggggcaggtgggcgttagggaagctggtatcaaatggtgaccttggtggagtctcctatgtgaagagtaccctccctctccacccccagtccccatatcctggttctggcccaaggaaaatgtccattctatgaccttctcttttcctctcctctcacttctgcagctattctcacacatctaacctctaggcaacatgcactaaattcaaaagcaaggagaagcccttgccccccatcagtccaccagccctagaacctcccttgcctcaacagtcacctaataaagcccacctccatggaaaaaaaaaaaaaaaaaaaaaaaaaaaaaaaaaaaaaaaaaaaaaaaaa

SEQ ID NO: 286865 - DNA, 1000 bp, Homo Sapiens; identical to SEQ ID NO: 221683

SEQ ID NO: 286866 - DNA, 1000 bp, Homo Sapiens
cagctggactaccatggacctccagaacaagccccactgtgttctctgaagatcagctctccaaggagaaagtgaaagaggaaattggctcttcttggatagagacacccccttccatcaaatctctagattccaatgattcaggagtatacaccagtgcttgtaagcgaaggcggctgtctcctagcaactccagtaatgaaaattcaccctccataaagtgtgaggacattaatgctgaagagtatagtaaagacacctcaaaaggcatgggagggtattatgctttttacacaactccctaaagagttattttaacctcaaaaattagctaactttttgcagatggacttggtggtgttttttgttgtcttctttgcctaggttgccaaaaagatgtttgccttccaccttgatgcatcctgttttgtgcaattctctaaaagaaggtgccaaagctttttgattgctgcaggtaactgaaacaaacctagcatttttaaaaaataagattaatggaagactttaaggtattttaaaattcgaagggtatccaaggttctgtatttatttattggggagacactaacccttcaaagaagcaggctgtgaacattgggtgcccagtgctatcagatgagttaaaacctttgattctcatttctatttgtaaattcttaagcaaatagaagccgagtgttaaggtgttttgcttctgaaagagggctgtgccttccgtttcagaaggagacattttgctgttacattctgccaggggcaaaagatactaggcccaggagtcaagaaaagcttttgtgaaagtgatagtttcacctgactttgattccttaacccccggcttttggaacaagccatgtttgccctagtccaggattgcctcacttgagacttgctaggcctctgctgtgtgctggggtggccagtgggactcaggagagagcaagctaaggagtcaccaaaaaaaaaaaaaaaaaaaaaa

SEQ ID NO: 286867 - DNA, 1000 bp, Homo Sapiens; identical to SEQ ID NO: 116404

SEQ ID NO: 286868 - DNA, 1000 bp, Homo Sapiens
gcgtcaagaagagttagataggggttacaaatcaatcatggaactgatgaatgtacttgaacttcggaaatatgaagctattcagttaactttcaaacaggtatctaagaacttcagtgaagtattccagaagttagtacctggtggcaaagctactttggtgatgaagaaaggagatgtggagggcagtcagtctcaagatgaaggagaagggagtggtgagagtgagaggggttctggctcacaaagcagtgtcccatcagttgaccagtttactggagttggaattagggtgtcatttacaggaaaacaaggtgaaatgagagaaatgcaacagctttcaggtggacagaaatccttggtagcccttgctctgatttttgccattcagaaatgtgacccggctccattttacttgtttgatgaaattgaccaggctctggatgctcagcacagaaaggctgtgtcagatatgattatggaacttgctgtacatgctcagtttattacaactacttttaggcctgaactgcttgagtcagctgacaaattctatggtgtaaagttcagaaataaggttagtcatattgatgtgatcacagcagagatggccaaagactttgtagaagatgataccacacatggttaattggaaaatactacctactggtttgggagatgtatatagtaatatgattctcatacccaggaactgtaaatttaaacctaaatatttggccaatagttttcagacttaaagcatcatagtccttttatatttgtctttgtattttataagatactctgtaatgtcatgtttgtactgatagtttaagaatttaatttcctgtacaactttttgtaaaatgttctgctcctattttaaatgttttgaaacatgctaaatattctttcctaattattttatcacttatactaccttttttatagcttcaattaaataatcggttttatgactaaaaaaaaaaaaaaaaaaaaa

SEQ ID NO: 286869 - DNA, 1000 bp, Homo Sapiens; identical to SEQ ID NO: 116407

SEQ ID NO: 286870 - DNA, 1000 bp, Homo Sapiens
agatctgtttgtcgcagtgccacaccttgtagccaccagccctgcaggggaaggccagaggcagagagagaagatgctgtccagatttggcaggttctggaagaagcctgagagagaaatgcatccatccagggactcagatagtgagcccttcccacctgggacccagtccctcatccagccgatagatggaatgaaaatggagaaatctcctcttcgggaagaagccaagaaattctggcaccacttcatgttcagaaaaactccggcttctcagggggtcatcttgcccatcaaaagccatgaagtacattgggagacctgcaggacagtgcccttcagccagactataacccacgaaggctgtgaaaaagtagttgttcagaacaacctttgctttgggaaatgcgggtctgttcattttcctggagccgcgcagcactcccatacctcctgctctcactgtttgcctgccaagttcaccacgatgcacttgccactgaactgcactgaactttcctccgtgatcaaggtggtgatgctggtggaggagtgccagtgcaaggtgaagacggagcatgaagatggacacatcctacatgctggctcccaggattcctttatcccaggagtttcagcttgaagagctatcccactattacctttgaaaagcaaaaccacaacagcaaagatgctgattattcagtctgaaaatgttaagtgggtacataacattttcagggaaaggtgacttgaaacgtagttttaaattagaacgatagaggaaatgatattagtctagttattggtacacgtttgagaccttgtctcagctctgccactaactagccgtagaatgttaagttgtaaaacctttctccatctaaagattttcatctataaatgacggacccgacctagatgattgctaaaatcctttccactactaatattccgtgatgcattttctccaagtttgggtaaaagccctccatctaaa

SEQ ID NO: 286871 - DNA, 1000 bp, Homo Sapiens
ggctaaatcatacttaatgagcaaattgaagtaagcttttaaagtatatttctcttttggtgaaaggccaatggagacattgtgaatttaagtgaacatttgcctcaagatgttaactataaacacactgcatacaattttcttctgaataacaaatgaatgcttattgctgcatgatgtaagcaaaagtcattatttttcctattcatttgaaataagttatggcttaaaatgcttttggagtttatttctcaaaattaaaatctggtcacatgagctttagtttgttttctggtttaaaaaataaaaaggtttctcttaacagtatttccagtgacaatgcaaggtaagtatatcaaaggaaatcaacagttgtgcttgggggctttttgttatgggatattgatttcttgttttttttccgtaacattgtctgctgcaatttaaataaaaattacgacattttaagatatttcatagacaaaccaaacaaaaatatatgtttttactttaaagtgaatgtttttctcttcagctgatctaaaaatgaaagcaagatatcttatgtagaaatattttgataatatttttacagtgagctttcccatgtttttatgtcttaagtttctttgctgcgtttatgtaggttgcacaagaacttttactcacttgtaattgtgcctcagactttttgaaagtctaccttctaaattgccccgacgatctagattctacatgttaccattggtttattcttgtgctttctgtatttaaaactttggctgtactaagcaaatgcaaggttataatttagctaatagtagtttacagacaattctgatgattatgatttcatttggtttaactaagctgtactagttcatttcataaggaaatgatactgtagacaaatgtaaataaagcctgtgagtcaagcatcaagtggtgtttgttagaaataaactagagatttttaaactctgaaaaaaaaaaaaaaaaa

SEQ ID NO: 286872 - DNA, 1000 bp, Homo Sapiens
ggctggagggaggctcccagtgacttttctgacattcctagacaggttcattctttgctcaagaaaggcctgaatgacaatgtccaggatgtctgcacaactgagcagctcgctcactccctaaagaaacctattggcagcttcaacaggcaggcaataatctcttcccagaaccactgcagtcaggaataaactgttttctccaccaggctttgacaaaagggcccacaggaatcttaccaatgccaacatttcaaagcaccctatttcacgtagcatagctttctgctccccttccccaaagagaggttatggaggtactgtagcttttagggaaaaaaaaaatgttaacacatcacaggtcaagttgaagtcattctctgtttaggcactaaaaatcggtgttgtcactcactgtgtattaccagtatttacttgctttcttgatttcaccaaaaccaaatttaatttaaaggaccacattaatttttcaaagggaaagagacaattaattgtacataatgtatacacacacaaaaaaaaaaatacctgtagaaatattattccagcatagcaggaaaacaaacaaaagtattggactgtcggaggtgagcctgtgcgtctgtaaccctttgtgactcctgagcgtgcgctgtcttctaggttaactcacgaagtacattctctgtcttactgatactgtaggttcacccatttttttttaatttcctcgcaaataacaagacccacagaagtgactctagctacttaatggttctgttcttttatatgcagcaaacacaccgtccatttctgaagaggcttcggcctgaaggcattttccaatgatgttagtgcacaaaacgctttaaattagactggaactgccagaatcaaatgtaaatgaggaatttctcgtacccctactgcatggtatcgatttttaataaattgttgcaaatttgtttttatgaataaaaggaaaaaacctgtcgtcttt

SEQ ID NO: 286873 - DNA, 1000 bp, Homo Sapiens
tcggtcctctttttcctctctcgctttagttttcaaccttgttggtgctgagagagagaaccgagaggtcccagtacaagggcagggcagggcagggaagctgccaagctccgcaccccagaggagtgttctggactacagccttgtcttatggtcaaattgatacccttaataagaaaggaaaggaaaggaaaacagatcctcccctctgctttttattgtaaccagaatcaccctgaggtcccttctgaaccctctgggcctgcgctaattgtaggagccacagcgctcctagggtgagaggcttagccatccctgaccctggcagtgcactggtaagcagacactgcactgaaccaactgctatgctcagaatgtaccagaaacccaaacattggcaagtaattttgcaactttcaagtgcgttctttagaccaatgcattgcgtttctttccctgcttttgagatagtaggaagagttcttggtggtgtccccccccttcaattcttcagttgtatagtagttatagggaagatatgggtgtttttctttattattacttttttttttctgcaggtcagtaaaaggatttaagttgcactgacaaaaataccaaaataaaagtgtatttttaagttcccatttgaaattgctggcgctgctggccggatgcatttttgagtttgtattagttgataaattaacagtaataacaagattgtatgaaccgcatggtgcttgcagttttaaatattgtggatatttgtcctgcatcagaaacgagctttggtttttacagattcaactgtgttgaaatcaaacctgccgcaacagaaattgtttttatttcatgtaaaataagggatcaatttcaaaccctgcttatgatatgaaaatattaaaacctagtctattgtagttttattcagactggtttctgttttttggttattaaaatggtttcctattttgcttattaaaaaaaaaaaaaaaaaaaa

SEQ ID NO: 286874 - DNA, 1000 bp, Homo Sapiens
cctcctgattcttattctgagtatcatcttcataaagggcacctatgcctctgaggaggtcatctgggatgtgctgagtggaataggggtgcgtgctgggagggagcactttgcctttggggagcccagggagctcctcactaaagtttgggtgcaggaacattacctagagtaccgggaggtgcccaactcttctcctcctcgttacgaattcctgtggggtccaagagctcattcagaagtcattaagaggaaagtagtagagtttttggccatgctaaagaataccgtccctattacctttccatcctcttacaaggatgctttgaaagatgtggaagagagagcccaggccataattgacaccacagatgattcgactgccacagaaagtgcaagctccagtgtcatgtcccccagcttctcttctgagtgaagtctagggcagattcttccctctgagtttgaagggggcagtcgagtttctacgtggtggagggcctggttgaggctggagagaacacagtgctatttgcatttctgttccatatgggtagttatggggtttacctgttttacttttgggtatttttcaaatgcttttcctattaataacaggtttaaatagcttcagaatcctagtttatgcacatgagtcgcacatgtattgctgtttttctggtttaagagtaacagtttgatattttgtaaaaacaaaaacacacccaaacacaccacattgggaaaaccttctgcctcattttgtgatgtgtcacaggttaatgtggtgttactgtaggaattttcttgaaactgtgaaggaactctgcagttaaatagtggaataaagtaaaggattgttaatgtttgcatttcctcaggtcctttagtctgttgttcttgaaaactaaagatacatacctggtttgcttggcttacgtaagaaagtagaagaaagtaaactgtaataaataaaagtgtcagtgactcatttatttga

SEQ ID NO: 286875 - DNA, 1000 bp, Homo Sapiens; identical to SEQ ID NO: 116409

SEQ ID NO: 286876 - DNA, 1000 bp, Homo Sapiens
ctatcaggcaccagacttgggatcagttataaactctagagtgcttactgcagtgcatggtattcagtcagcttttgatgaagctatgtcatactgtcgatatcatccttccaaagggtattggtggcacttcaaagatcatgaagagcaagataaagtcagacctaaagccaaaaggaaagaagaaccaagctctatttttcagagacaacgtgtggatgctttacttttagacctcagacaaaaatttccacccaaatttgtgcagctaaagcctggagaaaagcctgttccagtggatcaaacaaagaaagaggcagaacctataccagaaactgtaaaacctgaggagaaggagaccacaaagaatgtacaacagacagtgagtgctaaaggcccccctgaaaaacggatgagacttcagtgagtactggacaaaagagaagcctggaagactcctcatgctagttatcatacctcagtactgtggctcttgagctttgaagtactttattgtaaccttcttatttgtatggaatgcgcttattttttgaaaggatattaggccggatgtggtggctcacgcctgtaatcccagcactttgggaggccatggcgggtggatcacttgaggtcagaagttcaagaccagcctgaccaatatggtgaaaccccgtctctactaaaaatacaaaaattagccgggcgtggtggcgggcgcccatagtcccagctactcgggaggctgagacaggagacttgcttgaacccgggaggtggaggttgccctgagctgattatcatgctgttgcactccagcttgggcgacagagcgagactttgtctcaaaaaagaagaaaagatattattcccatcatgatttcttgtgaatatttgttatatgtcttctgtaacctttcctctcccggacttgagcaacctacacactcacatgtttactggtagatatgtttaaaagcaaaataaaggtatttgtata

SEQ ID NO: 286877 - DNA, 1000 bp, Homo Sapiens; identical to SEQ ID NO: 116410

SEQ ID NO: 286878 - DNA, 1000 bp, Homo Sapiens
gcagccatcaggctgtggcccggacagcggggagtgtgattctccggctcagtgacagcttcttcctgcccctcaaagtcagtgactacagtgagacactccgcagcttcctgcaggcagcccagcaagatcttggggccctgctggagcagcacagcatcagcctggggcctctggtgactgcagtggagaagtttgaggcagaagctgcagccttgggccaacgcatatcaacactgcagaagggcagccctgaccccctgcaggtccggatgctcaatgaccagttgatgctcttggaacggacctttctgaaccctagagccttcccagaggaacgctactacagccatgtgctctgggcacctcgcacgggctccgtagtcacattcccgggcctatccaatgcctgctccagggccagggacacagcttctggatctgaagcttgggctgaggtccagagacagctcagcattgtggtgacagccctggagggtgcggcagccaccctgaggcctgtggctgacctctgaccccagccctctttcttcagccctccctttactccaaccctctcctgcctgctttcctgagatgtcctggtcttccttggtgccagaagagggcactaccacaggaccctctcaagcttctcaggcaacagcttgaggtccctgaggggagtggcaagccctaatgcaactcaccctcatcctggtgcttaggtggcagagggtgggcagcaggggacagggatgggatggcaaaaccaccaactgcccttggtggcaggtgggtggagatgggatgcgtgccaacctcagatgccaactcaggtcatcaaggccaaggaccagtggcgaaagtgagtcttggggtaccttaggccttggctagtctgcgttcctctccctgcatgctgtgtatcctaactccctacaacagcccctcaaataaatcacatctagtgactggtaccaaaaaaaaaaaaaaaaaa

SEQ ID NO: 286879 - DNA, 1000 bp, Homo Sapiens
tgtcacccaggctgtgttgcagtaagccaagatcacgccactgcactccagcctgggtgacagagcaaggctctgtctcaaaaaaaaacaaaaacaaaaacaaaaaagactgatatcgcacctaaattattattatattaaaagaagcagagtatgagagacaggtacatggtccagtaggaagagaagcagccctgattctaccacttaaggtgatgtatgatcttaggctggacacttctctccctcatccgttttcctcttcaacataatgaaatagacttgaaagtctctaaggctctatcagttctgacattctaggcttcatatacattaagttgagccatatgtaatcactgtgtttgtaggttagaaacagctgagtatcgtagtttcatatatggttccagctaatacatgcaatgtggctggtgaacacttctgaattcagaaactatcccagatctcagctagaaccatccactgttctgtttgtccagtttcaacttaagggatctccatgcggtccctggaagtacccattgaaacatgcgtatttgtgtatagcagaactctgaaataatattctgacagcagttatctctgaggaattgggttataggtgattttccctttccgcatgataaatttatgtaatatttgactgacttgaccgtaagtatgttacttgtataataaaaggaaaaaaggtacttctattttgaaaaaataaaaataaaagcctttgggttcttgaatggaggatcatggaacacatttgctgccatatgcagttatgttgatgctctgcaaacctgtgctgagccctgttgctcaagcccttcctcatctcttcttgagggagaaggtggagacttccttaaggagatgtgacatatgggaagacaacagattcagaaatttacgtggataggactttagacaccacccagcccaaacttccaaataaaatatggaacgcaaaaaaaaaaaaaaaaaa

SEQ ID NO: 286880 - DNA, 1000 bp, Homo Sapiens
aggctgcaaagtgcaagttcagattctgtggcagagatttggagggcacccacgtccagactgcttcccgtccaagttaccaggacagctcaaaaacatgctgacagaaaactcccatggctctaggaaaaagtgacactaagccaacacctttctttatgtgggagcaaaatcagctgatgaaggggtgggcaccattgtggggcaggcaccccactggctgcagctagcccaccataggcacagcacatcccaccactctccttccagtcctgaccaggccccagccggcaacttctaccgagagccatggctcaacaccaaactggacagtagacatcatgatccctccagttagctctaattacagaccccaccagtacagcttgacagctcccggcaccatcccttccttcatctgacttattgaacttttacaaactaacagtcaccagcaccaaagaattaagtcaactaacctgccttgaattttaaaccagcaatccatatggctttatctggtataaatcttctgcctttgatcatttctggaccgtaggaaaaaggaatagcaatcattaaaatcttgggccagagaacactatttttacataacagtttcttaacctaaagtcaaggccttggactcttccctgagggttgcctgaaattccttcatgctttctattcaggactaattcccttactgcaaatgtgttagctctaacatctcccacaagctaaaggaacttgcaagtatattaacaaggacacatctgacatcctgtgtttggttaaaatatacagcacattgtgataacataaagtggatccatcttgtatcattataggcaaaaggtatttggcaaatttttatgtatggttttatgtactgtacaagtaacttattcttgaataatgcaaattttgctataatgtacaaattgctatatgtgaattaaaaagtttccaaaatcttgaaaaaaaaaaaaaaaaaaaa

SEQ ID NO: 286881 - DNA, 1000 bp, Homo Sapiens; identical to SEQ ID NO: 116411

SEQ ID NO: 286882 - DNA, 715 bp, Homo Sapiens; identical to SEQ ID NO: 57445

SEQ ID NO: 286883 - DNA, 1000 bp, Homo Sapiens; identical to SEQ ID NO: 116413

SEQ ID NO: 286884 - DNA, 1000 bp, Homo Sapiens
cggaggaatttgtgctggacatgaacacactgcaggcgctgcagcagctcttgcagtgggtgggcgacttcgtgctgtacctgctggccagcctacccaaccagggttccctgctgaggccgggccacagctttctgcgggacggcacctcgctgggcatgcttcgggaattgatggtggtcatccgcatctggggccttctgaagcccagctgcctgcccgtgtatacggccacctcggatacccaggacagcatgtccctgctcttccgcctgctcaccaagctctggatctgctgtcgcgatgagggcccagcgagcgagccggacgaggcgctggtggatgaatgctgcctgctgcccagccagctgcttatccccagcctggactggctgccagccagcgacggcctggttagccgcctgcagcccaagcagccccttcgtctgcagtttggccgggcgcccacgctgcctggcagtgctgccaccctgcagctcgacggcctcgccagggccccaggccagcccaagatcgaccacctgcggaggctgcaccttggcgcttgccccacggaggaatgcaaggcctgcaccaggtgcggctgtgtcaccatgctcaagtcgcccaacagaaccacggcggtgaagcagtgggagcagcgctggatcaagaactgcctggctgttgaaggccgtgggccggacgcctgcgtgaccagcagagcttctgaggaagcccctgcctttgtccagctgggcccgcagtccacacaccactctcccaggacccccagatccctggaccatctgcatccagaggaccgtccgtgacggccgggggtccaggcggaccttgtggtgacccggctcgggcgtctcctcggtttccttgcctcacccgcggagagcgctgaacctggacaagcagcggctgggaaggacaggtccaataaacgccctctgcgcccagaaaaaaaaaaaaaaaaaaaaaaaaaaaa

SEQ ID NO: 286885 - DNA, 1000 bp, Homo Sapiens
cagagggatcctaaaaatgtactgataactgatttctttggaagtgtacggaaagtggaaattacaacagagactattaaattgcaacaggattcagaaatcatggaaagcagctataaggaagaccagatggatgagaaactaatggaacctctgaaatatgctgaacaacttcctgtagctcagataatacaccagaaaccgaagctgaaagactggcatcctcctgggggctttattctgggattatgggcacttattatcatggttttcttcaaaacttatggaattaagcatatgaagttcattttttagacttgatgatgaatgaagaatgcatggaggactgcaaacttggataataatttatgtcattatatatttttaaaaatgtgtttctcttgtatgaattggaaataagtataaggaaactaaatttgaatcaactattaattttataacttaaagaaaaataattgttaatgcaactgcttaatggcactaaatatattccagttttgtattttgtgtattataaaagcgaatgagacagagatcagaatacattgactgtttttgaaaatagtaatttccccttatccccttttcatttggaaaagaaacaattgtgaagacattaaattctcactaacagaagtaactttggttaattattttttgtatatcctcccaatcttttgacttatgcacatattttttcccaatatggagatcatatggaatgtactattttgtaatgtcttttttcattttacaatgtattatcaaccttttccctctcaaaaatacattgtgaatgactgcatagtattcactttatgaatatttaattcatttcacagtcttctattgttggaccacttacattgtaccaaatgttttcctttggtttattctttaatgtattaatattttactgctggtcactcatggaatcctgcagctttaattaaaagcaaagatgaaaaaaaaaaaaaaa

SEQ ID NO: 286886 - DNA, 1000 bp, Homo Sapiens; identical to SEQ ID NO: 116414

SEQ ID NO: 286887 - DNA, 1000 bp, Homo Sapiens; identical to SEQ ID NO: 116415

SEQ ID NO: 286888 - DNA, 1000 bp, Homo Sapiens; identical to SEQ ID NO: 116416

SEQ ID NO: 286889 - DNA, 1000 bp, Homo Sapiens; identical to SEQ ID NO: 116417

SEQ ID NO: 286890 - DNA, 1000 bp, Homo Sapiens
gtcagaaaatggggcccctgaaggggactggggcaagaccttcacagtccccatcgtggaagtcacttcttccttcaacccggccaccttccagtcactactgatccccagggataaccggccactggaggtgggccttctgcgcaaggtcaaggagctgctggcagaagtggatgcccggacgctggcccggcatgtcaccaaggtggactgcctggttgctaggatactgggcgttaccaaggagatgcagaccctaatgggagtccgctggggcatggaactgctcaccctcccccatggccggcagctacgcctagacctgctggaaaggttccacaccatgtccatcatgctggccgtggacatcctgggctgcaccggctctgcggaggagcgggcagcgctgctgcacaagaccattcagctggcggccgagctacgggggactatgggcaacatgttcagcttcgcggcggtcatgggtgccctggacatggctcagatttctcggctggagcagacatgggtgaccctgcggcagcgacacacagagggtgccatcctgtacgagaagaagctcaagccttttctcaagagcctcaacgagggcaaagaaggcccgccgctgagcaacaccacgtttcctcatgtgctgcccctcatcaccctgctggagtgtgactcggccccaccagagggccctgagccctggggcagcacggagcacggcgtggaggtggtgctggctcacctggaggccgcccgcacagtggcacaccacggaggcctgtaccacaccaatgctgaagtcaagctgcaggggttccaggcccggccggagctcctggaggtgttcagcacggagttccagatgcgccttctctggggcagtcagggtgccagcagcagccaggcccggcgctatgagaagttcgacaaggtcctcactgccctgtcccacaagctggaacctgctgtccgctccagcgagctgtga

SEQ ID NO: 286891 - DNA, 1000 bp, Homo Sapiens
ccaaagcaacctccacttgccctagcaatgggacaggccacacaatgtctaggactgatggctcgatcaggaattggatcctgcgcatttgccacagtggaagactacctacattagctatgcatttcaagagctcacacttatattgtggcatatagtcaacatggaagtagaccagctctgctgatttgaaatttagattttttaaattatgtactggggacaggtttttgtcgctttacattgcttcctagtttacagcatgatgcaaatgattttctaacttagtgttaggagaaattattttccatctttaacctcttagttgtctaagagttaaatattactgaatttcagacgttcaaattgatcatcacaaatcctttaaaacaattacctaaaagaaaccaaaaatcctgccttctttgtgggggaggggggagagaggggaaggaaatggaacaagttgtgtttgtgttagcatgtgggtgatgtaaacttcaaattgggagatgttccgacccccactcccatataagcattcaatcagtgtaacttgcaaaatgcataaacatccgacagtttgaatttatagtgttgatggaagaaatcatttttaatgtgtactgtaaaacttgaaatactcaggagctgagtgaatatgtttgttgctacttacaatcccgacctgttagtcccagtagttttgttttaacatggtctttttcaactttgtttcctgtttaactacagatgacttctgttgtagactcacaagtttaactgttgtattataacagtattacatgtcaacggtgtggttatgacctttatttatataaaaaccaaatatttagtcaatttaccgtgtcttaatttaatctttgtacaccttccatttttaagtgcttaaatgagtactatattgcaataaaatgtagtgatataattaaccagccattaaaaatttacttctacagaaaaaaaaaaaaaaaaaaaa

SEQ ID NO: 286892 - DNA, 1000 bp, Homo Sapiens
ctggtgcttagttcatcattgttttccctcacagacatttctctttcatgcctgcttgactgataagccattagctagaccctgactatgtaacgctaaagattttaccatgcctggaaattttacaggggaagaaaacacgctagttatttaactgcaagctactaaaagcataggtgtgttgagatttctgtgttctccactcttccactgttatcctagtaaaagcatcaggggctggggacaatttctttccaaagcaaaagaggaagccagaccttgggaccgagaactgagaatcacaagggagttgcgcccaacatgcagaacatgaatcctctgagctgtcctcaaaagaaagccccaaacaacagaaagcatagtgttttccattgttggtgaaaaatgtcaaggaggaaagaacaataatgattccatcatgataagaggaatgaacgtgtctgcaactaatgggagcaagatagtacactttaactctttcagacaacttgcattctgtggatgccagctttggaatcagagccgcctctggaatacctgtgcttccagagttagcttttggacagttaccttctttctggccatcttgacttctgccccacatctgctttttggctttgtgcagatctttaacatgttagtgaacagacattgcccagtgtctcttctagcccctccaacagttcttcatgtagcactgcttttggacagtgacccatgatatctgccttcgtttgcccctctgactgttggaatcccacgcaccattcagtaggattcaattcaatgtggaaccattcaacattcacctcattaacctaaaatgtctcccaaagatgtatgtaagacacacactgccctaacctcacttcaaatgtctggagaaatgtgtgtagtgcttttgttaaagcccctatatgggcagcatggaggatcataagatagcaaaaccatttcaacactaaatgaatattaatgt

SEQ ID NO: 286893 - DNA, 1000 bp, Homo Sapiens
tataattgcttctagattacaaaaatatgacaatcttgtaagtagcagactatggagaaaaatgagttacctggagggtcaggtaacttgccaaactaaaaagtatgttagttgaggcaaagtcctaagcaaggttgtgctatcaaggctcagcataccttcgtgggcctttgatttaccaacactggaaatgcctgccaactaatcttggatagattctttaaggcattccacttagcttgccagttgagacaatcaccacagttattacccaaatactatgaacatatttttgtaaaccagtcattctgaattatagtgatgagaatttaaatatatgcttttctagaatttgatgtttgaccatttatgacttaattaccagagagccagtaaattaggacagtgtttcaacaagcctaggctatctcgtaagttgaaaaatatcccactatagttgcttcatgagtatgaagtaagatggcctctgatttacactggttcaatttacaaattttcaactttatgataggtttatccgggtactaaatgcatttcaacttgatagtttcaacttatgataggtttaccaggatgtagtcccactgttgaggagcatctatttaggggttaattactttagtaataagtggaaagtaagataccttgagtaatgtttgcctataaaattgtcagcgtatttttacactattggctcaagaatgttataatgctaagggacataagttggcaaccacttggtttttggaaggactttcggtattgtattagaagtctgccctagctgttaaatttctgggtatttatcctaaggaattaattaaagagttaattgttcctttcttcagtgggccattgttttagatatttaaaaaatccaacagtttctatcataatgtaactgtaaaaatgtaaacacattattagcatggacttttaaataaagatttaaagaaagcaaaaaaaaaaaaaaaaaaaa

SEQ ID NO: 286894 - DNA, 1000 bp, Homo Sapiens; identical to SEQ ID NO: 116420

SEQ ID NO: 286895 - DNA, 1000 bp, Homo Sapiens; identical to SEQ ID NO: 116422

SEQ ID NO: 286896 - DNA, 1000 bp, Homo Sapiens; identical to SEQ ID NO: 116423

SEQ ID NO: 286897 - DNA, 1000 bp, Homo Sapiens
caagaagtagattgtgacttttttcccttagagatactatttactatctcctatcctgataggtggaaggtttactgaattggaaattggttgactattagtttttaactaaaatgtgcaataacacattgcagtttcctcaaactagtttcctatgatcattaaactcattctcagggttaagaaaggaatgtaaatttctgcctcaatttgtacttcatcaataagtttttgaagagtgcagatttttagtcaggtcttaaaaataaactcacaaatctggatgcatttctaaattctgcaaatgtttcctggggtgacttaacaaggaataatcccacaatatacctagctacctaatacatggagctggggctcaacccactgtttttaaggatttgcgcttacttgtggctgaggaaaaataagtagttcgaggaagtagtttttaaatgtgagcttatagatagaaacagaatatcaacttaattatgaaattgttagaacctgttctcttgtatctgaatctgattgcaattactattgtactgatagactccagccattgcaagtctcagatatcttagctgtgtagtgattcttgaaattctttttaagaaaaattgagtagaaagaaataaaccctttgtaaatgaggcttggcttttgtgaaagatcatccgcaggctatgttaaaaggattttagctcactaaaagtgtaataatggaaatgtggaaaatatcgtaggtaaaggaaactacctcatgctctgaaggttttgtagaagcacaattaaacatctaaaatggctttgttacaccagagccatctggtgtgaagaactctatatttgtatgttgagagggcatggaataattgtattttgctggcaatagacacattctttattatttgcagattcctcatcaaatctgtaattatgcacagtttctgttatcaataaaacaaaagaatcctgtttgtgtggtttcatgaaa

SEQ ID NO: 286898 - DNA, 1000 bp, Homo Sapiens
gtgtcatgattcttttttttttgagagagtctcactctgtcgccaggctggagtacagtggcatgatctcggctcactgcaacctctgcctcccgggttcaagcaattctcctgcctcagccacccaagtagctgggactacaggtgcgtgccaccacgcccagctaaattttgtatttttagtggagacggggtttcaccatgttggccaggatggtctcaatctcctgaccctgcgatctgcccacctcagcctcccaaagtgctgggattacaggcgtaagccaccgggcctggcctgttttatgattcttaatagttacttggtttaaatcacatttgatactatccttctgaaaagtctgagacagatctacaaactacagtcaaaattatagattaagaggaatgaatgcacctatttggctttaagttgaagatgaattatttctcatgctcattttcttgcggcagttatcttagaaagacccccaaaggctttgtgattgtaagcactgtcatgatcacagaatgcaagcttctggtaccatgatcctcaacttagagaggaagaaaccaagacagagagcttaactcacttctctcagggaaaattaggagttgagcacaggacaggaaatgggctttgccacttttagctccaggcttttctaaccagacttgatttcctcatgttctagaaagatcactaatggtcaagtggaacaagcactacacgactaacccctattggggtttttaacttaagggaggctaatttttaatttaaactgctcgagatatgagttctgcaaaaggtggtccgcatccttggccctctggacattatcactaaattgcttgtgcctgttaacaagaatactgaccagaatgctcttcatgtagcttatacagttggttcacttcatgcggttcttgacatgtttatttctacccttaatgcaatgaaatgtttcattaataaaaaaccactttatat

SEQ ID NO: 286899 - DNA, 1000 bp, Homo Sapiens
gtggctgtgttcgcctcccttcctggctttctgttcagcacttgttatactgagcgcaaccatacctactgcaaaaccaagtactctctcaactccacgacgtggaaggttctcagctccctggaaatcaacattctcggattggtgatccccttagggatcatgctgttttgctactccatgatcatcaggaccttgcagcattgtaaaaatgagaagaagaacaaggcggtgaagatgatctttgccgtggtggtcctcttccttgggttctggacaccttacaacatagtgctcttcctagagaccctggtggagctagaagtccttcaggactgcacctttgaaagatacttggactatgccatccaggccacagaaactctggcttttgttcactgctgccttaatcccatcatctacttttttctgggggagaaatttcgcaagtacatcctacagctcttcaaaacctgcaggggcctttttgtgctctgccaatactgtgggctcctccaaatttactctgctgacacccccagctcatcttacacgcagtccaccatggatcatgatctccatgatgctctgtagaaaaatgaaatggtgaaatgcagagtcaatgaactttccacattcagagcttacttaaaattgtattttagtaagagattcctgagccagtgtcaggaggaaggcttacacccacagtggaaagacagcttctcatcctgcaggcagctttttctctcccactagacaagtccagcctggcaagggttcacctgggctgaggcatccttcctcacaccaggcttgcctgcaggcatgagtcagtctgatgagaactctgagcagtgcttgaatgaagttgtaggtaatattgcaaggcaaagactattcccttctaacctgaactgatgggtttctccagagggaattgcagagtactggctgatggagtaaatcgctaccttttgctgtggcaaatgggccctct

SEQ ID NO: 286900 - DNA, 1000 bp, Homo Sapiens; identical to SEQ ID NO: 221693

SEQ ID NO: 286901 - DNA, 1000 bp, Homo Sapiens; identical to SEQ ID NO: 116424

SEQ ID NO: 286902 - DNA, 1000 bp, Homo Sapiens
aatccttcccatccatctgtttactacaataggttacaataattcactgatcacatccattttatctgttctagccaggcattccaaacaatttcttatactgctgcccaccaaagcagcttgccaacagtcaaatcactgattgggggaaaaaatcctgaaattttgcttagaatttgagcatttcctcaaaattgagatggatcaatatgtaaggggaggtgggagcgtgtgtggaagggggagagatatacttgagtcttatgattaatgtctaaaccagaatttgtgtctttagaactgaccagactggtagattttattgtattgcttaatgtcttttggtttggatttaggatgatagaaaacagaagtataattggtaaacccttaggaagaaattagaaaaacatggacgtaagacaaaaagtctctgtgaagggttgaagagtgacaagcattggtaacagtgccttagaactgtgtcagttagtctgatttggaaatcctttatgtaaagctgagactggtcctggttttgttccctttggtacagacctcttgtcagtgctataaattgtttaatgaggccattccagcagaaatcaacagaataattgattactcttctctctctctgtcactctccctctttctaaacatcattgaaggctgtctctctttaattttgtcagacacagtattttagggtgcatccagtataccattgagcattgtaacctcaggaaacagtttattttgggttctgatatgtagcatggtattttccctaaggcagaactttaaaaataaagaactttcacacaagggtctgtaacaattgtatatcttacaatatttttccttgcattgtaatttttaagtatttatcattttatagtacacatgtaaagaatatatgagccttgtatggagtgatgtttcatttacctgggttgtgttaatgactgaatgttgacaataaatctgttttatactg

SEQ ID NO: 286903 - DNA, 1000 bp, Homo Sapiens
ctgaggtgctgggccctgggcttctaccctgcggagatcacactgacctggcagcaggatggggagggccatacccaggacacggagctcgtggagaccaggcctgcaggggatggaaccttccagaagtgggcagctgtggtggtgccttctggagaggagcagagatacacgtgccatgtgcagcatgaggggctacccgagcccgtcaccctgagatggaagccggcttcccagcccaccatccccatcgtgggcatcattgctggcctggttctccttggatctgtggtctctggagctgtggttgctgctgtgatatggaggaagaagagctcaggtggaaaaggagggagctactctaaggctgagtggagcgacagtgcccaggggtctgagtctcacagcttgtaaagcctgagacagctgccttgtgtgcgactgagatgcacagctgccttgtgtgcgactgagatgcaggatttcctcacgcctcccctatgtgtcttaggggactctggcttctctttttgcaagggcctctgaatctgtctgtgtccctgttagcacaatgtgaggaggtagagaaacagtccacctctgtgtctaccatgacccccttcctcacactgacctgtgttccttccctgttctcttttctattaaaaataagaacctgggcagagtgcggcagctcatgcctgtaatcccagcacttagggaggccgaggagggcagatcacgaggtcaggagatcgaaaccatcctggctaacacggtgaaaccccgtctctactaaaaaatacaaaaaattagctgggcgcagaggcacgggcctgtagtcccagctactcaggaggcggaggcaggagaatggcgtcaacccgggaggcggaggttgcagtgagccaggattgtgcgactgcactccagcctgggtgacagggtgaaacgccatctcaaaaaataaaaattgaaaaataaaaaaaaaaaaaaaaaa

SEQ ID NO: 286904 - DNA, 1000 bp, Homo Sapiens; identical to SEQ ID NO: 116426

SEQ ID NO: 286905 - DNA, 1000 bp, Homo Sapiens
agacacctacaccaacaaggacctggataaagcacttctaaaggcctctcaggacatgttcgacaagaaaaccaaggcttccctttacctctccactcacaatgggaacatgtacacctcatccctgtacgggtgcctggcctcgcttctgtcccaccactctgcccaagaactggctggctccaggattggtgccttctcttatggctctggtttagcagcaagtttcttttcatttcgagtatcccaggatgctgctccaggctctcccctggacaagttggtgtccagcacatcagacctgccaaaacgcctagcctcccgaaagtgtgtgtctcctgaggagttcacagaaataatgaaccaaagagagcaattctaccataaggtgaatttctccccacctggtgacacaaacagccttttcccaggtacttggtacctggagcgagtggacgagcagcatcgccgaaagtatgcccggcgtcccgtctaaaggtgttctgcagatccatggaaagcttcctgggaaacgtatgctagcagagcttctccccgtgaatcatatttttaagatcccactcttagctggtaaatgaatttgaatcgacatagtagccccataagcatcagccctgtagagtgaggagccatctctagcgggcccttcattcctctccatgctgcaatcactgtcctgggcttatggtgctatggactaggggtcctttgtgaaagagcaagatggagcaatggagagaagacctcttcctgaatcactggactccagaaatgtgcatgcagatcagctgttgccttcaagatccagataaactttcctgtcatgtgttagaactttattattattaatattgttaaacttctgtgctgttcctgtgaatctccaaattttgtaccttgttctaagctaatatatagcaattaaaaagagagaaagaggaaaaaaaaaaaaaaaaaaaaaaaaaaaaaaaaaaaaaaa

SEQ ID NO: 286906 - DNA, 1000 bp, Homo Sapiens; identical to SEQ ID NO: 221696

SEQ ID NO: 286907 - DNA, 1000 bp, Homo Sapiens
tgaatttttgtaagaaaccgaggcgatgccacgctttgctgctaccgccctgggctggactggaggtgggcatgccaccctcacacacacagctgggcaaagccacaaggctggccagcaaggcaggttggatgggagtgggcacctcagaaagtcaccaggacttggggtcaggaacagtggctgggtgggcccagaactgcccccactgtccccctacccaccgatggagcccccagatagagctgggtggcctgtttctgcagcccttgggcagttctcactcctaggagagccaacctcggcttgtgggctggtgccccacagctacctgagacgggcatcgcaggagtctctgccacccactcaggattgggaattgtctttagtgccggctgtggagcaaaaggcagctcacccctgggcaggcggtccccatccccaccagctcgtttttcagcacccccacccacctccacccagcccctggcacctcctctggcagactccccctcctaccacgtcctcctggcctgcattcccaccccctcctgccagcacacagcctggggtccctccctcaggggctgtaagggaaggcccaccccaactcttaccaggagctgctacaggcagagcccagcactgatagggccccgcccaccgggccccgcccaccccaggccacatccccacccatctggaagtgaaggcccagggactcctccaacagacaacggacggacggatgccgctggtgctcaggaagagctagtgccttaggtgggggaaggcaggactcacgactgagagagagaggagggggatatgaccaccctgccccatctgcaggagcctgaagatccagctcaagtgccatcctgccagtggcccccagactgtggggttgggacgcctggcctctgtgtcctagaagggaccctcctgtggtctttgtcttgatttttcttaataaacggtgctatccccgccaaaaaaa

SEQ ID NO: 286908 - DNA, 1000 bp, Homo Sapiens; identical to SEQ ID NO: 116427

SEQ ID NO: 286909 - DNA, 1000 bp, Homo Sapiens; identical to SEQ ID NO: 116430

SEQ ID NO: 286910 - DNA, 1000 bp, Homo Sapiens; identical to SEQ ID NO: 224615

SEQ ID NO: 286911 - DNA, 1000 bp, Homo Sapiens
gggtctgtctctgccgatgctccttccgcggcactgactctgcgccgtgtcacatggtttttgaatcacactgcagctgctttccatttttatatatatataaatatatataaatatatactttttaaaaataatttataaatcttaccaaaacttatgctaaatatactttccagtatgaacgcacaggagagtcccatcagcaggcggcattggagtctaggagctcagctgtgtgtccatcaacacacaaattcgtaaaaaacacacatggcctcgccatcgtgggtaaaatcggccccacagcacgtctgcaccagcgggccgttactcccatgccgttcttctgtgtaatattaagaactgaatgtgaagtttatagctagcctgggtgtaccttttaagaattttgtaaaccgtttgtctgtcttttgttactgttttatggtgccaagtatcctacgttacaacaataatatcatgggagaaatagaaatagcctagtttgcttccaatagaaactgcttttaacatgggctgtatataaaaatattaaagagaaacaaaactgtacatttcctcattgctccgctacagacaacccatgtcataaccttgttgcaaatatttttctcctatagcagtaagtacagcattagaaggtgattagagagtctgttgatgaaacacaaatgtatgttttattgattttactttagaacactacagagttcctggaccgggtgaaggcattagctgggtgtttgtgtgggataaatactaccactgcaagtgactgctgtccgctgcggaatctgttcttggtggaagcacaggtccgtgtcgctgctgtggttgccgctgtccgcggttcaacacggagtccgccccgcgggtttcagctgttggtcgttctgaggggcctttggaagtgaccggtctggttcctaagcaataaaattgaccgtggtgaaaataaaaaaaaaaaaaaaaaaaaaaa

SEQ ID NO: 286912 - DNA, 1000 bp, Homo Sapiens; identical to SEQ ID NO: 116431

SEQ ID NO: 286913 - DNA, 1000 bp, Homo Sapiens
cgcacaccagacgggcaacaaacagtctgggtccccagctcgctcttggtacttgggaccccagtgcctcgttgagggcgccattctgaagaaaggaactgcagcgccgatttgagggtggagatatagataataataatattaataataataatggccacatggatcgaacactcatgatgtgccaagtgctgtgctaagtgctttacgaacattcgtcatatcaggatgacctcgagagctgaggctctagccacctaaaaccacgtgcccaaacccaccagtttaaaacggtgtgtgttcggaggggtgaaagcattaagaagcccagtgccctcctggagtgagacaagggctcggccttaaggagctgaagagtctgggtagcttgtttagggtacaagaagcctgttctgtccagcttcagtgacacaagctgctttagctaaagtcccgcgggttccggcatggctaggctgagagcagggatctacctggcttctcagttctttggttggaaggagcaggaaatcagctcctattctccagtggagagatctggcctcagcttgggctagagatgccaaggcctgtgccaggttccctgtgccctcctcgaggtgggcagccatcaccagccacagttaagccaagccccccaacatgtattccatcgtgctggtagaagagtctttgctgttgctcccgaaagccgtgctctccagcctggctgccagggagggtgggcctcttggttccaggctcttgaaatagtgcagccttttcttcctatctctgtggctttcagctctgcttccttggttattaggagaatagatgggtgatgtctttccttatgttgctttttcaacatagcagaattaatgtagggagctaaatccagtggtgtgtgtgaatgcagaagggaatgcaccccacattcccatgatggaagtctgcgtaaccaataaattgtgcctttctcactcaaaaaaaaaaa

SEQ ID NO: 286914 - DNA, 1000 bp, Homo Sapiens; identical to SEQ ID NO: 221700

SEQ ID NO: 286915 - DNA, 1000 bp, Homo Sapiens; identical to SEQ ID NO: 221701

SEQ ID NO: 286916 - DNA, 1000 bp, Homo Sapiens; identical to SEQ ID NO: 116433

SEQ ID NO: 286917 - DNA, 1000 bp, Homo Sapiens; identical to SEQ ID NO: 116435

SEQ ID NO: 286918 - DNA, 1000 bp, Homo Sapiens; identical to SEQ ID NO: 221703

SEQ ID NO: 286919 - DNA, 1000 bp, Homo Sapiens
gtcgacggccgagagtctcccatggtgactgtggtgggagatggaaccatgctggatgtggagggtttgttctacctaggaggcctgccctcccagtaccaggccaggaaaattggaaatatcacccacagcatccctgcctgcattggggatgtgacggttaacagcaaacagctggacaaggacagcccggtgtctgccttcacggtgaacaggtgctacgcagtggcccaggaaggaacatactttgacggaagcggatatgcagctcttgtcaaagagggctacaaagtccagtcagatgtgaacatcacactggagtttcgaacctcctcgcagaatggcgtcctcctggggatcagcactgccaaagtggatgccattggactagagcttgtggacggcaaggtcttgttccatgtcaacaatggtgctggcaggataacagctgcatatgagcccaaaaccgccactgtgctctgtgatggaaaatggcacactcttcaagctaacaaaagcaaacaccgtatcactctgattgttgacgggaacgcagttggcgctgaaagtccacacacccagtctacctcagtggacaccaacaatcccatttatgttggtggctatcctgctggtgtgaagcaaaaatgcctgcgcagccagacctcgttccgcgggtgtttgaggaagctagctctgattaagagcccgcaggtgcagtcctttgacttcagcagagcgttcgaactgcacggagttttccttcattcctgtcctgggaccgagtcctgaacttcaagcagaatcctcagttggaatcattgctaatattttgaggagaagtgtatgtgtgaattaagaatctcttcagttcatatttcatttccaactcaggttaagtgtttctggggagagatgttgtgtttacgttacactaaaaccacatgtgcaacaaatacctccattaaatggtctaaaatgtaaaaaaaaaaaaaaaaaa

SEQ ID NO: 286920 - DNA, 1000 bp, Homo Sapiens; identical to SEQ ID NO: 116436

SEQ ID NO: 286921 - DNA, 1000 bp, Homo Sapiens; identical to SEQ ID NO: 116437

SEQ ID NO: 286922 - DNA, 1000 bp, Homo Sapiens
gtacgtttcttatattacccgaccagaggcagaagctgctcttagaaagataaaccaggatggcacatttctggtcagagacagctctaaaaaaacaacaaccaatccatatgtcctcatggtgttgtacaaagataaagtttacaacatccagatccgttatcagaaggaaagtcaagtttacttgttgggaactggactccgagggaaagaggactttctgtctgtgtcagatattattgactacttcaggaaaatgccacttctgctcattgatgggaaaaaccgaggttccagataccagtgcacattaacgcatgctgcagggtacccatagcaagttatagccgagcaaatgaaccgtcctcctgcctctgttgccaacacgagatcaatcagccttggtcaatggacaaacacttaggactgaactgaacccctccccatgaacacaagggttttatcctttcctttaaaaacagtgtttgaaatgaagactgtcaactatcccataatttatttattcttcttcaatgtttgtaaagtgcatgagtcatgttcacacttgaagtctagtagtgcactgtaataattcattttttaaaagattatttaatgcccatttcaaaatacagtagtttacacagctacagaaacaatttggggcaagttttaaaacactgaaacagtaatagttattggtgtcacataaaactgatttgttttttacagccaaacctctgtcagtcagaggcattcattagttttatacatgtaatttgaaaatcactaaacctcgttttctcagcagcaataatttaagaggcttcaaaaatataatttcactcttatttagtattttttcctgggggcatttttacgtaatttttttatgaaaagacaaatgcatgttgagataacttctgggattaaaatagtcttttgctttaaaaaaaaaaaaaaaaaaaaaaaaaaaaaaaaaaaaaaaaaaaaaaaaaaa

SEQ ID NO: 286923 - DNA, 1000 bp, Homo Sapiens
gcagctctccactggcgaggaactctacatcatcgacgagaataagttcgtctgcaaagaggattacctaagtaacagcagtgttgccaaagagaacagccttcactcggccaccacgggcagtgaccccagtttgtctccggattcccaagacccgtcgcaggacgacgccaaggactcggagagcgccaacgtgtcggacaaggaagcgggtagcaacgagaatgacgaccagaacctgggcgccaagcggcggggaccgcgcaccaccatcaaagccaagcagctggagacgctgaaggccgccttcgctgctacacccaagcccacccgccacatccgcgagcagctggcgcaggagaccggcctcaacatgcgcgtcattcaggtctggttccagaaccggcgctccaaggagcggaggatgaagcagctgagcgccctgggcgcccggcgccacgccttcttccgcagtccgcgccggatgcggccgctggtggaccgcctggagccgggcgagctcatccccaatggtcccttctccttctacggagattaccagagcgagtactacgggcccgggggcaactacgacttcttcccgcaaggccccccgtcctcgcaggcccagacaccagtggacctacccttcgtgccgtcatctgggccgtccgggacgcccctgggtggcctggagcacccgctgccgggccaccacccgtcgagcgaggcgcagcggtttaccgacatcctggcgcacccacccggggactcgcccagccccgagcccagcctgcccgggcctctgcactccatgtcggccgaggtcttcggacccagcccgcccttctcgtcgctgtcggtcaacggtggggcgagctacggaaaccacctgtcccacccccccgaaatgaacgaggcggccgtgtggtagcggggtctcgcacggtctgcggagttcgtggttgtacagaaatgaacctttatttaagaaaaatag

SEQ ID NO: 286924 - DNA, 1000 bp, Homo Sapiens; identical to SEQ ID NO: 221706

SEQ ID NO: 286925 - DNA, 1000 bp, Homo Sapiens
ccaggcagtctgctgagaggaacagcaacctggtgggggctgcccacgaggagctgcagcagtcgcgcatccgcatcgacagcctctctgcccagctcagccagctccagaagcagctggcagccaaggaggcgaagcttcgagacctggaggactcactggcccgtgagcgggacaccagccggcggctgctggcggaaaaggagcgggagatggccgagatgcgggcaaggatgcagcagcagctggacgagtaccaggagcttctggacatcaagctggccctggacatggagatccacgcctaccgcaagctcttggagggcgaggaggagaggctacgcctgtcccccagccctacctcgcagcgcagccgtggccgtgcttcctctcactcatcccagacacagggtgggggcagcgtcaccaaaaagcgcaaactggagtccactgagagccgcagcagcttctcacagcacgcacgcactagcgggcgcgtggccgtggaggaggtggatgaggagggcaagtttgtccggctgcgcaacaagtccaatgaggaccagtccatgggcaattggcagatcaagcgccagaatggagatgatcccttgctgacttaccggttcccaccaaagttcaccctgaaggctgggcaggtggtgacgatctgggctgcaggagctggggccacccacagcccccctaccgacctggtgtggaaggcacagaacacctggggctgcgggaacagcctgcgtacggctctcatcaactccactggggaagaagtggccatgcgcaagctggtgcgctcagtgactgtggttgaggacgacgaggatgaggatggagatgacctgctccatcaccaccacgtgagtggtagccgccgctgaggccgagcctgcactggggccacccagccaggcctgggggcagcctctccccagcctccccgtgccaaaaatcttttcattaaagaatgttttggaacttt

SEQ ID NO: 286926 - DNA, 1000 bp, Homo Sapiens
tctttgaaaatcagtcagaggcaaccttccggcttcgttgtgtccaggaggctttggaagtcattcagttgaatatccagtggatggagaagaacctcaaaagtctcacatggtggctgtagcatgcacaaccgcacctcattttgttgcccattcagagagcttgtaagcttgggctctgccgcttttgcaaaagccaaggtaaagccaggatcgctgccaagttgtttgcactctttggagttctagttagctcagggcctgactgtatttttcatccatcttttctgaagtgtctttgggcagtatgtagttatttattacaaaattatattcacctaaatgccaaccatctacaaaaacaatgagtaatttttctactttgaagatacacagatggggacaaaaaccctgttttggaattctgttctattcctcagtatccagaaagttactgacacagtaaaacaaggaaagttctaccctaagagccgccatcacttcaggccgctggtttgtcagccatctgttgcttcttattgatagatggcattggaatgtggtacaaagttagctctgaagaatatggtaacgaagacaataaagcatgcactgtaagaactgacctcaggtgtgcagatctactttgatttggggttttgattaattctttatttttctgaaaaaaagtttaaataatgtctgtaactattgtgtttttttcctgccgaatagccaggtgctacagatttttaaaatttttgttgtattgaaaagctaaacaaggccaaaaggttaaattttttgaatatttaagactttctttttcatcttttatagcgttaccataggaaactgttccaaactgagttagctttaattataattattttattcataaatggtgatagtccccagatctgtacacctttatcactccctgccgtagatatactttaggttagtatttctacattcgtggcaagcattttggtaacac

SEQ ID NO: 286927 - DNA, 1000 bp, Homo Sapiens
gggtggggagcggaacggcgcgcagcagggccgcctcagcgtgggcagcgtgtaccggcccaaccagaacggccgcggtctccctgacttggtcccagaccccaactatgtgcaagcatccacttatgtgcagagagcccacctgtactccctgcgctgtgctgcggaggagaagtgtctggccagcacagcctatgcccctgaggccaccgactacgatgtgcgggtgctactgcgcttcccccagcgcgtgaagaaccagggcacagcagacttcctccccaaccggccacggcacacctgggagtggcacagctgccaccagcattaccacagcatggacgagttcagccactacgacctactggatgcagccacaggcaagaaggtggccgagggccacaaggccagtttctgcctggaggacagcacctgtgacttcggcaacctcaagcgctatgcatgcacctctcatacccagggcctgagcccaggctgctatgacacctacaatgcggacatcgactgccagtggatcgacataaccgacgtgcagcctgggaactacatcctcaaggtgcacgtgaacccaaagtatattgttttggagtctgacttcaccaacaacgtggtgagatgcaacattcactacacaggtcgctacgtttctgcaacaaactgcaaaattgtccaatcctgatctccgggagggacagatggccaatctctccccttccaaagcaggccctgctccccgggcagcctcccgccgaggggcccagcccccaacccacaggcacggaggggcatccctccctgccggcctcagggagcgaacgtggatgaaaaccacagggattccggacgccagaccccattttatacttcacttttctctacagtgttgttttgttgttgttggtttttattttttatactttggccataccacagagctagattgcccaggtctgggctgaataaaacaaggtttttctac

SEQ ID NO: 286928 - DNA, 1000 bp, Homo Sapiens
ttttgactactgtgatatccctctctgtgcatcctcttcatttgattgtgggaagcctcaagtggagccgaagaaatgtcctggaagcattgtaggggggtgtgtggcccacccacattcctggccctggcaagtcagtctcagaacaaggtttggaaagcacttctgtggaggcaccttaatatccccagagtgggtgctgactgctgctcactgcttgaagaagtcctcaaggccttcatcctacaaggtcatcctgggtgcacaccaagaagtgaacctcgaatctcatgttcaggaaatagaagtgtctaggctgttcttggagcccacacaagcagatattgccttgctaaagctaagcaggcctgccgtcatcactgacaaagtaatgccagcttgtctgccatccccagactacatggtcaccgccaggactgaatgttacatcactggctggggagaaacccaaggtacctttgggactggccttctcaaggaagcccagctccttgttattgagaatgaagtgtgcaatcactataagtatatttgtgctgagcatttggccagaggcactgacagttgccagggtgacagtggagggcctctggtttgcttcgagaaggacaaatacattttacaaggagtcacttcttggggtcttggctgtgcacgccccaataagcctggtgtctatgctcgtgtttcaaggtttgttacttggattgagggaatgatgagaaataattaattggacgggagacagagtgaagcatcaacctacttagaagctgaaacgtgggtaaggatttagcatgctggaaataatagacagcaatcaaacgaagacactgttcccagctaccagctatgccaaaccttggcatttttggtatttttgtgtataagcttttaaggtctgactgacaaattctgtattaaggtgtcatagctatgacatttgttaaaaataaactctgcacttattttgatttga

SEQ ID NO: 286929 - DNA, 1000 bp, Homo Sapiens; identical to SEQ ID NO: 221707

SEQ ID NO: 286930 - DNA, 1000 bp, Homo Sapiens
ctcctcgccccccaggctgccacctggtgtaccagtgatcagcctgggccacagcaggcccccaggggtagccatgcccaccacagagctgggcactctgcggcccccgctgctgcaactctccaccctgggaactgccccgcccactttggccctgcactaccaccctcaccccttcctcaacagtgtctacattgggccagcaggaccttttagcatcttccctagcagccggttgaagcggagaccaagccactgtgagctggacctggctgaggggcaccagccccagaaggtggcccggcgcgtgttcaccaacagccgggagcgctggcggcagcagaacgttaacggcgccttcgccgagctgaggaagctgctgccgacgcacccgcccgaccggaagctgagcaagaacgaggtgctccgcctagccatgaagtacatcggcttcctggtgcggctgctgcgcgaccaagccgcagctctggccgcaggccccacccctcccgggcctcgcaaacggccggtgcaccgggtcccagacgacggcgcccgccggggatccggacgcagggccgaggcggcagcgcgctcgcagcccgcgcccccggccgaccccgacggcagccccggtggagcggcccggcccatcaagatggagcaaaccgctttgagcccagaggtgcggtgaccgcacgcggcagcacctctgagccggagggcaccagggactcggcccagggccgtcaaggaaagggcagtggacgtgctgcgcatgttcgggagcgaactcccccgaagaaggaccagtgaagacgtcaggggcaaggtctcgggggtccggaagggtgatcatcgacccccaagggacccgcagacccttaaaaaaatcacccacaaccctctggaagtggccttgcccggtccccttcccaggggcgaggtcggcaaagcaacatggcagagcagtcataggaaaaaaaaaaaaaaaaaaaaa

SEQ ID NO: 286931 - DNA, 1000 bp, Homo Sapiens
gacgccagcatgtctccggacgccaccaagccgagccactggtgcagcgtggcgtactgggagcaccggacgcgcgtgggccgcctctatgcggtgtacgaccaggccgtcagcatcttctacgacctacctcagggcagcggcttctgcctgggccagctcaacctggagcagcgcagcgagtcggtgcggcgaacgcgcagcaagatcggcttcggcatcctgctcagcaaggagcccgacggcgtgtgggcctacaaccgcggcgagcaccccatcttcgtcaactccccgacgctggacgcgcccggcggccgcgccctggtcgtgcgcaaggtgccccccggctactccatcaaggtgttcgacttcgagcgctcgggcctgcagcacgcgcccgagcccgacgccgccgacggcccctacgaccccaacagcgtccgcatcagcttcgccaagggctgggggccctgctactcccggcagttcatcacctcctgcccctgctggctggagatcctcctcaacaaccccagatagtggcggccccggcgggaggggcgggtgggaggccgcggccaccgccacctgccggcctcgagaggggccgatgcccagagacacagcccccacggacaaaaccccccagatatcatctacctagatttaatataaagttttatatattatatggaaatatatattatacttgtaattatggagtcatttttacaatgtaattatttatgtatggtgcaatgtgtgtatatggacaaaacaagaaagacgcactttggcttataattctttcaatacagatatattttctttctcttcctccttcctcttccttactttttatatatatatataaagaaaatgatacagcagagctaggtggaaaagcctgggtttggtgtatggtttttgagatattaatgcccagacaaaaagctaataccagtcactcgataataaagtattcgcattataaaaaaga

SEQ ID NO: 286932 - DNA, 1000 bp, Homo Sapiens; identical to SEQ ID NO: 116442

SEQ ID NO: 286933 - DNA, 1000 bp, Homo Sapiens; identical to SEQ ID NO: 221709

SEQ ID NO: 286934 - DNA, 1000 bp, Homo Sapiens
gccctacctgtcagcctgagccaggggcagcccagccgacagaagcggtcggtggagaacacaggccccctggaggaccataactggccacagtacttcagagacccatgtgacccaaacccttgccaaaatgacggcatctgtgtgaacgtgaaggggatggcgagctgcaggtgcatctctggacatgctttcttctacacgggggagcgctgtcagtcggccgaggtgcacggcagtgtcctgggcatggtgatcggaggcacggctggcgtgatcttcttgaccttctccatcatcgccatcctttcccaaaggccaaggaagtgacctgcctgctggcattggccagaccacagcagcacctcctccatgcaggccttaactttcccatgttcaatgcagtttggggcagcttttttatcagccttgctttggataggacctccaaggactaagcctccagccccatgtgtgacccttgtcatctctctgccccacataattatgttactttgctatgtgctcctaatgtatctagtgtgtcctgtgacaacactcatcacacttcattgtaaatcacttgttttattgactgtctttcctatagactgtaagctccatgagggcaggcacatgttgttctcattgaccgtgctggccccagtgcctagatgcatggctggcacattgttggcactcaacaatggttgaatgaataaaacaataaatgaatgaataactaagatatagaaactctcatttatattgcagattgaatatatatgatgaaattcttatgttgaatatgttagaatcaaatactcatttttcattagatacagtagtgtcatcactcttttaagatcttgttaaagatttcaaataaaggtacttctggcgagccaggctgcacagcatttgctttcctctgagattctaagagaaggcctttaataaatttaataaatattgagttagcaaaaaaaaaaaaaaaaaa

SEQ ID NO: 286935 - DNA, 1000 bp, Homo Sapiens; identical to SEQ ID NO: 116443

SEQ ID NO: 286936 - DNA, 1000 bp, Homo Sapiens; identical to SEQ ID NO: 116444

SEQ ID NO: 286937 - DNA, 1000 bp, Homo Sapiens
acccagcgcagttacaacttcactatcagcggaaggggagaaaaaccgattcaaatcaacttgtacatggaaacagcaagcattatggtcaaacagcaaaggccataaccttttgggatttttttttttttttaaatactttagggactgttgtaatttctcatatggtgctggaaatggttgggctttgtaacatttgaagtgtttccatggtagcgtgagcattaggtgacgtggctagcggaggactacccttgctcactgacttcctgttgtaacacactttccttacggagcctggctgtttcacagtatttcatgaatttacccacacaggtgtgatcctccttgagcattgaggaggcacatggagaactaaatcttttgtagtagctgagatctgcaatatataacgggacagtcaaagggcaatgtttttctgtaacatattggaaaaagaaaatgcagttatattccttttttatttgttcctttagtttgttttggttcagcagtcagcagttaagtatataacatggcccgcaaggacaatgaatccactcacattgcagaacaattccgaaaatggcaaactactactactactgttcagttttttaaaagttttgaaatgctgcacttacatttaaaaaaacaacaacaacattttttcaacaatttcaacaatgacacaaaaattcacatggaaatggggaagatggtctgttttgacagaaactgacaggaatcaatcaaaacaatcgaattttgaattgagtaaagtgcaatttcattggatagctaaatatctttgtaagatagagattgttgaaaattctatttttgtttttctagtcctttcaccccaggactctaaattattggggtaaaaaacagccttgcaagaaaaaggggagctatttttgctttttatgttttttattgttaaacttgtatccctttaaaaactaaaaaaaaaaaaaaaaaaaaaaaaaaaaaa

SEQ ID NO: 286938 - DNA, 1000 bp, Homo Sapiens; identical to SEQ ID NO: 221711

SEQ ID NO: 286939 - DNA, 1000 bp, Homo Sapiens
tccctacgacgtccatcctaccccagacggcctccacctacttcccccacacggccatccgctacccacctcatctcaacccccaggacccgctcaaagatcttgtctcgctggcctgcgacccagccagccagcaacctggaccgtcctggtatctgggatagcaaaggtcttcttccctcgccccttctccatcgtcccaggaatcccagggggcagcacagccggcccccggcccacgttttcggtggaaaattagagtgaacaagaacacccctgccgactcccagcccggccaaaaagacaaaacacatagacgcacacactcaggaggaaaagaaaaaacaaaggcagaagaagaagaagaagaaataaaaacccacccaagcaagaagacaaaaggtaaagacgcaacgtttccaactctcgggacgccaaggccgcaggactggagggccaggccccgccacccccacgggagacccgggacagggcgtcttcctaagttattcatctcctctccgcctgctgctcgggaaggacagacgccggccgcccgcccgcgccccggaggccctggctctgtccggagaccaggtgagcacagcctggagcctgtgcccagggccgacaggcgcgacacccagcaaggccacctctccccgggcccccgcgcctctgccggacacggaccggcccctcagcccccaccgaggacgcagccactggggggaaagggagacacagcggaccccggccgggcagcggagaccgcagaggcgggcagggtggggcaggcgagtggtgtcgcgggggtgcgtggcgcttgcgagccctggccaggggaggaagtgaggcccaggcacctgctgcccctcgagggggccctgcctgccgcggggcctccccacaagcccctcccaaagcgccggccgactcgctgtctcgctggggactctttcagccctcgcgcccgcccgtttgggaggagaagtctcta

SEQ ID NO: 286940 - DNA, 1000 bp, Homo Sapiens
ccactgggtgggaaacttttggaagaatacacccagcttgccagggaatgtggactctggctgtccttgggtggtttccatgagcgtggccaagactgggagcagactcagaaaatctacaattgtcacgtgctgctgaacagcaaaggggcagtagtggccacttacaggaagacacatctgtgtgacgtagagattccagggcaggggcctatgtgtgaaagcaactctaccatgcctgggcccagtcttgagtcacctgtcagcacaccagcaggcaagattggtctagctgtctgctatgacatgcggttccctgaactctctctggcattggctcaagctggagcagagatacttacctatccttcagcttttggatccattacaggcccagcccactgggaggtgttgctgcgggcccgtgctatcgaaacccagtgctatgtagtggcagcagcacagtgtggacgccaccatgagaagagagcaagttatggccacagcatggtggtagacccctggggaacagtggtggcccgctgctctgaggggccaggcctctgccttgcccgaatagacctcaactatctgcgacagttgcgccgacacctgcctgtgttccagcaccgcaggcctgacctctatggcaatctgggtcacccactgtcttaagacttgacttctgtgagtttagacctgcccctcccacccccaccctgccactatgagctagtgctcatgtgacttggaggcaggatccaggcacagctcccctcacttggagaaccttgactctcttgatggaacacagatgggctgcttgggaaagaaactttcacctgagcttcacctgaggtcagactgcagtttcagaaaggtggaattttatatagtcattgtttatttcatggaaactgaagttctgctgagggctgagcagcactggcattgaaaaatataataatcataaagtcaaaaaaaaaaaaaaaaaaaaaaa

SEQ ID NO: 286941 - DNA, 826 bp, Homo Sapiens; identical to SEQ ID NO: 221712

SEQ ID NO: 286942 - DNA, 1000 bp, Homo Sapiens; identical to SEQ ID NO: 116446

SEQ ID NO: 286943 - DNA, 1000 bp, Homo Sapiens; identical to SEQ ID NO: 221713

SEQ ID NO: 286944 - DNA, 1000 bp, Homo Sapiens
aaaaatcagcacaaaagggcgctaaaagggaaaacactttttattaatcttaaaagtttgggggtttttttccagttaggtattagataaatttttattttaaaaaatgaaagtctcactaccataaaattatggttcagcatcagattagcattgcactcagtagtctttaaggttttaggaaatatgctttatattgtcttttcaaacacctgtgattgtttcattttccatgtttttgcaagataaatggtgacttataatgggcatatttatttgcctgtatttcatttcccccaatgaatgtcacaaggagatgggcacggagctgcttcgggtgcatcacgctgctcgttcctgaggtatgggaactggcctttagtgaagctatccagagcagggcaaatagccactggtaaagggaggaaatgaatttccagatacttattaccaagtaggtaaggtcagaagctggagttcagagaatgtgtctacagcttctctgactcttataggtttactaagatgaaagttaccactgaaccttaccactatgtatatatgtttaatatctgtcttttgaaatgcagaaatagtttaaatgtttctttgtctatttttctttttttttaatgctacccagggaaatattttcatatcatttttaagtggcctgcctcaatgtatatttatttcttttgaaacaaaaaggttctggaaactgtttttctgtagctttaaatgaataggtgagcaaaatctatatgggatgtaatttttttgttcagtctcttaaaaaatactttgttttggtacatttggttgtgcttgtggggaaaataaaaacgcagagatccttatatatttatgttaaagtaatattttattatctacataaaacagaaatgcacaataaaaaaaaaaaaaaaaaaaaaaaaaaaaaaaaaaaaaaaaaaaaaaaaaaaaaaaaaaaaaaaaaaaaaaaaaaaaaaaaaaaaaa

SEQ ID NO: 286945 - DNA, 1000 bp, Homo Sapiens
attacaattttctctgcccccaattacctagatgtctataacaataaagctgctgtgttgaaatatgaaaacaatgtcatgaatatcaggcagtttaactgttctccacacccctactggcttccaaactttatggatgttttcacatggtctttgccttttgttggggaaaaagtcacagagatgctggtaaatgtgctcaacatatgctctgatgacgaactgatttctgatgatgaagcagaaggaagcactacagttcgtaaggagatcatcaggaataagatcagagccattgggaagatggcacgggtcttttcaattcttcggcaagaaagtgagagtgtgctgactctcaagggcctgactcccacaggcacactccctctgggcgtcctctcaggaggcaagcagactatcgagacagccacagtagaagcggtagaggcccgggaagccatcagagggttctcgcttcagcacaagatccggagttttgaagaagcgcgaggtctggaccgaattaatgagcgaatgccaccccgaaaggatagcatacacgctggtgggccaatgaaatctgtaacctcagcacactcacatgctgcgcacaggagcgaccaagggaagaaagcccattcatgacttagagtcctgccgtggctcaggtggatctaaaactcaagaacaaattctatttatttattattggaaaatgaaaagcaactcaaaacaacttcaacctggaggtgcatttataattcagtctgcatttattctgtaaaaaggtgactgttttataaattcttttaatttatgttcaatatatataaaaagtgcatctgttttgtttttcccttttttctccataattttaagaaatgaatctgattgttgtcaacacatttgtgaagtcttgtgctataaaggggaacttcccctaataaaagggccttggaaacctcaaaaaaaaaaaaaaaaaaaaaaaaaaaaaaaaaaa

SEQ ID NO: 286946 - DNA, 1000 bp, Homo Sapiens; identical to SEQ ID NO: 116447

SEQ ID NO: 286947 - DNA, 917 bp, Homo Sapiens
acttctcgctcgacacagccagagctggaggtgggtgcccggcacggaggggcctgcggaccaatggctctgccctgcaccttagggctcgggatgctgctggccctgccaggggccttgggctcgggtggcagcgcggaggacagcgtgggctccagctctgtcaccgttgtcctgctgctgctgctgctcctactgctggccactggcctagcactggcctggcgccgcctcagccgtgactcagggggctactaccacccggcccgcctaggtgccgcgctgtggggccgcacgcggcgcctgctctgggccagccccccaggtcgctggctgcaggcccgagctgagctggggtccacagacaatgaccttgagcgacaggaggatgagcaggacacagactatgaccacgtcgcggatggtggcctgcaggctgaccctggggaaggcgagcagcaatgtggagaggcgtccagcccagagcaggtccccgtgcgggctgaggaagccagagacagtgacacggagggcgacctggtcctcggctccccaggaccagcgagcgcagggggcagtgctgaggccctgctgagtgacctgcacgcctttgctggcagcgcagcctgggatgacagcgccagggcagctgggggccagggcctccatgtcaccgcactgtagaggccggtcttggtgtcccatccctgtcacagccgctcactccccgtgcctctgcttcccaagatgccatggctggactggacccccagcccacatgaccatgcctcagactgtcaccccctaccagttcccaagtccatgtgtaccccgctcaccacgggaacggccccccccaaccacaggcatcaggcaaccatttgaaataaaactccttcagcctgtgaaaaaaaaaa

SEQ ID NO: 286948 - DNA, 1000 bp, Homo Sapiens; identical to SEQ ID NO: 116448

SEQ ID NO: 286949 - DNA, 1000 bp, Homo Sapiens; identical to SEQ ID NO: 221714

SEQ ID NO: 286950 - DNA, 1000 bp, Homo Sapiens; identical to SEQ ID NO: 221715

SEQ ID NO: 286951 - DNA, 1000 bp, Homo Sapiens; identical to SEQ ID NO: 221716

SEQ ID NO: 286952 - DNA, 1000 bp, Homo Sapiens; identical to SEQ ID NO: 221717

SEQ ID NO: 286953 - DNA, 1000 bp, Homo Sapiens; identical to SEQ ID NO: 116451

SEQ ID NO: 286954 - DNA, 1000 bp, Homo Sapiens
tgctccctataaaaggcaggcagagccaccgaggagcagagaggttgagaacaacccagaaaccttcacctctcatgctgaagctcacacccttgccctccaagatgaaggtttctgcagcgcttctgtgcctgctgctcatggcagccactttcagccctcagggacttgctcagccagattcagtttccattccaatcacctgctgctttaacgtgatcaataggaaaattcctatccagaggctggagagctacacaagaatcaccaacatccaatgtcccaaggaagctgtgatcttcaagaccaaacggggcaaggaggtctgtgctgaccccaaggagagatgggtcagggattccatgaagcatctggaccaaatatttcaaaatctgaagccatgagccttcatacatggactgagagtcagagcttgaagaaaagcttatttattttccccaacctcccccaggtgcagtgtgacattattttattataacatccacaaagagattatttttaaataatttaaagcataatatttcttaaaaagtatttaattatatttaagttgttgatgttttaactctatctgtcatacatcctagtgaatgtaaaatgcaaaatcctggtgatgtgttttttgtttttgttttcctgtgagctcaactaagttcacggcaaaatgtcattgttctccctcctacctgtctgtagtgttgtggggtcctcccatggatcatcaaggtgaaacactttggtattctttggcaatcagtgctcctgtaagtcaaatgtgtgctttgtactgctgttgttgaaattgatgttactgtatataactatggaattttgaaaaaaaatttcaaaaagaaaaaaatatatataatttaaaactaaaaaaaaaaaaaaaaaaaaaaaaaaaaaaaaaaaaaaaaaaaaaaaaaaaaaaaaaaaaaaaaaaaaaaaaaaaaaaaaaaaaaaaaaaaaaaaaaaaaaa

SEQ ID NO: 286955 - DNA, 1000 bp, Homo Sapiens; identical to SEQ ID NO: 116452

SEQ ID NO: 286956 - DNA, 1000 bp, Homo Sapiens
gtgtgtttccgaatgttttagttagccttttggtggagccgccagctgacaggacatcttacaagagaatttgcacatctctggaagcttagcaatcttattgcacactgttcgctggaagctttttgaagagcacattctcctcagtgagctcatgaggttttcatttttattcttccttccaacgtggtgctatctctgaaacgagcgttagagtgccgccttagacggaggcaggagtttcgttagaaagcggacgctgttctaaaaaaggtctcctgcagatctgtctgggctgtgatgacgaatattatgaaatgtgccttttctgaagagattgtgttagctccaaagcttttcctatcgcagtgtttcagttctttattttcccttgtggatatgctgtgtgaaccgtcgtgtgagtgtggtatgcctgatcacagatggattttgttataagcatcaatgtgacacttgcaggacactacaacgtgggacattgtttgtttcttccatatttggaagataaatttatgtgtagacttttttgtaagatacggttaataactaaaatttattgaaatggtcttgcaatgactcgtattcagatgcttaaagaaagcattgctgctacaaatatttctatttttagaaagggtttttatggaccaatgccccagttgtcagtcagagccgttggtgtttttcattgtttaaaatgtcacctgtaaaatgggcattatttatgtttttttttttgcattcctgataattgtatgtattgtataaagaacgtctgtacattgggttataacactagtatatttaaacttacaggcttatttgtaatgtaaaccaccattttaatgtactgtaattaacatggttataatacgtacaatccttccctcatcccatcacacaactttttttgtgtgtgataaactgattttggtttgcaataaaaccttgaaaaatatttacaaaaaaaaaaaaaaaa

SEQ ID NO: 286957 - DNA, 1000 bp, Homo Sapiens
gcgtccagcgtgggggcagcgggcatccctgctggaggtgtcctcactctggccatcatcctcgaagcagtcaacctcccggtcgaccatatctccttgatcctggctgtggactggctagtcgaccggtcctgtaccgtcctcaatgtagaaggtgacgctctgggggcaggactcctccaaaattatgtggaccgtacggagtcgagaagcacagagcctgagttgatacaagtgaagagtgagctgcccctggatccgctgccagtccccactgaggaaggaaaccccctcctcaaacactatcgggggcccgcaggggatgccacggtcgcctctgagaaggaatcagtcatgtaaaccccgggagggaccttccctgccctgctgggggtgctctttggacactggattatgaggaatggataaatggatgagctagggctctgggggtctgcctgcacactctggggagccaggggccccagcaccctccaggacaggagatctgggatgcctggctgctggagtacatgtgttcacaagggttactcctcaaaacccccagttctcactcatgtccccaactcaaggctagaaaacagcaagatggagaaataatgttctgctgcgtccccaccgtgacctgcctggcctcccctgtctcagggagcaggtcacaggtcaccatggggaattctagcccccactggggggatgttacaacaccatgctggttattttggcggctgtagttgtggggggatgtgtgtgtgcacgtgtgtgtgtgtgtgtgtgtgtgtgtgtgtgtgtgttctgtgacctcctgtccccatggtacgtcccaccctgtccccagatcccctattccctccacaataacagaaacactcccagggactctggggagaggctgaggacaaatacctgctgtcactccagaggacattttttttagcaataaaattgagtgtcaactatttaaaaaaaaaaaaaaaaa

SEQ ID NO: 286958 - DNA, 1000 bp, Homo Sapiens
agcagcagtggcagcttgggaaatgtgaggaagggaaggagggagagacgggagggaggagagagaggagaagggaggcaggggaggggcagcagaaccaaggcaaatatttcagctgggctatacccctctccccatccctgttatagaagcttagagagccagccagcaatggaaccttctggttcctgcgccaatcgccaccagtatcaattgtgtgagcttgggtgcgagtgcacgcgtgcgtgagtacggagagtatatatagatctctatctcttagcaaaggtgaatgccagatgtaaatggcgcctctgggcaaaggaggcttgtattttgcacattttataaaaacttgagagaatgagatttctgcttgtatatttctaaaaagaggaaggagcccaaaccatcctctccttaccactcccatccctgtgagccctaccttacccctctgcccctagccaaggagtgtgaatttatagatctaactttcataggcaaaacaaaagcttcgagctgttgcgtgtgtgagtctgttgtgtggatgtgcgtgtgtggtccccagccccagactggattggaaaagtgcatggtgggggcctcggggctgtccccacgctgtccctttgccacaagtctgtggggcaagaggctgcaatattccgtcctgggtgtctgggctgctaacctggcctgctcaggcttcccaccctgtgcggggcacacccccaggaagggaccctggacacggctcccacgtccaggcttaaggtggatgcacttcccgcacctccagtcttctgtgtagcagctttaacccacgtttgtctgtcacgtccagtcccgagacggctgagtgaccccaagaaaggcttccccgacacccagacagaggctgcagggctggggctgggtgagggtggcgggcctgcggggacattctactgtgctaaaaagccactgcagacatagcaataaaaacatgtcattttcc

SEQ ID NO: 286959 - DNA, 1000 bp, Homo Sapiens
gtcaccaagctggatggcaagctgcggcccacaaaacagccagtcaggttggctttcctggtttcagacatgctcataccattcccattttctcagcctcttctctgcctccagagaggtggatgcctgggttgagagacacagctgctacgtgatagatgttgagagacagaagccaacgaaggaggtcattcatcaacaaatatatttattggagaccgactttgtgcaaagcaatgctaatcagggttctccatggagcttccctcagctcttacctcacctccctccatttacattagggccttctcccagggtgtgctcggtgggcagtgtgggactgggggtgtgggagttggtgagagcaggaggagaggtggggacagcaagaagccacagattggcatgaaggatcctgacctgactatccatgccatccatggcccccagactgactctgcacctggccctttgccagacagctctgtctccccatgtcctctggaacagctgggcatgggtcatggccattcatgacccttaagtgccacccttcttggaagaccccctccagaagcatactggaagccacctctggaaaagcctcatatggtgatatgccaaaatatttatgtcaatgtccaaacaaagtccaatgccatgagactgaagtctttgtggaaaccactgttacagacaagcttatttccaaagccacctcatttccaaacatctcactcaggaagggaggctcaatgtaacctcaggggccagttttagcatttgaaatggttctgcttggaaaatgatgccctgcaactaaccctggtctttcccatggcaatttaaccacatttggaaggcactgccttcagctgagtttatgaacaatgaatgccaaccttcaggttctagaagattggttgcactcccaaacctttattctattatattactattaaaatattctaattttgctattgaggtaaaaaaaaaaaaa

SEQ ID NO: 286960 - DNA, 1000 bp, Homo Sapiens; identical to SEQ ID NO: 221720

SEQ ID NO: 286961 - DNA, 1000 bp, Homo Sapiens
agcttcccatgggccccccgcccccctccttcccctccctgaaccccacagtccgcctggccaggcctcctggccgccacgcagaatacctcgaaccaggcgggctgtgaaccagccccgctcacctgccagccccaacacccgacgggggccgaggccaggctgcccctccctgtgggctcagggtctcctgcgggctaggcagccaggagctctgtccgcaaaaccaaatctgggtgtcagaggccaagaccctggggtgggatcagggaccacccctcacggggcataaggtcagttttcccccagagcccgggtccctgtcccccacagggcaggcggggtccctggagccctggtgtggagcggcgagtcccggggcggtgcctgtctcagaagaaggggcccttggccagccccccagcgacactatgcaaatcctggagtgcccgccaggatcgaagccatgactgggtgcaggcgggcgccaggcccgctgtgggtgggcaccagttctcagcaccgctcactgctgccgggcacactgggaccagcaggctcctcagccaaccctgtccctcggcccggccctgccagagagggaccccagcacatcgtgggcacgggcagggctcagccgctcccacctccccacagaagcccaggagtgtgtggacgtctgagcccagctttctgcgtgccctcctggcccctcactcccggcagcgggccggcctcgcccccactccccctcctaccccggcaggggcttccggggccttttcacctggagaaacattcccactcccctttggcctccctgtactctgagctgtgaatatttttaaccctgtaaatacggccagctcttgtgacacagagactattttatcaattgtcagtcccgttcctttaccataggattctccacagtggcttccgactcaggctccaatggaccaaataaaagcgttttgttttgtaaaaaaaaaaaaaaaaa

SEQ ID NO: 286962 - DNA, 1000 bp, Homo Sapiens
ggagaaggaatttacagattatcttttcaacaaatccctagaaatagaaccacgaaaccctaagcctctcccaagatttccaaaaaaatatagctatcccctaaaatctcctggtgttcgtccatcaaacccaagaccaggtaccatgaggcatcccacacctctgcagcaggagccaaggaaaattagttatagtaggatccctgaaagtgaaacagaaagtacagcatctgcaccaaattctccaagaacaccgttaacacctccgcctgcttctggtgcttccagtaccacagatgtttgcagtgtatttgattccgatcattcgagcccttttcactcaagcaatgataccgtctttatccaagttactctgccccatggcccaagatctgcttctgtatcatctataagtttaaccaaaggcactgatgaagtgcctgtccctcctcctgttcctccacgaagacgaccagaatctgccccagcagaatcttcaccatctaagattatgtctaagcatttggacagtcccccagccattcctcctaggcaacccacatcaaaagcctattcaccacgatattcaatatcagaccggacctctatctcagaccctcctgaaagccctcccttattaccaccacgagaacctgtgaggacacctgatgttttctcaagctcaccactacatctccaacctccccctttgggcaaaaaaagtgaccatggcaatgccttcttcccaaacagcccttccccctttacaccacctcctcctcaaacaccttctcctcacggcacaagaaggcatctgccatcaccaccattgacacaagaagtggaccttcattccattgctgggccgcctgttcctccacgacaaagcacttctcaacatatccctaaactccctccaaaaacttacaaaagggagcacacacacccatccatgcacagagatggaccaccactgttggagaatgcccattcttcctga

SEQ ID NO: 286963 - DNA, 1000 bp, Homo Sapiens
ctaggtttcaaagtcaccctcccacctttcatgtgtaataaacaggccacagacttccaggggaatgattttgataatgaccataaccgcaggattcaggttgaacatcctcagatgactttcggcaggctccacagaatcatcccgaagatcatgcccaagaagccagcagaggacgaaaatgattcgaagggagtgtcagaagcatctggcccacaaaacgatgggaaacaactgcaccccccaggaaaagcaaatatttctgagaagattaataagagatctggacccaaaagggggaaacatgcctggacccacagactgcgtgagagaaagcagctggtgatttatgaagagatcagtgaccctgaggaagatgacgagtaactcccctgggggatacgacacatgcccttgatgagaagcagaacgtggtgacctttcacgaacatgggcatggctgcggctccctcgtcatcaggtgcatagcaagtgaaagcaagtgttcacaacggtgaaacttgagcgtcatttttcttagtgtgccaagagttcgatgttagtgtttccattgtattttcttacagtgtgccattctgttagatactatccttataattgatgagcaagacatactgaatgcatatttcggtttgtgtatccatgcacctacgtcagaaaacaagtattgtcaggtattctctccatagaacagcactatcctcatctctccccagatgtgactactgagggcagttctgagtgtttaatttcagactttttcctctgcatttacacacacacacacacacacacgcacacacacacaccaagtaccagtataagcatctcccatctgcttttcccattgccatgcgtcctggtcaagcccccctcactctgtttcctgttcagcatgtactcccctcatccgattcccctgtatcagtcactgacagttaataaacctttgcaaacgttcaaaaaaaaaaaaaaaaaa

SEQ ID NO: 286964 - DNA, 1000 bp, Homo Sapiens
gggggtggggaggtaaattcctctgacttgccaaagaaaaagaagggaaccacagtggatatgctagcattttagctgtgcaaagggaggtagtgtgggaaaagtgtttccattctgggaaaagcccaaaccgaatacggtcagcagtcaactccagggtttgggcttgattcctgttgaataatagttttgagcattctttgtggttaaataaattcttaaatctgcctagttttgatgaattcttttgtgaaacttgaaagagaatagacagtatgacatatagaattaatacaaaacagtttaacaaccatttaactgcagtgtaagaaaattggactgtaatcatatcgctactggcatctgttatctagtatgcatttctggtgtgtatctgaaaggaagacattttctaccctagatccaattgcatttatttatcaataagtgccattaaattgaaattatattacattttacactttctcaatgaatgaacaaattagtctgtagaatctagccacctgtttagcctagtcatgtgccttgaacatatatgtgtcccataatctggctcatggtacctgttcttctatccaaacctttcaattcatgctacctgattcatttatttgacatagatcttaggcccacttgaactcttttcttgtttatctagcatagcacaaacgtttttccagtcttctttatcaacactaatgcctcttaattgcatcagtatttcctattggaaaatacatctgttccagaaaaacatttggcattcctgaataatttccaaatgtttttaatccaaagaaaaaggtttaaagcttatttccctttcttatacacacctgaataaaattgatgtgcatgttttagggatcaattacctaactgttccttggtctatttatgtataagaatgctttttaaagcacatgtctcattttaaatgacgcacaaactgaagatgttaataaaatttaaggaattc

SEQ ID NO: 286965 - DNA, 1000 bp, Homo Sapiens; identical to SEQ ID NO: 221721

SEQ ID NO: 286966 - DNA, 1000 bp, Homo Sapiens; identical to SEQ ID NO: 116453

SEQ ID NO: 286967 - DNA, 1000 bp, Homo Sapiens; identical to SEQ ID NO: 221722

SEQ ID NO: 286968 - DNA, 1000 bp, Homo Sapiens
agaaacaggatctcgataagctctatgagctgaagtccaaagctcggcagattatgaaccagtttggcccctcagccctaatcaacctctccaatttctcatccataaaaccggaaccagccagcacccctccacaaggctccatggccaatagtactgcagtggtaaagataccaggcactcctggggcaggaggtcgtcttagccctgaaaacaatcaggtattgaccaagaagaaattacaggacttagtaagagaagtggatcctaatgagcagttggatgaagatgtggaggagatgctgctgcagattgctgatgattttatcgagagtgtggtgacagcagcctgtcagcttgcgcggcatcgcaagtctagcaccctggaggtgaaagatgtccagctgcatttagagcgccagtggaacatgtggatcccaggatttggttctgaagaaatccgaccctacaaaaaagcttgcaccacagaagctcacaaacagagaatggcattgatccggaaaacaaccaagaaataacacacggaaaggtcagggaatggacagcaatgtatttggagatacttgagctgagaactcagccatctcatccttggatttttttttttaatgctttacagagaagcatatattttttattaacagtgcagcaatatctataatgactgagaggatctgccaaaagaataaagcctcctaccccaacttccggtcccttttccctgccatctcaaagaggagcaatgtatcttccagagaagattttatttgtggtttattatataagtgactgaatatgggacaaagcattatggtctttttgggtaagacagtattagcaggatttgtaaagggttttgtttccttctcccttcccccttttccctgtactttgtaatgtcagtgtttatatgaatatgactttcatttcatttgcttttccagaataaagaagttattaataaaaaaaaaaaaaaaaa

SEQ ID NO: 286969 - DNA, 1000 bp, Homo Sapiens; identical to SEQ ID NO: 116455

SEQ ID NO: 286970 - DNA, 1000 bp, Homo Sapiens
ttattattcacgagcgaattcatactggagaaaaaccatgtaaatgtaaagtatgtggaaaagccttcagacagagttcagctctcattcaacatcagagaatgcatactggagaaagaccctataaatgtaacgagtgtgggaaaacattcaggtgtaactcatcacttagtaatcaccagagaattcatactggagagaaaccatatcgatgtgaggaatgtgggatatcttttggccaaagttcagctcttattcagcatcgaaggattcatacaggagaaaaaccctttaaatgtaatacatgtggaaaaacttttagacaaagctcatcacgtattgcacatcagagaattcatactggagagaaaccctatgaatgtaatacatgtgggaaacttttcaaccataggtcatcccttactaatcattataaaattcatatcgaagaggacccctagaaagtagatttgtatgtgtgaaagccttaaaccaaagctcatcgaagaatacatccttgagagagatgtaataaatgtaatggatgtgaaaaaaactgtaataatttagccctcattaggtatttaattccatggataaacctcagctatataatagatatgaggaaagtgtttgtgcctgtcagacacttaaaaaaataacctgagatgaagaatttacaattgaagacattgactttagccatttgtgaaatgggtttgctttttcccttttcctacagacgtatatgctagatgtcacgtgatcatcagaaacagatatccgagtgggtggggaggtgtgctttagatttctcattagaagaccaccaaactggtaatatttttatagcattttaatagcttgatcaaattgtacctttttagagaaaaggaccaaaataaaagaaaaatgaattatgaactacctctcagtctctggggtttgtccttttcctaccctgatgtcaaacttatgcatggatttcattaaaaaagaa

SEQ ID NO: 286971 - DNA, 1000 bp, Homo Sapiens
ccacatggatttaacttctggggaaagcttgaaaaaaatatcaccagaggcctggaagaggaattcataaggattcaggctaaagaagagtctgaagaaaaagaggaacaggtggctgaatttcagaagcaaaaagaggtgctactgtccttatttgatgagaaacgtcatgaacatctccttagtaaaggtgaaagacggctgtcatacagagcacttcagggagcattgatgatatatttttacagggaagagcctaggttccaggtgccttttcagttgctgacttctcttatggacatagattcactgatgaccaaatggagatataaccatgtgtgcatggtgcacagaatgctgggcagcaaagctggcaccggtggttcctcaggctatcactacctgcgatcaactgtgagtgataggtacaaggtatttgtagatttatttaatctttcaacatacctgattccccgacactggataccgaagatgaacccaaccattcacaaatttctatatacagcagaatactgtgatagctcctacttcagcagtgatgaatcagattaaaatcgtctgcaaaatctatgaagaatactggtttcacagcctattttttattttctatggattttcataaatacagtttgaatatatgtatgcatatattgttcagcaccacgatgctctgatttaattctagaaacaatttgattacctcttgtttgtgacaagactaagcattaagatgagaaagaatacatttaaatagtaacattgtacatagggtgttttcctattaaaaatcagtttcccctgagacttaatgtaaccacttaatgtaatcactatctcattgtttcatctttataaacttgtaaacttcatctatttcaaatattttatgcagtacattatattattctgtacaaaggctttcaaacaaaatttttaaaataataaagtattaatctttcaaaaaaaaaaaaaaaaaaaa

SEQ ID NO: 286972 - DNA, 1000 bp, Homo Sapiens; identical to SEQ ID NO: 116456

SEQ ID NO: 286973 - DNA, 1000 bp, Homo Sapiens
acggggaccccctcaacggccactgctacctgtccggctacatctcgctgctgctgcgcgccgagccctaccccacgtcgcgctacggcagccagtgcatgcagcccaacaacattatgggcatcgagaacatctgcgagctggccgcgcgcctgctcttcagcgccgtcgagtgggcccgcaacatccccttcttcccggatctgcagatcaccgaccaggtgtccctgctacgcctcacctggagcgagctgttcgtgctcaacgcggcccagtgctctatgccgctgcacgtggcgccgttgctggccgccgccggcctgcatgcctcgcccatgtctgccgaccgcgtcgtggccttcatggaccacatccgcatcttccaggagcaggtggagaagctcaaggcgctacacgtcgactcagccgagtacagctgcctcaaagccatcgtgctgttcacgtcagacgcctgtggcctgtcggatgcggcccacatcgagagcctgcaggagaagtcgcagtgcgcactggaggagtacgtgaggagccagtaccccaaccagcccagccgttttggcaaactgctgctgcgactgccctcgctgcgcaccgtgtcctcctccgtcatcgagcagctcttcttcgtccgtttggtaggtaaaacccccatcgaaactctcatccgcgatatgttactgtctgggagcagcttcaactggccttacatgtccatccagtgctcctagaccttgggcgcttcccacctgccccgtccccctagagactcagaggacccacctgggccaaggactccaaagccgcggggacaccgggaagtgcagcgggccaggcaggctgggtgggagggaggagggccgagacaggagcagcccacccagcagaaatacaatccgagctacaaagcatgggaaaaagagactcttttaggatcagatctgtgagcacgttggcgaggaaaaacaaaaaaaaaaaaaaa

SEQ ID NO: 286974 - DNA, 1000 bp, Homo Sapiens
tacttgagaccaacttttcaatgtgattcttctaaagcactggtttcaagaatatggaggctggaaggaaataaacattacggtacagacatggagatgtaaaatgagtttgtattattacaaatattgtcatctttttctagagttatcttctttattattcctagtctttccagtcaacatcgtggatgtagtgattaaatatatctagaactatcatttttacactattgtgaatatttggaattgaacgactgtatattgctaagagggcccaaagaattggaatcctccttaatttaattgctttgaagcatagctacaatttgtttttgcatttttgttttgaaagtttaacaaatgactgtatctaggcatttcattatgctttgaactttagtttgcctgcagtttcttgtgtagatttgaaaattgtataccaatgtgttttctgtagactctaagatacactgcactttgtttagaaaaaaaactgaagatgaaatatatattgtaaagaagggatattaagaatcttagataacttcttgaaaaagatggcttatgtcatcagtaaagtacctttatgttatgaggatataatgtgtgctttattgaattagaaaattagtgaccattattcacaggtggacaaatgttgtcctgttaatttataggagttttttggggatgtggaggtagttgggtagaaaaattattagaacattcacttttgttaacagtatttctcttttattctgttatatagtggatgatatacacagtggcaaaacaaaagtacattgcttaaaatatatagtgaaaaatgtcactatatcttcccatttaacattgtttttgtatattgggtgtagatttctgacatcaaaacttggacccttggaaaacaaaagttttaattaaaaaaaatccttgtgacttacaatttgcacaatatttcttttgttgtactttatatcttgtttacaataaagaattc

SEQ ID NO: 286975 - DNA, 1000 bp, Homo Sapiens; identical to SEQ ID NO: 221723

SEQ ID NO: 286976 - DNA, 1000 bp, Homo Sapiens; identical to SEQ ID NO: 116457

SEQ ID NO: 286977 - DNA, 1000 bp, Homo Sapiens
ctctaagcctggcatcctgtcatgcttagtccttcagctgaagatcagaggaagcctctcccttgccctctccagctctaggggttttcaggaggcccaactgcaataatggagcactagtgcttttatgtgcaatggtgtcgtccatgcacgacagcagcaaacattctggggctgctttttattgttcccacggctgacagcgtggcagcggagactgtggaggcagtggagactgacttcttcctgctgacagctggatgtcacacatgaaggtctggcctagcgagtgatgggtctaggccctgaaactgatgtcctagcaataacctcttgatccctactcaccgagtgttgagcccaaggggggatttgtagaacaagcccccatgagaaacagctgttactctacacttttgattgcctatttctgatggcaagagatacatactctcttcaaagagcatgagatgcagccattctttcagcaaagcttcattgacacctgcacctgttaactgtgttcgacattgaagggagaaaggcaagatgtgcactctggactcaagaaactcttagttcagtggaggaaatgagcagataagtagatcattatgattgagagtaggagaagcttagagaaagcacagaatcccagatccagctggtgaaggagggaaggcttcaggcctttaagctcagcctgagaatattgtgaaatgcagaggatggggaaaagggaagagtaccgacttgaaaacggagagctgtcttggctgagggcagggtctgtgtggcaggatgggggagggagtcagaagggtcagatgaactggagtgtagacagcatcagatgcagcagtgcccaccgccccccccccaaccccccgccctgcccacagagcacctgctggtaaccctgggcctattgaaagcaggatgagatgataatttaagacactgaatgatttcttttccaacaaagctctatgttaagtgc

SEQ ID NO: 286978 - DNA, 1000 bp, Homo Sapiens; identical to SEQ ID NO: 116459

SEQ ID NO: 286979 - DNA, 1000 bp, Homo Sapiens
cttctgttttcttgtctattctgcatatctttccccctaggattatggtgattatctgtgttaaaaaataagtccttaaagttactgttttggtgaaattaatattaatgtcagcttatggcttttttttgtcatctctgttgtcaacaggattaactcagttctagtgtagtgtttactgaatttccacacttattttgaagaccctcaagagtaaatgtggcagagtgaaaggagaagttttaattgaactagtagctttgtgctataatagccttaacaaatggacccttgcagggctttgcagctgctcatctgtttgtttacagtttgttctttccctccttccccttcaagtgcacttgttaaactgtgatgaacttgtgattttgtgttttacttgaccaaaaccaagtgtatatgtttacatgtttttatcctgtttagcttgacatgaaataatttatatttggaaatatatatttaagaattatatatataaaaatatatatgtataagagttatgtatttgaaaaaaatatataaaagaatatacatcacaatataatatttatgtttatgtaataaagtaaatacagagctgaaagctgaaggtcaaagcctaacaggattggctgttgtgtggatgtgagttgtgtgaataatctttctgtccctcgcacagaagccagtaattagcatctaatgaaaaggactgttcaagtgggtctggccaaatgtgacagatgcagatcttagaggacttacaaagcactatattggtaattcttacaatggcattaatagcttactctataaatacagaaatggttttcctatgcagtttagccaccttctcattaattctttgtaacagcaaatcctaggctcagaggcacagtgctttgtatttgatatacaaagtctctagactttcccaacaaggggcttttgacaaaagagttcaacataaaagtaacaagattataaaagggaaaat

SEQ ID NO: 286980 - DNA, 1000 bp, Homo Sapiens; identical to SEQ ID NO: 221724

SEQ ID NO: 286981 - DNA, 1000 bp, Homo Sapiens
attaaaaacttaccaatgtggcgatttaaatgtcttggagtccagtctgaagaggaaatgtcggaggggtctcaagatactgaaaatgactcggaaagtgagaacacagacactttgagtagtgagaaggaagtatttgaagataagcaaagcgtacttcacaattctccaggaacagcaagtcactgtgatgctgaggcttgttcatgtgccaataaatattgtcagaccagcccatgtgaaaggaaggggaggtcatatggatcatataacactaatgaagatatggaacctgattggttaacttggcctgctgatatgctgcactgtactgaatgtgttgtttgcctagagaattttgaaaatggatgtttgctaatggggttgccttgtggtcatgtgtttcatcagaattgcattgtgatgtggttggctgggggccgacattgttgccctgtttgccggtggccttcttataaaaaaaagcagccatatgcacaacaccagcccttgtcaaatgatgtcccatcttaaccatgtgcaatttgtcctttataagctttgagtatcttacagcttgcctttttaatgttagtcacaatgtttttgtggtttgaagtttagtttaatgttagtgcagtgacgggaaatacacattatgctaatgttgatgacagaatttatttggttgccttgtgtgttaattgaatgcatacctaattgtaaaatttttttatttacaacattggaaattcagaagttaatgtttttttgtaagcacaaaagaagtattatagaaatttatcctagcaagactttacaagataggatcaaattctaatggaattgagccggtttcttatcctaaatgtttcctccctttttacaatctctgtccagcacctcttggttaaataatgtatgctgtgagacatgaaattaaaacagacctatgaaataaattattttaaaaccagaagattaaaaaaaaaaaaaaaaa

SEQ ID NO: 286982 - DNA, 1000 bp, Homo Sapiens
aaaaaggatgaacaaattaatttatttctaattgagccagttagacataatgcatataacgtgatatttggttcatgaaagagttgttttcatgtggttattgtagggagtatatataattgtggaaggggtatgggaagagttgtgtatagttagttgttatctctacaagtttgaaagttttcccatcaaacattatcaatataccaatgttttaaaaattgagtgagggttattatttgtatttgatgaaagaaaatccaaataaagcccacctagaaatagatattttattatatatgtgctatagatatacctatatagtacaaatagacatgtgtgatgcatatatacaatgttatatatgtgtatatgtctgtatacacactgagtctgtaatatgtatacactaaatttgtgttatgctaacatcttcagggtctgcactgtgaactcccctggagataagtaagtccactttagaataaagaagttcttttgagacttcagttactaacgtgctttaagaggtatctactttataactgaattctatgtcgttcatacgtagagttacagtaagggtctagtatgtccaaatcttaataataaagaagaaaagtaaaggcttcaagctagcaatgtattcgaattacagttttcagattgtggctccaggccttgtgtttctcatttaagtagcaccttttaataaaaaccgtttctttgtgtaggcaaaagcacaagtgtttcaaatgtaaatagcaggaaaaaaaaagagtttacagagatagcattgctgcacagaataattgctactgagtatttcttatagaatttgtggaactgaaagatgaggtttattctgtcaagttcaagttcattctgttcaacactgttttcttattgtttgtgtatagcaaccgggtattattgttttatcatttgtaaaattgtaaaataaattaatccctttttttcactgaaaaaaaaaaaaaaa

SEQ ID NO: 286983 - DNA, 946 bp, Homo Sapiens; identical to SEQ ID NO: 221725

SEQ ID NO: 286984 - DNA, 1000 bp, Homo Sapiens; identical to SEQ ID NO: 221726

SEQ ID NO: 286985 - DNA, 1000 bp, Homo Sapiens
tggtaccaaattatgaagaaagcttttgatgagaaaaaacaaaaatgggaagaagcaagggccaagtacctgtggaaaagtgaaaagccactctactactcatttgtcgacaaaccagtagcatataaaaaaagagaaatggtggtgaatctacagaaacaatttagcacactggtcgagtcaacagcaactgctggaaaaaaaagcccttcaagttttcagttcaactggactgaagaggacactgatagaacgtgtttccatggacacagccttcagggagtcctgaaagagaaaggccaatcactgctgactaagaattcattatattggcttagtacacagaaattctgcagatgctattgtacacatgtgacaacctatgaagaatcaaattattctctgagttatcagtttatactaaatctcttctccttcctgctcagaataaagacttcccttctccatgaagaagtgagcttagttgagaagaaactttttgagaaaaaatacagtgtaaaaagaaagaaatcaagatccaagaaagtgagacgacattgagaaaatgaaatagaaactttctggaaaaatattttaatagtgataataacatcagattttaatataacattccagagaattgtggaaaatactgcatatatatgtatagactctgacacatatttacatatatatcaagtgtgcttagaaaaatgtatattgtaaagcaggtgagcttcatttgattttatttttcagagtatgaacattctaagagaaagttaaaacaatagcaaattgtataattgtatccagaaatgtatactcatcgtattttaaagctaaatttattttttaaactagatcccttcattattctttatgccccagagtaaatcccagatggatcaaagatctaaacataatctttcatatgtaaaaatataaaagtattagtagaaaacaaatatgaatgctttgatgatcttggaaaaaaaaa

SEQ ID NO: 286986 - DNA, 1000 bp, Homo Sapiens; identical to SEQ ID NO: 221729

SEQ ID NO: 286987 - DNA, 1000 bp, Homo Sapiens; identical to SEQ ID NO: 116462

SEQ ID NO: 286988 - DNA, 1000 bp, Homo Sapiens
atggctggaggtcaggacggattatctgggagcttgcattgtcctcactgcatctatagcatccattagtgggtcttccaattctggattggtaggcttgggtcttctgtatgcacttacgataaccaattatttgaattgggttgtgaggaacttggctgacctggaggtccagatgggtgcagtgaagaaggtgaacagtttcctgactatggagtcagagaactatgaaggcacaatggatccttctcaagttccagaacattggccacaagaaggggagatcaagatacatgatctgtgtgtcagatatgaaaataatctgaaacctgttcttaagcacgtcaaggcttacatcaaacctggacaaaaggtgggcatatgtggtcgcactggcagtgggaaatcatcgttatctctggctttcttcagaatggttgatatatttgatggaaaaattgtcattgatgggatagacatttccaaattaccactgcacacactacgttctagactttcaatcattctgcaggatccaatactattcagtggttccattagatttaatttagatccagagtgcaaatgcacagatgacagactctgggaagccttagaaattgctcagctgaagaatatggtcaaatctctacctggaggtctagatgcggttgtcactgaaggtggggagaattttagcgtgggacagagacagctattttgccttgccagggcctttgtccgcaaaagcagcattcttattatggatgaggcaacagcttccattgacatggccacagagaatattttgcaaaaagtagtaatgacagcctttgcagaccggaccgtggtgacaatggctcaccgtgtctcttctattatggatgcaggccttgttttagtcttttctgagggtattttagtggagtgtgatactgtcccaaatttgttcgcccacaagaatggccccttttccactttggtgatgaccaacaagtag

SEQ ID NO: 286989 - DNA, 1000 bp, Homo Sapiens; identical to SEQ ID NO: 116465

SEQ ID NO: 286990 - DNA, 1000 bp, Homo Sapiens
gttaaggacccaaacacacaatctgtgggaaatcctcagaggattggctggccccacttcaaggagatcttcatgttgtcagccctaagccaggaggacgtgaaaacactaaagcaataccttctgacacaggcccagccagggccctgggagtaccacagtgcagtcctcactagccagacaccagaagagatctgtgccaacattatccgagagaagctcctagaacacctgccccaggaggtgccttacaatgtacagcagaagacagcagtgtgggaggaaggaccaggtggggagctggttatccaacagaagcttctggtgcccaaagaatcttatgtgaaactcctgattggtccgaagggccacgtgatctcccagatagcacaggaggcaggccatgacctcatggacatcttcctctgcgatgttgacatccgcctctctgtgaagctcctcaagtgaccaccctctactgaccctcccagggcattccagctcaagctgctggcaggaactgaccagttctgtccttggctggggaccctccaggcactggtgagagacatgaacactgactggccactagctggcctggccctgttgagtctgcacagtccctgcccagctgtgtcttctgttggaagaaggaacctgccttagctcagtttccaggtggttcctctgcctggcaccacagctacaaaggtgtagctaagaagatggcccattggtgggagcaatgtcaccctgcctccagctagctatgggcccagagtttctccctgagtcgctgttgctagcagggagatttctcttcctgccctcacttctttcaccttgaacttggataagaactcgtgtctcctgagtgaggtagcgcctcccatctgctccccaattcttgatctctcccaccccatccctctccccagtcttggatactaataaaatataagcattctgaaaaaaaaaaaaaaaaaaaaaaaaaaaaaaa

SEQ ID NO: 286991 - DNA, 1000 bp, Homo Sapiens; identical to SEQ ID NO: 116466

SEQ ID NO: 286992 - DNA, 1000 bp, Homo Sapiens; identical to SEQ ID NO: 116467

SEQ ID NO: 286993 - DNA, 1000 bp, Homo Sapiens; identical to SEQ ID NO: 221734

SEQ ID NO: 286994 - DNA, 1000 bp, Homo Sapiens
aagtgctcaaattatggtaggcaactaacggtgtttttaagggggtctaagcctgccttttcaatgatttaatttgattttattttatccgtcaaatctcttaagtaacaacacattaagtgtgaattacttttctctcattgtttcctgaattattcgcattggtagaaatatattagggaaagaaagtagccttctttttatagcaagagtaaaaaagtctcaaagtcatcaaataagagcaagagttgatagagcttttacaatcaatactcacctaattctgataaaaggaatactgcaatgttagcaataagtttttttcttctgtaatgactctacgttatcctgtttccctgtgcctaccaaacactgtcaatgtttattacaaaattttaaagaagaatatgtaacatgcagtactgatattataattctcattttactttcattatttctaataagagattatgtgacttctttttcttttagttctattctacattcttaatattgtatattacctgaataattcaatttttttctaattgaatttcctattagttgactaaaagaagtgtcatgtttactcatatatgtagaacatgactgcctatcagtagattgatctgtatttaatattcgttaattaaatctgcagttttatttttgaaggaagccataactatttaatttccaaataattgcttcataaagaatcccatactctcagtttgcacaaaagaacaaaaaatatatatgtctctttaaatttaaatcttcatttagatggtaattacatatccttatatttactttaaaaaatcggcttatttgtttattttataaaaaatttagcaaagaaatattaatatagtgctgcatagtttggccaagcatactcatcatttctttgttcagctccacatttcctgtgaaactaacatcttattgagatttgaaactggtggtagtttcccaggaaggcacaggtggagtt

SEQ ID NO: 286995 - DNA, 1000 bp, Homo Sapiens; identical to SEQ ID NO: 116468

SEQ ID NO: 286996 - DNA, 1000 bp, Homo Sapiens; identical to SEQ ID NO: 221735

SEQ ID NO: 286997 - DNA, 1000 bp, Homo Sapiens
gggtggccgccctggctctggcccacaactgggcactggccgagggaccctgcggctccgatcccggggccccgccacggtggaggatctgccctctgcctttgaagagaaggccattgagaaggtggatgacctgctggagagttacatgggtatcagggacacggagctggcggccaccatggtggagctgggaaaggacaaaaggaacccggatgagctggccgaggccctggacgaacggctgggtgactttgccttccctgacgagttcgtctttgacgtctggggcgccattggggacgccaaggtcggccgctactaggactgcccccggaccctgcgatgatgacccgggcgcaacctggtgggggcccccagcagggacactgacgtcaggacccgagcctccagcctgagcctagctcagcagcccaaggacgatggtgaggggaggtggggccaggccccctgccccgctccaatcggtaccatcccctccctggttcccagtctggccggggtccccggcccccctgtgccctgttccccacctacctcagctgggtcaggcacagggaggggagggatcagccaaattgggcggccacccccgcctccaccactttccaccatcagctgccaaactggtccctctgtctccctggggccttgggttctgtttgggggtcatgaccttcctagtttcctgacgcagggaatacaggggagagggttgtccttccccccagcaaatgcaataatgccctcacccctcctgagaggagccccctccctgtggagcctgttacctccgcatttgacacgagtctgctgtgaaccccgcaacctcctccccacctcccatctctccttccaggcccatccctggcccagagcaggagggagggagggacgatggcggtgggtttttgtatctgaatttgctgtcttgaacataaagaatctatctgctgttggaaaaaaaaaaaaaaaaaaa

SEQ ID NO: 286998 - DNA, 1000 bp, Homo Sapiens; identical to SEQ ID NO: 116469

SEQ ID NO: 286999 - DNA, 1000 bp, Homo Sapiens
actttgtgatccacttcatggaggagattgacaaggagatcagtgagatgaagctgtcagtcaatgcccgtgcccgcattgtggctgaagagttccttaagaatttttaaaccatctggctggatctcgtggccttccccctcagactacccatgtctccacgaaggcgtcctggagtcactccccgagcagcgcggcggcggcagggagttgggttggggtgggcatttgatgcgggaggtgggtggtgtgcttgctagctgggcaagaaagcagcagtggacctgccccaaggccacacgtgcctggtcaggctggcttctgatgttcagtcccctgggccgggacagattttttttaacgtcttgaaacttaaactctgtgcttgtaggatactgtaacctttttgtctttttttttttttttttttttaaacctccacctccagtggctgtgactggtcccagtgattatacgttattggttgctgtgggtctgggcgggcctggagccagaaggcgacttattttttctctcctatgccaccccaggtggggagggagggaggtttcagactccagtttctcccttgcccttttattcccaagcctccttggccccagtataagtgttgggaactctctgccagcttcctgagttctgcctaaagatggccccccagcactggttggggacaagggccaaattggtgaccaccagtcatgcctaggacctggggcccaaaagccgggcaacctctggctacaggggccattgggtgccctcccagttgagaggggccgctgtttcgccttgtccgtcagtgccagtgcctgtgccagaggtggcgaggtgagtcctccagagcttcctggccgggccctcctcctgcctgttctggctcctctgctcccacgctagctgtcccttttctgattctggtggatcctccctcccctaattaaagtctctttttgcccctttggggctgcatgaggtc

SEQ ID NO: 287000 - DNA, 912 bp, Homo Sapiens
cgcttccgcctacctcgcccaggctgccagaccggaagcgctccgctgtacctggatcctgctcctctgggttgaaacccgggcgccgccaagatgccggcttaccactcttctctcatggatcctgataccaaactcatcggaaacatggcactgttgcctatcagaagtcaattcaaaggacctgcccccagagagacaaaagatacagatattgtggatgaagccatctattacttcaaggccaatgtcttcttcaaaaactatgaaattaagaatgaagctgataggaccttgatatatataactctctacatttctgaatgtctgaagaaactgcaaaagtgcaattccaaaagccaaggtgagaaagaaatgtatacgctgggaatcactaattttcccattcctggagagcctggttttccacttaacgcaatttatgccaaacctgcaaacaaacaggaagatgaagtgatgagagcctatttacaacagctaaggcaagagactggactgagactttgtgagaaagttttcgaccctcagaatgataaacccagcaagtggtggacttgctttgtgaagagacagttcatgaacaagagtctttcaggacctggacagtgaagggagcccgggcagccaccgtctccagagccctgggcagcattttccagcaagatgtacacaatcttttgcctttatttcgtaaagttttatacagaagagagaagagcatgtctttacttgaaaaactcttgatcaagaatttgggtgggagaaaagaaagtgggttatcaagggtgatttgaaattttctgcagcattaaagctggcgcttaataagaataagtaataataaagaaatttctaacattccaaaaaaaaaaaaaaaaaaaaaaaaaaaaa

SEQ ID NO: 287001 - DNA, 1000 bp, Homo Sapiens
cgtcctcagcctggactggcaccccaacaatgtgctgctggctgccggctcctgtgacttcaagtgtcggatcttttcagcctacatcaaggaggtggaggaacggccggcacccaccccgtggggctccaagatgccctttggggaactgatgttcgaatccagcagtagctgcggctgggtacatggcgtctgtttctcagccagcgggagccgcgtggcctgggtaagccacgacagcaccgtctgcctggctgatgccgacaagaagatggccgtcgcgactctggcctctgaaacactaccactgctggcgctgaccttcatcacagacaacagcctggtggcagcgggccacgactgcttcccggtgctgttcacctatgacgccgccgcggggatgctgagcttcggcgggcggctggacgttcctaagcagagctcgcagcgtggcttgacggcccgcgagcgcttccagaacctggacaagaaggcgagctccgagggtggcacggctgcgggcgcgggcctagactcgctgcacaagaacagcgtcagccagatctcggtgctcagcggcggcaaggccaagtgctcgcagttctgcaccactggcatggatggcggcatgagtatctgggatgtgaagagcttggagtcagccttgaaggacctcaagatcaaatgacctgtgaggaatatgttgccttcatcctagctgctggggaagcggggagaggggtcagggaggctaatggttgctttgctgaatgtttctggggtaccaatacgagttcccataggggctgctccctcaaaaagggaggggacagatggggagcttttcttacctattcaaggaatacgtgcctttttcttaaatgctttcatttattgaaaaaaaaaaaaaatgcccccaaagcactatgctggtcatgaactgcttcaaaatgtggaggtaataaaatgcaactgtgtaaaaaaaaaaaaaaaaaaaaaa

SEQ ID NO: 287002 - DNA, 1000 bp, Homo Sapiens; identical to SEQ ID NO: 116470

SEQ ID NO: 287003 - DNA, 1000 bp, Homo Sapiens
cagagcttggcttttgaaacacaactcagggcttttgtgaaggttcccccgctgagatctttcctcctggttactgtgaagcctgttggtttgctgctgtcgtttttgaggagggcccatgggggtaggagcagttgaacctgggaacaaacctcacttgagctgtgcctagacaatgtgaattcctgtgttgctaacagaagtggcctgtaagctcctgtgctccggagggaagcatttcctggtaggctttgatttttctgtgtgttaaagaaattcaatctactcatgatgtgttatgcataaaacatttctggaacatggatttgtgttcaccttaaatgtgaaaataaatcctattttctatggaagactggtacctggtttctggaagaggggtctgtgacttggagctgatctttactgagctcgccgtggcagatgccatgctcaggacgttcatgtggatggtttcatgtcatcgtgctggcaacttgtcctccctgccttagagatgaggctcagacaaacgaccttagcacccatagcctatgccatgagcactggctccaccctgaatcccagctcctccccttagtgaccccaagtctgtttccctcagctgcataaggaggcgatatagtttgaatatttgtccccagccaaatctcatgttgaactgtaatccccagtgctggaggtggggcctgctacgaggtgtttggatcatggggacgggtatttcatggcttggtgctgttttcttgatggtgaattattgcaagatacggtcatttaaaattgtgtggcacctccccctgcccccttcttgctcctgctttcaccatgtgacatgcctgatcccccttcaccttttgccatggtcataagcttcctgaggcctccctggaagctgagcagatgccagcaccatgcttcctgtacatcctgcagaaccataagccaattaaacctttttaataataaaaaaaaaaaaaaa

SEQ ID NO: 287004 - DNA, 1000 bp, Homo Sapiens; identical to SEQ ID NO: 221736

SEQ ID NO: 287005 - DNA, 1000 bp, Homo Sapiens
aagagctagaagctctcttgcaggaagccagacaacagtcagtggcccatcagcaatcagggtctgaattggccctacggcggtcacaaaggttggcagcttctgcctccacccagcagcttcaggaggttaaagctaaattacagcagtgcaaagcagagctaaactctaccactgaagagttgcataagtatcagaaaatgttagaaccaccaccctcagccaagcccttcaccattgatgtggacaagaagttagaagagggccagaagaatataaggctgttgcggacagagcttcagaaacttggtgagtctctccaatcagcagagagagcttgttgccacagcactggggcaggaaaacttcgtcaagccttgaccacttgtgatgacatcttaatcaaacaggaccagactctggctgaactgcagaacaacatggtgctagtgaaactggaccttcggaagaaggcagcatgtattgctgagcagtatcatactgtgttgaaactccaaggccaggtttctgccaaaaagcgccttggtaccaaccaggaaaatcagcaaccaaaccaacaaccaccagggaagaaaccattccttcgaaatttacttccccgaacaccaacctgccaaagctcaacagactgcagcccttatgcccggatcctacgctcacggcgttcccctttactcaaatctgggccttttggcaaaaagtactaaggctgtggggaaagagaagagcagtcatggccctgaggtgggtcagctactctcctgaagaaataggtctcttttatgctttaccatatatcaggaattatatccaggatgcaatactcagacactagcttttttctcacttttgtattataaccacctatgtaatctcatgttgttgtttttttttatttacttatatgatttctatgcacacaaaaacagttatattaaagatattattgttcacattttttattgaaaaaaaaaaaaaa

SEQ ID NO: 287006 - DNA, 1000 bp, Homo Sapiens; identical to SEQ ID NO: 221737

SEQ ID NO: 287007 - DNA, 1000 bp, Homo Sapiens
ttcctgcttgaaacccaattcttatatgaaattttttaaaagcagaaacctagcagcccatctgctttttctcttttgtcggtgtatttggtacccctccaatgctggtctttttgtagaaactcagtagagaaagtctagctaagcagtgttgaaaagcctgcaagatttcagtttacatatcgacagcatatccactgatttctaaatgggctggtcccatcatctgaagattctgtatagaattattaaaaaaaaaatccatctttctttattttcttcacatgcgacaatttcttaagcactttgacattttggtagttccacactattgagagaataatatatttattttgtgacattgcagatgccaaatactgtaaccttctcatgataacaatacttaggttcaagatcactgttcaaaccctgtcatgctttaaaactgatgcgagatgattttgttttttgcataatcaatacttaagggtgcaatcaactgttagtaattgtgcagtaaagtaaagccctgtggtgtatcaactactagttaagagtctcagttgatttctgtaatgtttgacctaataatagcccgtttcgtctctgacccaacagaggaagcacagatcaaatcaccttggagtggtcaccagggggacagggagccccccaccaatgtatcaatgggtgatttatgatgccttctgccctttggcgagtgaatgggtttcccataggggaagttggcctccctccgtgagctttggaaatgttttctaatagacacagggaggccagttctgtttcagagcaattatcttcccaaattctctgttctggtgttggaactgtgtgccctggtttctgttttcctttctactgctgtaattctctgtctcatcatccttctcttttgtttccatagccttttataatgcatatatgatgctgtgaacagaaataaattatttatacaatcaaaaaaaaaaaaaaaaaa

SEQ ID NO: 287008 - DNA, 1000 bp, Homo Sapiens
ttgatgaaagatcagttcccatttgagttcctccttgcactgagttttagtgatatagaactagcttgtagttagtgtttcattacattataaagaatagttttacacacgtatttaccgttttccaaatttaaactcagaaatacccaaagcaggcctgcttaagcccactacctggcatataaacttatagtaacactttgttactttctttttaataggacaagcatgagttaggacaaactctaaaaattcatattcttcactattcttgttttcctttgattgatatagaccaaagatggtgtactctaattttttaaaacagtaatggaacacaatttttttcattcttcctcctctccattcgaagtaaagatccccagttagtttttatataaataatctatagggattcaaaaggtgtcacagtccacttaattagtcaaattagcaatggctaaacagtatcaagtactgcagaatttatcactgaaatggataagaggaaatagtttagtcacaggtttttacagtccagcaagggccaaagaggtatagtatacaagttaatagtatttgtgttgagcaacatggggctagtgggatcacagaaatctggaaaaaaaaaaaaaaaggctttggcttatcaagcctagtgtaaatttctgcatctcacacgactttagtttggccaggtatttatctgccaaaacaaggacaaatcttgttgtattaacagcagggtcacttctcattttctttgctgacttacctttttactgaccgttgtgaatttctgtctcaaaatgtataatatagaaatgcaagaaaaaaacaaatgtacagattgtaaagttttttgatacctaatgtaagttttctttgtgtaatatttatatgataaaagacattaggatccctacaaaaaaaaaaaaaaaaaaaaaaaaaaaaaaaaaaaaaaaaaaaaaaaaaaaaaaaaaaaaaaaaaaaaaaaaaa

SEQ ID NO: 287009 - DNA, 1000 bp, Homo Sapiens; identical to SEQ ID NO: 116474

SEQ ID NO: 287010 - DNA, 1000 bp, Homo Sapiens; identical to SEQ ID NO: 116475

SEQ ID NO: 287011 - DNA, 963 bp, Homo Sapiens
tcctatcatcacaaaactcatgatgctccggctgctcagttccctcctccttgtggccgttgcctcaggctatggcccaccttcctctcactcttccagccgcgttgtccatggtgaggatgcggtcccctacagctggccctggcaggtttccctgcagtatgagaaaagtggaagcttctaccacacgtgtggcggtagcctcatcgcccccgattgggttgtgactgccggccactgcatctcgagggatctgacctaccaggtggtgttgggtgagtacaaccttgctgtgaaggagggccccgagcaggtgatccccatcaactctgaggagctgtttgtgcatccactctggaaccgctcgtgtgtggcctgtggcaatgacatcgccctcatcaagctctcacgcagcgcccagctgggagatgccgtccagctcgcctcactccctcccgctggtgacatccttcccaacaagacaccctgctacatcaccggctggggccgtctctataccaatgggccactcccagacaagctgcagcaggcccggctgcccgtggtggactataagcactgctccaggtggaactggtggggttccaccgtgaagaaaaccatggtgtgtgctggagggtacatccgctccggctgcaacggtgactctggaggacccctcaactgccccacagaggatggtggctggcaggtccacggtgtgaccagctttgtttctggctttggctgcaacttcatctggaagcccacggtgttcactcgagtctccgccttcatcgactggattgaggagaccatagcaagccactagaaccaaggcccagctggcagtgctgatcgatcccacatcctgaataaagaataaagatctctcagaaaattccaaaaaaaaaaaaaaaaaaaaaaaaaaaaaaaaaaaaaaaaaaaaaaaaaaaaaaaaaa

SEQ ID NO: 287012 - DNA, 1000 bp, Homo Sapiens; identical to SEQ ID NO: 220787

SEQ ID NO: 287013 - DNA, 1000 bp, Homo Sapiens; identical to SEQ ID NO: 116478

SEQ ID NO: 287014 - DNA, 1000 bp, Homo Sapiens
ctaaagctccttttggagatgatataggatgtgaaatacagaaacctcagtgaaatcaagaaataatgatcccagccagactgagaaaatgtaagcagacagtgccacagttagctcatacagtgcctttgagcaagttaggaaaagatgcccccactgggcagacacagccctatgggtcatggtttgacaaacagagtgagagaccatattttagccccactcaccctcttgggtgcacgacctgtacagccaaacacagcatccaatatgaatacccatcccctgaccgcatccccagtagtcagattatagaatctgcaccaagatgtttagctttataccttggccacagagagggatgaactgtcatccagaccatgtgtcaggaaaattgtgaacgtagatgaggtacatacactgccgcttctcaaatccccagagcctttaggaacaggagagtagactaggattccttctcttaaaaaggtacatatatatggaaaaaaatcatattgccgttctttaaaaggcaactgcatggtacattgttgattgttatgactggtacactctggcccagccagagctataattgttttttaaatgtgtcttgaagaatgcacagtgacaaggggagtagctattgggaacagggaactgtcctacactgctattgttgctacatgtatcgagccttgattgctcctagttatatacagggtctatcttgcttcctacctacatctgcttgagcagtgcctcaagtacatccttattaggaacatttcaaaccccttttagttaagtctttcactaaggttctcttgcatatatttcaagtgaatgttggatctcagactaaccatagtaataatacacatttctgtgagtgctgacttgtctttgcaatatttcttttctgatttatttaattttcttgtatttatatgttaaaatcaaaaatgttaaaatcaatgaaataaatttgcagttaaga

SEQ ID NO: 287015 - DNA, 1000 bp, Homo Sapiens; identical to SEQ ID NO: 116479

SEQ ID NO: 287016 - DNA, 1000 bp, Homo Sapiens; identical to SEQ ID NO: 116480

SEQ ID NO: 287017 - DNA, 1000 bp, Homo Sapiens
ctatgagatatcaaatggatccactataaaagtctttaagaagatagcaaattttacttcagatgtggagtactcggatgaccactgccatttgattttaccagattcggaagcattccaagatgtgcaaggaaagagacatcgagggaagcacaagttcaaagtaaaagaaatgtatctgacaaagctgctgtcgaccaaggtggcaattcattctgtgcttgaaaaactttttagaagcatttggagtttacccaacagcagagctccatttgctataaaatacttttttgactttttggacgcccaggctgaaaacaaaaaaatcacagatcctgacgtcgtacatatttggaaaacaaacagccttcctcttcgcttctgggtaaacatcctgaagaaccctcagtttgtctttgacattaagaagacaccacatatagacggctgtttgtcagtgattgcccaggcattcatggatgcattttctctcacagagcagcaactagggaaggaagcaccaactaataagcttctctatgccaaggatatcccaacctacaaagaagaagtaaaatcttattacaaagcaatcagggatttgcctccattgtcatcctcagaaatggaagaatttttaactcaggaatctaagaaacatgaaaatgaatttaatgaagaagtggccttgacagaaatttacaaatacatcgtaaaatattttgatgagattctaaataaactagaaagagaacgagggctggaagaagctcagaaacaactcttgcatgtaaaagtcttatttgatgaaaagaagaaatgcaagtggatgtaagcactctggggcctggcttaatctggcaaagttcttcagacgacttgggagcaaaatggctgcttgagctactctgtgtcgttaatttgttgtttgcacataggttccactttgggcactgtctttttaagagaccaaggcacatgcacagcttttagaaagcaa

SEQ ID NO: 287018 - DNA, 1000 bp, Homo Sapiens
tgccactgagggccctgagaccaaacctgtgcttatggctcttgcggagggtcctggtgctgagggtccccgcctggcctcacctagtggcagcaccagctcagggctggaggtggtggctcctgagggtacctcagccccaggtggtggcccgggaaccctggatgacagtgccaccatttgccgtgtctgccagaagccaggcgatctggttatgtgcaaccagtgtgagttttgtttccacctggactgtcacctgccggccctgcaggatgtaccaggggaggagtggagctgctcactctgccatgtgctccctgacctgaaggaggaggatggcagcctcagcctggatggtgcagacagcactggcgtggtggccaagctctcaccagccaaccagcggaaatgtgagcgtgtactgctggccctattctgtcacgaaccctgccgccccctgcatcagctggctaccgactccaccttctccctggaccagcccggtggcaccctggatctgaccctgatccgtgcccgcctccaggagaagttgtcacctccctacagctccccacaggagtttgcccaggatgtgggccgcatgttcaagcaattcaacaagttaactgaggacaaggcagacgtgcagtccatcatcggcctgcagcgcttcttcgagacgcgcatgaacgaggccttcggtgacaccaagttctctgctgtgctggtggagcccccgccgatgagcctgcctggtgctggcctgagttcccaggagctgtctggtggccctggtgatggcccctgaggctggagcccccatggccagcccagcctggctctgttctctgtcctgtcaccccatccccactcccctggtggcctgactcccactccctggtggccccatcccccagttcctcacgatatggtttttacttctgtggatttaataaaaacttcaccagttaaaaaaaaaaaaaaaaaaaaaaaaaaaaaa

SEQ ID NO: 287019 - DNA, 1000 bp, Homo Sapiens
gcatttcttctgctcacactttgttgcgggggacactgagatataagggatatatgaaagctttgaatggatttgtaaaattaggtcttataaacagagaagcgcttcctgcctttagacctgaggccaaccctctcacctggaaacaactcctctgtgacctagttgggatttcaccctcctctgagcatgatgtgttgaaggaagctgttcttaagaaactaggaggagacaatacccagttggaggctgctgaatggttgggcttacttggggatgaacaagttcctcaggcagagtccattctggatgccctctccaagcatttggtcatgaagctttcctatggtcctgaagaaaaagatatgattgtgatgagagacagctttggaatcagacatccttctggacatttagaacataaaacgattgatcttgtggcttatggggacatcaatggcttttcagccatggctaaaaccgtggggttacccaccgccatggcagccaaaatgttgcttgatggtgaaattggagccaaaggcctaatggggcccttttcaaaggagatctatggaccaatattggagcgaattaaagcagaaggcattatatatactacacagagtacaattaaaccataattgggaattatattttgtttttttcttcccaggcaatacacctctgaacatgtgtgtgataaatgggtttgctaatgtgctgttttaaagtataaagcataatatgttttggttaacacaatgtactttttgaactataaatctttattttaatatggaaatgtttggaacaggagatgcaagccactaacagagaactttaataattctaccctgtattttataaatacgtatgtgaaagtgatgatcatgctatttgttaatttattgtgccactttttttcttttgttttttttttgttgttgttgttttttgagatggagtctcgctctgtcacccaggctggagtgcagtg

SEQ ID NO: 287020 - DNA, 1000 bp, Homo Sapiens
gacaggctgccaggctcattcaagagagccccaccctgagcaagctggccgccattactgtcctccagcccttctactatttggtgcaacagaccatccactggctcttcatgggttactccatgactgccttctgcctcttcacgtgggacaaatggcttaaggtgtataaatccatctatttccttggccacatcttcttcctgagcctactattcatattgccttatattcacaaagcaatggtgccaaggaaagagaagttaaagaagatggaataatccatttccctggtggcctgtgcgggactggtgcagaaactactcgtctcccttttcacagcactcctttgccccagagcagagaatggaaaagccagggaggtggaagatcgatgcttccagctgtgcctctgctgccagccaagtcttcatttggggccaaaggggaaacttttttttggagaaggcgtcttgctttgtcacccacgctggaatgcagtggcgggatctcagctcaccgcaacctccacctcctgggttcaagtgattttcctgcctcagcctcccaagtagctgggaatacaggcacgccaccatgcccagctaatttttgtattttcagtagaaacgggatttcaccacgttggccaggctggtctcgaactcctgaccgcaagtgatccacccgcctccgcctcccaaagtgctgggattacaggcgtgagccaccgtgcccggcccaaaggggaaactcttgtgggaggagcagaggggctcacatctcccctctgattcccccatgcacattgccttatctctccccatctagccaggaatctattgtgtttttcttctgccaatttactatgattgtgtatgtgccgctaccaccaccccccccatgggggggtggagaggggtgcaaggccctgcctgctccactttttctaccttggaactgtattagataaaatcacttctgtttgttcagtttttca

SEQ ID NO: 287021 - DNA, 1000 bp, Homo Sapiens; identical to SEQ ID NO: 221740

SEQ ID NO: 287022 - DNA, 1000 bp, Homo Sapiens; identical to SEQ ID NO: 116483

SEQ ID NO: 287023 - DNA, 1000 bp, Homo Sapiens
gaatgcagatattctagcatattgtcagaaggaaggatggtgcaaattagctttttatcttctagcatttttttactacctatatggcatgatctatgttttggtgagctcttagaacaacacacagaagaattggtccagttaagtgcatgcaaaaagccaccaaatgaagggattctatccagcaagatcctgtccaagagtagcctgtggaatctgatcagttactttaaaaaatgactccttattttttaaatgtttccacatttttgcttgtggaaagactgttttcatatgttatactcagataaagattttaaatggtattacgtataaattaatataaaatgattacctctggtgttgacaggtttgaacttgcacttcttaaggaacagccataatcctctgaatgatgcattaattactgactgtcctagtacattggaagcttttgtttataggaacttgtagggctcattttggtttcattgaaacagtatctaattataaattagctgtagatatcaggtgcttctgatgaagtgaaaatgtatatctgactagtgggaaacttcatgggtttcctcatctgtcatgtcgatgattatatatggatacatttacaaaaataaaaagcgggaattttcccttcgcttgaatattatccctgtatattgcatgaatgagagatttcccatatttccatcagagtaataaatatacttgctttaattcttaagcataagtaaacatgatataaaaatatatgctgaattacttgtgaagaatgcatttaaagctattttaaatgtgtttttatttgtaagacattacttattaagaaattggttattatgcttactgttctaatctggtggtaaaggtattcttaagaatttgcaggtactacagattttcaaaactgaatgagagaaaattgtataaccatcctgctgttcctttagtgcaatacaataaaactctgaaattaagactc

SEQ ID NO: 287024 - DNA, 1000 bp, Homo Sapiens; identical to SEQ ID NO: 116484

SEQ ID NO: 287025 - DNA, 1000 bp, Homo Sapiens; identical to SEQ ID NO: 116485

SEQ ID NO: 287026 - DNA, 1000 bp, Homo Sapiens
attaattgtataagggtttttgtatagttttcaaacatctgtggtgtaatgatctttgttaaacatatattctgtaaagtgccatagtctttttttatgtgtagcatatttaaaaatatatatgtatattatacatacacaagtttgtgtgaaagatgtgcaataacaaaggtgtatgtatgttttgttgttttgttttggaaactggacaggagtcaaaacagggatgtttgtttctgttttggcaaggagagttccacatttttgccttcatggcttattcagtaacccataattttaatgctacacaaatcttatgtgaagaaaagactggtatgaaatcattttttcctgggtctaaaataatcgctagtgttatgtcaaagttaagcccgcacgccaggcccagttaatgctagtctttcatgtgaaatgtgaagctgccatgttgccttttctcttagtaggataactagtagctggtacataatcactgaggagctatttcttaacatgcttttatagaccatgctaatgctagaccagtatttaagggctaatctcacacctccttagctgtaagagtctggcttagaacagacctctctgtgcaataacttgtggccactggaaatccctgggccggcatttgtattggggttgcaatgactcccaagggccaaaagagttaaaggcacgactgggatttcttctgagactgtggtgaaactccttccaaggctgagggggtcagtaggtgctctggagggactcggcaccacttgatattcaacagccacttgagccaaatataaaattgtatttacagctgatggactcaatttgagccttcaaacttgtagttatcctattatattgtaaactaatacattgtctagcattgatttggttcctgtgcatatgtattttcactatgtgctcccctccccagatcttaattaaaccagattttgcaattcaaaaaaaaaaaaaaaaaaaa

SEQ ID NO: 287027 - DNA, 1000 bp, Homo Sapiens
atttttgaagctgaatgtggaaaaagcacctttcctttgtgagagactgcatatcaaagtcattcccacactagcactgctaaaagatgggaaaacacaagattatgttgttgggtttactgacctaggaaatacagatgacttcaccacagaaactttagaatggaggctcggttcttctgacattcttaattacagtggaaatttaatggagccaccatttcagaaccaaaagaaatttggaacaaacttcacaaagctggaaaagaaaactatccgaggaaagaaatatgattcagactctgatgatgattagagctcaataattctttgtaaattgtctttttttttctgcttcagatttaaatgtgtttttaaaattctattaatgtctatacattggtcacctaaatactcatattctcgagttttatacagttgtatcacatcgaaaagtgtctttactgttttctgtgtggccatcatgtttaagttgaggaaaactcagttcttaaattatctgggaagggtctggattctctatttttgagattgactttatcacaatatgattcttacatctttataccatttacaattgtgttttagatctacagagttagaaattcgaaaactattccaggactaattcttaatcggcattatttatacaagaggtcaagtaacatttactagcgcaatactgcacttgtaaatgaattataaacgctcttctggaatatatttaaataaccattaaagaactgcttattcattctggacactgcatgttgatgttgaatcaactgatgccagcagaaagctattttgatttgtgaacatactgccttatttaaagggtcctgattgcttgtattttaagacattcattaaaaagaaaccaggaaacacttttgaaataacagcataaggaacttcactgtctctgctcaataaaatacctgtaactggaaaaaaaaaaaaaaaaaaaaaaaaaaaa

SEQ ID NO: 287028 - DNA, 1000 bp, Homo Sapiens
gaaaggaaaaaagaaaaaaaaatcaaacttgaaacttttcttttgatgttcctattgtgggggttctggatagggtgggacagggatgggggtgtgttttatattttttccttttcagcacaacctttggctttaatataggaagagccaagggagtcctcggctgaacttacgatatctgccccaaacctctgtaaccccaactgaaatgaggagcttcctctcttcctgtgaaggatatgacagtccagcatcgatgcctgtgccctctggaaaaatttcctcctagcccttccagggccttatcataaaactctggatttagagtattcattttgaaggcaactcccccttccccaagtttccttggagctgtatagctgggttctaagcttcaccatgcaaatcagaaattttatctctaagtacaggctgtgccgtgtctcacccacacccccctggggacttcagttccatttcaggttacctggggtataccttgatccctagagtgactggcagagtaagagaaggggagagataataggtgtgattattttaatatggaggtgggagtgtggttggagatagaaaggctcctccccaccatgtaatggcttcctctcagaattttattccaggctagcttgctgcaggtctgggtagttggatcatggctccactgggattggggtggaaagcttgaggggagtagggttccagctctgggacattgtgctcaggaatttgaaaacgctgctatacttactctggttactacatttcttccactcccctttcccctacctgccttaaccaaggctcatactgtcctgtccttaccctcagatggagccaggaagctcagtgaaaggcttccctaccctttgcactagtgtctctgcaggttgctggttgtgttgtatgtgctgttccatggtgttgactgcactaataataaaccttttactcaactctctaaaaaaaaaaaaaaaaaaaa

SEQ ID NO: 287029 - DNA, 1000 bp, Homo Sapiens
catattttgtatatttatatgctctctgtccgatctgtgcatgttatttttctttttccgtgagtcaaagtctgacctttattttcaacatctgttcttggtgttaagctatcttttgtaggaaatagtggggcacactactcagagacattatttagcagtaaagaaagacacaaataacaatgataaaaagacatcctaaaatggtgaagttgccatgacaataaaggtcatagaacctggtagtgtcaaatttaaccctttgaggactgtaattgcatttctgtgcctttcacttgaaaaaaaaaaaagaagaaaaaaaggcttaaaggcatttcattcagatcaaaagctgtgtcagacacaaaacttatttaataattaaaaaatgagcttttatatgcagaactggtttgtgaggaaacatgcatgcagctgtgggaagatagaaagctgtctaggactcacggggttcggaagccacacctctacatgtctaaaacaaaaaacaacaacaacagataccccactcgccactatgcccaaaccctctggatgctgaaaaatgccactttcggcaaaaaaaaaagtatgcaagctattatttaaaaatgtgtaaaaatgctatttcttttttcctgtaaaatattgcagtttatagttatttacaaatgtaagctttggtacaagctgacctttctatagcgtgctgcattggtaaatgaaaaaaaatggggcaaacgttggagtcctttccttgtaaattgccagcatcagcttaaaaactcctgtatgttacatatcgtaccattttaatctcttcaactttctttgtaccttctggctgtatgctttctcttttaactttttatattgtcattttatattaaatttctgtgtatataatgtaaaaccacaatttttgaataaaatttagttcctgcagcttgaaaaaaaaaaaaaaaaaaaaaaaaaaaaaaaaaaaaaaaaaaaaaaaaaa

SEQ ID NO: 287030 - DNA, 1000 bp, Homo Sapiens; identical to SEQ ID NO: 221742

SEQ ID NO: 287031 - DNA, 1000 bp, Homo Sapiens; identical to SEQ ID NO: 221743

SEQ ID NO: 287032 - DNA, 1000 bp, Homo Sapiens
gcagcttcagggggaagtgacagcacagaagaggccagagaacagcctcctggaggagaccctacactttgaccatgctgtccggatggcacctgtgattacagaggaaaccacccttcaactggaagatatcattaaacagaggataagagatcaggcttgggatgatgtagtacgtaaagaaaaacctaaagaggatgcatatgaatataaaaagcgtttaaccttagaccatgagaagagtaaattgagccttgctgaaatttatgaacaggagtacatcaaactcaaccagcaaaaaacagcagaagaagaaaatccagaacatgtagaaattcagaagatgatggattccctcttcttaaaattggatgccctctcaaacttccactttatccctaaaccgcctgtaccagagattaaagttgtgtcaaatctgccagccataaccatggaggaagtagccccagtgagtgttagtgatgcagctctcctggccccagaggagatcaaggagaaaaataaagctggagatataaaaacagctgctgaaaaaacagctacagacaagaaacgagagcgaaggaaaaagaaatatcaaaagcgtatgaaaataaaagagaaggagaagcggagaaaactgcttgaaaagagcagtgtagatcaagcagggaaatacagcaaaacagtagcttcggagaagttaaaacagctgaccaaaactggcaaagcttccttcataaaggatgaaggtaaagacaaggccttaaagtcctctcaagcattcttttctaaattacaagatcaagtaaaaatgcaaatcaatgatgcaaagaaaacagaaaagaaaaagaagaaaagacaggatatttctgttcataaattaaagctgtaatatattttgaatataatgtaaatattaatgtgtaagcttatattgtgtcattgttctgttttataataaaattcttgagaaccttaaaaaaaaaaaaaaaaaaaa

SEQ ID NO: 287033 - DNA, 1000 bp, Homo Sapiens; identical to SEQ ID NO: 221744

SEQ ID NO: 287034 - DNA, 1000 bp, Homo Sapiens
gcagggggaggggctgagtgtggcgggcattgtgtgccacgtggggaaggctgaggaccgggagcagctggtggccaaggccctggagcactgtgggggcgtcgacttcctggtgtgcagcgcaggggtcaaccctctggtagggagcactctggggaccagtgagcagatctgggacaagatcctaagtgtgaacgtgaagtccccagccctgctgctgagccagttgctgccctacatggagaacaggaggggtgctgtcatcctggtctcttccattgcagcttataatccagtagtggcgctgggtgtctacaatgtcagcaagacagcgctgctgggtctcactagaacactggcattggagctggcccccaaggacatccgggtaaactgcgtggttccaggaattatcaaaactgacttcagcaaagtgtttcatgggaatgagtctctctggaagaacttcaaggaacatcatcagctgcagaggattggggagtcagaggactgtgcaggaatcgtgtccttcctgtgctctccagatgccagctacgtcaacggggagaacattgcggtggcaggctactccactcggctctgagaggagtgggggcggctgcgtagctgtggtcccaggcccaggagcctgagggggtgtctaggtgatcatttggatctggaggcagagtctgccattctgccagactagcaatttgggggcttactcatgctaggcttgaggaagaagaaaaacgcttcggcattctccttaggacttatctgcttgtagatttggctgatccaattaacatgtggggttcttggtgtgggtctggggagctgaaggattttatggagctggtgctttggaggaatcttaagggaaaggagtagaagctcaggcctttgaaggatttcagctcctcctctctgtaatttgtgctttaagcattttttttcctaaaataaactcaaatttatcctcaaaaaaaaaaaa

SEQ ID NO: 287035 - DNA, 1000 bp, Homo Sapiens; identical to SEQ ID NO: 116487

SEQ ID NO: 287036 - DNA, 1000 bp, Homo Sapiens; identical to SEQ ID NO: 116488

SEQ ID NO: 287037 - DNA, 1000 bp, Homo Sapiens; identical to SEQ ID NO: 221747

SEQ ID NO: 287038 - DNA, 1000 bp, Homo Sapiens; identical to SEQ ID NO: 116489

SEQ ID NO: 287039 - DNA, 1000 bp, Homo Sapiens; identical to SEQ ID NO: 116490

SEQ ID NO: 287040 - DNA, 1000 bp, Homo Sapiens
gttaaagtgagtatactgtggagaggacttccaaatgtggttacctcagctatatcactgcccaacatcagaaaacctgacggctatgattactatgccttttctaaagatcaatactataacattgatgtgcctagtagaacagcaagagcaattactactcgttctgggcagaccttatccaaagtctggtacaactgtccttagactgatgagcaaaggaggagtcaactaatgaagaaatgaataataaattttgacactgaaaaacattttattaataaagaatattgacatgagtataccagtttatatataaaaatgtttttaaacttgacaatcattacactaaaacagatttgataatcttattcacagttgttattgtttacagaccatttaattaatatttcctctgtttattcctcctctccctcccattgcatggctcacacctgtaaaagaaaaaagaatcaaattgaatatatcttttaagaattcaaaactagtgtattcacttaccctagttcattataaaaaatatctaggcattgtggatataaaactgttgggtattctacaacttcaatggaaattattacaagcagattaatccctctttttgtgacacaagtacaatctaaaagttatattggaaaacatggaaatattaaaattttacacttttactagctaaaacataatcacaaagctttatcgtgttgtataaaaaaattaacaatataatggcaataggtagagatacaacaaatgaatataacactataacacttcatattttccaaatcttaatttggatttaaggaagaaatcaataaatataaaatataagcacatatttattatatatctaaggtatacaaatctgtctacatgaagtttacagattggtaaatatcacctgctcaacatgtaattatttaataaaactttggaacattaaaaaaataaattggaggcttaaaaaaaaaaaaaaaaa

SEQ ID NO: 287041 - DNA, 1000 bp, Homo Sapiens
aaatagatgtttgttttttgtatttctcagtatggaaactaatgctgccactctcatccccgtcccaaccatctctgtcaaaaatatacctttttcatatgatattctgagctaatctgataaaatctatgccaatatatactattgcttgtgtactagagaagtacattattgctgtactcctctgtacattactgatccctgatggtatatttctatcctaacagtgtccctttgcagatcaagctttattctgaagaataaacctagctggcatgctggtgtgtacctgtagtcctagctatttgggaagctgaggtgggagggtcgcttgagcccaggagtttgaggctgcagtgagctatgattgtgccactgtactccagcctgggagatagagcaagactccatctctaaaaaaaaaaaaaaatgctaatgtgagaatataaattgtgggaaatgagtgagggcaaggtggtacttcctccttctgagctcttcacacgtaatgcaaaaacccggtcttaactgattttgttttttttctgagtatgcatatatgtggttgaatgaaccaatgtgtgattgtatcttttccattatgtgactgtttgacctgcatattaatttcaagatagcagtcaattcgataaggcattttcatagaggaaagtttacagaaacagtttatgtggttggatcaccaaattatcttaggtactaaggcctcaaaaataagaaaaactttattatttctcctcagtagagtttggacatacataaggagagaaggtacagtgatgaaggagaccataattctgtagtgttgatgatcctggattataatctttttctctttatctttcatagtttttttaaaaacatggactgtatcttatctaccactatatcccaaatacctaagatagtgcttacgttcagtgactattaaataaataaatggatgaattaaaaaaaaaaaaaaaaaaaaaaaaaaaaa

SEQ ID NO: 287042 - DNA, 1000 bp, Homo Sapiens; identical to SEQ ID NO: 116493

SEQ ID NO: 287043 - DNA, 1000 bp, Homo Sapiens
gccgtgagcgtgtcgccagcgcccgcgaggccctggaccacatggtggaatatgtggcccagaacacacctgtcacgtggctcgtgggaccctttgcccctggaatcactgagaaagccccggaggagaagaagtagggggagaggagaggactcagcgggccccgtctctataatgcagctgtgctctggagtcctcaacccggggctcatttcaaacttattttctagccactcctcccagctcttctgtgctgtccacttgggaagctaaggctctcaaaacgggcatcacccagttgacccatctctcagcctctctgagcttggaagaagcctgttctgagcctcaccctatcagtcagtagagagagatgtccagaaaaaatatctttcaggaaagttctcccctgcagaattttttttccttgttaaatatcaggaatataggccgggtgcggtggctcacacctgtaatcccagcactttgggaggctgaggcgggcggaacacctgaggtcaggtgttcgagaccagccaggccaacatggtgaaaccccgtctctactaaaaatacaaaaaaaaatgagccgggcatggtagcaggtgtctgttatcccagttaggaggctgaggcaagagaatctcttgaacctgagaggcggaggttgcagtgagccaagatcgcgccattgcactccagcctgggggacaagagtgagacttagtctcaaaaaaaaaaaaaaagaaaaaaaaatcagggatatagttcatatcccacttctttgtttacaccgatgtccctgaatatcagcctgtagctaatggacttgggatttctggtctaagtgggcctcctggggatggggtggtacactgagcttctgagcctcattgtagagtagaaaggtactggggcctgtgtggtaagccttgttgaaatgctctggtattcagtattgccttaataaacttcacccacaactgcatacaggcaaaaa

SEQ ID NO: 287044 - DNA, 1000 bp, Homo Sapiens; identical to SEQ ID NO: 116494

SEQ ID NO: 287045 - DNA, 1000 bp, Homo Sapiens
gtggtcagctggactccatactcccccaccagtcaccagcctggggaccgtggggctgcaaggacctcagcagcggtgtcccaagtttcctgacttcttccatcctctggaaatcagctgtgtttgctgaggataatggcctcaagatccatctgtgttcctacaaaagagatgatcttgttcttttttatgattgcacatcttttgttctaacgtttggtccttcaccttggttcctgacacaaggattcctaaatcccttggaattttctgcatgataggagcgtcctttgttctcatgaggtgactcttggtgggctccttatttggggactggtcaccaaaaatacctaactatggttggaagcttagtgctttcagccccattccccatcctctggggtggggagcagagctggagctcgatcatgcctgcgtgacaaagcctccagaaaaatccttgaaagacaggacatggagagctgctgggttggcgaacacatccatgtgccgggaggatggtgcaccccaactccacaaggacccttccagacctcaccctgtgtatctcttcatctggctgttcatttagcagctccgagggcaggcatggtggctcatgcctgtagtcccagcactttgggaggccgaggcaggtggttcatctaaggtctggagttcgagaccagcctggccaacatagcgagagcagctccggtggcgggaggagtggcagcggccaggcagcccagcttcgcgaaggctgtaggcacaccgcggccagcaggcacctggcacccaccttccctgctgccaggatgcccaagaaaaaggtcagctccaccgaaggggctgccatggaagagcccaagaggagatcagcgcaattgtcagctaaacctcctgcaaaagtggaagcgaagccgaaaaaggcagcagcgaaggataaattttcagacacaaaagtgcaaaaaaaaaaaaaaaaaaaaaaaaaaaaaaa

SEQ ID NO: 287046 - DNA, 1000 bp, Homo Sapiens
cccaagcctcagaaaaacacacaagaacaataacacagcaaacagattgagggattgttgtggtttttgactaaggtgtatgttagtttcatcagaaacttaaaacatagactgatcactcagaaattaaagtccgttttactgtgaatatagcaatatagtactggacacagtactggtgaaactgaggagagcattgcttgtaaaatcctgagtttccataaggaaaatgaaaactccttttaaaaataaaatctgaggagtgtacaataagcatatgctttgactttcctttgctgtggaggtttttggtttttcattgatgataaacgactacagacttagtagtggagaaatggtgtcctctagtggaagaaatagtagctccgctattcagatgcagagcactgcagcatccagcctttcaaagctgactcttctcaatcatctgtgggtcatttgacttgattttttaagctaccctgaatttccagaatgcaggttctaaagaaatctagatgagagaaagtatttgaaaatgatttttaaatgttttttaaaagacacatctgacatttttaacaacttagtaaaagttgaaatgaccattctgtgtagtcataaaagaaacacaatgaagtgtatggcctctggagttagtcttagtaaaacttattgctctgtgtcaatgttaacctgtctcagatcaagtaattccttcactaggttgggtttggggaggggggaaaagaggggcttttcctaggagaacgataagaaatggaaagactccttgaagtgttgcaagggaacctcctagcactgtgaaagtcagaatcgcctcagcatttccatgacgcacattatgcaaatctctttagcactattttaaggttgaaaactttaacaatgaaggggaaggggaagatttccaccaactgaatcatttgtgcacgtgtatagctcaaagagcttagacttcaaatatatctggtgaatg

SEQ ID NO: 287047 - DNA, 1000 bp, Homo Sapiens; identical to SEQ ID NO: 221751

SEQ ID NO: 287048 - DNA, 1000 bp, Homo Sapiens
cagtacaggccaaccccgacctgctgagcctgctcacggtgtctctggatcagtatcagacggaggatgagctgtaccagctgtccctgcagcgggagccgcgctccaagtcctcgccaaccagccccacgagttgcaccccaccaccccggcccccggtactggaggagtggacctcggctgccaaacccaagctggatcaggccctcgtggtggagcacatcgagaagatggtggagtctgtgttccggaactttgacgtcgatggggatggccacatctcacaggaagaattccagatcatccgtgggaacttcccttacctcagcgcctttggggacctcgaccagaaccaggatggctgcatcagcagggaggagatggtttcctatttcctgcgctccagctctgtgttgggggggcgcatgggcttcgtacacaacttccaggagagcaactccttgcgccccgtcgcctgccgccactgcaaagccctgatcctgggcatctacaagcagggcctcaaatgccgagcctgtggagtgaactgccacaagcagtgcaaggatcgcctgtcagttgagtgtcggcgcagggcccagagtgtgagcctggaggggtctgcaccctcaccctcacccatgcacagccaccatcaccgcgccttcagcttctctctgccccgccctggcaggcgaggctccaggcctccagagatccgtgaggaggaggtacagacggtggaggatggggtgtttgacatccacttgtaatagatgctgtggttggatcaaggactcattcctgccttggagaaaatacttcaaccagagcagggagcctgggggtgtcggggcaggaggctggggatgggggtgggatatgagggtggcatgcagctgagggcagggccagggctggtgtccctaaggttgtacagactcttgtgaatatttgtattttccagatggaataaaaaggcccgtgtaattaaccttca

SEQ ID NO: 287049 - DNA, 1000 bp, Homo Sapiens
gtagagctggctattcacagaggggggcacctttgggaccaccaagaggctctaggggtggcagagggggtcctgctcaacagcagagaggccgtggttcccgtggatctcggggcaatcgtgggggcaatgtaggaggcaagagaaaggcagatgggtacaaccagcctgattccaagcgtcgtcagaccaacaaccaacagaactggggttcccaacccatcgctcagcagccgcttcagcaaggtggtgactattctggtaactatggttacaataatgacaaccaggaattttatcaggatacttatgggcaacagtggaagtagacaagtaagggcttgaaaatgatactggcaagatacgattggctctagatctacattcttcaaaaaaaaaaattggcttaactgtttcatctttaagtagcattttgctgccatttgtattgggctgaagaaatcactattgtgtatatactcaagtctttttatttttcctcttttcataaatgctcttggacattattgggcttgcagagttcccttattctggggattacaatgcttttatcgtttcaggcttcattttagcttcaaaacaagctgggcacactgttaaatcatgattttgcagaacctttggttttggacagtttcatttttttggatttgggatagattacataggagtatggagtatgctgtaaataaaaatacaagctagtgctttgtcttagtagttttaagaaattaaagcaaacaaatttaagttttcttgtattgaaaataacctatgattgtatgttttgcattcctagaagtaggttaactgtgtttttaaattgttataacttcacacctttttgaaatctgccctacaaaatttgtttggcttaaacgtcaaaagccgtgacaatttgttctttgatgtgattgtatttccaatttcttgttcatgtaagatttcaataaaactaaaaaatctattcaaaacatta

SEQ ID NO: 287050 - DNA, 1000 bp, Homo Sapiens
cgtgttgcagacccttgcccacttcacccacctgcaccttctccccctctcacagtgtcactgctgctaatggtcaaagtcaaatgtgtggccacatgggatgggccaggtcctctcaggctactttctggatgtcatttttaaaatatggaaacatgcaggtgccttcccaaagaggcttggactggtatatccaacgagaaacaaataagctaaagaaagtttaaactcaagaagaaagatgttgacagtctatgtaacagctggaaagtttataggcacccacctttgggacaacccagtgattatgaacatgtgatatctactatttaaaagaaatgttctcaccttgggttgattgtggtataccatgtgttatgaaaattgttgagctgaagctttgaatcgatttagttgagtctgactcacttgctttggttcctgtgtattttactacccctcttgtcagtgaccttccttccccaccccacccagagtgaatttgtagcatgattgtataaacctctatgtagaaaatggagatttcttgctctgaaatgttaagctctaactgatccatttctgtgtcctttagcctagtatgtctgaacttccattcttgttatatatttaaactttccctctatattataggttttgtggcatccacggtcaggtgtagaggaagctgccccttgcagaactgtactgtaatatttttcttttataaatattttcacaggactgattgtacacagggcttgtaataaaattttaacactgtgctgtgaaacaactatggggaatctccattgaaggctacttcatgggcacctgaaagtggagtgttatagctatgactttctatttcttgtttcctaagtaaattaaacctaattttcaccctttcattctgtttcagcctcctgtataagaagtaccgtattttctgcccatcatactttgtaataaaacttgaacatgtatagattgactgaaa

SEQ ID NO: 287051 - DNA, 1000 bp, Homo Sapiens; identical to SEQ ID NO: 116496

SEQ ID NO: 287052 - DNA, 1000 bp, Homo Sapiens; identical to SEQ ID NO: 116497

SEQ ID NO: 287053 - DNA, 1000 bp, Homo Sapiens
tgaccagccccccaccatccccaagaacattccacacatcatcggcagccattggaaaccagctatatgtctttgggggcggagagagaggtgcccagcccgtgcaggacacgaagctgcatgtgtttgacgcaaacactctgacctggtcacagccagagacacttggaaatcctccatctccccggcatggtcatgtgatggtggcagcagggacaaagctcttcatccacggaggcttggcgggggacagattctatgatgacctccactgcattgatataagtgacatgaaatggcagaagctaaatcccactggggctgctccagcaggctgtgctgcccactcagctgtggccatgggaaaacatgtgtacatctttggtggaatgactcctgcaggagcactggacacaatgtaccagtatcacacagaagagcagcattggaccttgcttaaatttgatactcttctaccccctggacgattggaccattccatgtgtatcattccatggccagtgacgtgtgcttctgagaaagaagattccaactctctcactctgaaccatgaagctgagaaagaggattcagctgacaaagtaatgagccacagtggtgactcacatgaggaaagccagactgctacactgctctgtttggtgtttggtgggatgaatacagaaggggaaatctatgacgattgtattgtgactgtagtggactaataaaacccacatttttattacctgtcagttactttcagaatagttaagtaaaacattagctgttttatacctccaaaatatcttctgcattatatatctgtttttctcctactttggtaggtgaagaaactaatgcaaataattcttatgtgcactaaaccttgctatattgcctctcaaaaaaaaaaaaaaaaaaaaaaaaaaaaaaaaaaaaaaaaaaaaaaaaaaaaaaaaaaaaaaaaaaaaaaaaaaaaaaaaaaaaaaaaaaaaaa

SEQ ID NO: 287054 - DNA, 960 bp, Homo Sapiens
tgggggagcagagggcagcacttcctccagctccaaaagagtgcacccaccccaacgttaccaatacactcgtgcaggcggaaagctccgacgccggtgtgcgtctacgctgggggcgtggcctgactgcgcggccagacgccagcgccatggaggagtacgctcgggagccctgcccatggcgaattgtggatgattgcggtggagccttcactatgggtgtcatcggtggcggagtcttccaggccatcaagggtttccgcaatgcccctgttggaattcggcaccggttgagaggtagtgccaatgctgtgaggatccgagccccccagattggaggtagcttcgcagtgtgggggggcctgttctccaccattgactgtggcctggtgcggcttcggggcaaggaggatccctggaactctatcaccagtggagcattgaccggggctgtgctggctgcccgcagtggcccactggccatggtgggctcagcaatgatggggggcatcctgttggccctcattgagggcgttggcatcctcctcactcgctacacagcccagcagttccgaaatgcgcccccattcctggaggaccccagccagctgccccctaaggatggcaccccggccccaggctaccccagctatcagcagtaccactgaggaagccactgccaccatgggagctacttcctcggttccctccccgatggtctacctcgaagggagggctggctcccagttagccctgggaccctccagagagggtttctactctgctccctagtcccagggtgggggtggggcaccccagctgccctgacagatgggtcccctttttctctctcagggcaccccagccccacactcacatgtacgaagttctcaccccagctcctttgtgtggcaccctgatgagtatttaaagcccgttttgaaatgccaaaaaaaaaaa

SEQ ID NO: 287055 - DNA, 1000 bp, Homo Sapiens
atgcaccatcatcctaacatacctaccaacgtatatcagtactctgctccatgttaacatcagagatagtggagttctgtcctccctgccttttattgctgctgcaagctgtacaattttaggaggtcagctggcagatttccttttgtccaggaatcttctcagattgatcactgtgcgaaagctcttttcatctcttgatatgcaagtttcctcatgggaatctcaaggggatttgggctcatcgcaggaatcatctcttccactgccactggattcctcatcagtcaggattttgagtctggttggaggaatgtctttttcctgtctgctgcagtcaacatgtttggcctggtcttttacctcacgtttggacaagcagaacttcaagactgggccaaagagaggacccttacccgcctctgaggacataaagttacaaacttaaatgtggtactgagcatgaactttttaaacattttttacttctctccatattcctgaccatagactcagcagttcttaactctggctgtgtgttagtcttccctggggagcctttataagacactgatacttgggacccactccagagattctgaatgaattggtctggggtggaacccagatactactaatttttagatactccttagaggtttctagcatgcgcccggggttgacaacagctggacaaacttgaaaagtcaattcatgtggcctttgaattttcctcattggaaagtactaaataaataaaaattcatgtgaaaatgatcactgataaatatcttcatggtggggcaggttattggatgcagagaagatctgctcggaattgtagccatatgttacagatctcagcaccgatcagaactgtaaagctataatccccagaattaaagtttttattattttttatacattgtaaaacatagacgtttatttatgtgattaaattctattaaaatttacatgctaaaataaaaaaaaaaaaaaa

SEQ ID NO: 287056 - DNA, 1000 bp, Homo Sapiens
ggttggtcagtccagtaagaagccagcagggctggtgctggggcttcttctcctgaaggggctgcaagagggaaggcttagccatgtcgtccttgatcagaagggtgatcagcaccgcgaaagccccaggggccattggaccctacagtcaagctgtattagtcgacaggaccatttacatttcaggacagataggcatggacccttcaagtggacagcttgtgtcaggaggggtagcagaagaagctaaacaagctcttaaaaacatgggtgaaattctgaaagctgcaggctgtgacttcactaacgtggtgaaaacaactgttcttctggctgacataaatgacttcaatactgtcaatgaaatctacaaacagtatttcaagagtaattttcctgctagagctgcttaccaagttgctgctttacccaaaggcagccgaattgaaattgaagcagtagctatccaaggaccactgacaacggcatcactataagtgggcccagtgctgtgtagtctggaattgttaacattttaatttttacaattgatgtaacatcttaattaaccttttaattttcacaattgatgacagtgtgagtttgatgaaaatatctgaagctattatggaaataccatgtaatagggagagttgaacatgaatattagagaaggaatccagttacttttttaaattacacctgtgtgcacctgtattactgaatataggaaagagatacccattacatagttactcagtaaacaaaagagaaataccaggtaggaaagaagagttactattcctgagaaataatcaagaacatatttaatttaaactaatgatgtgaactatttagttttgatgtccgttatgtgattctgcttttacttgagtaaaattaaagtgtttaaatttgagatcaaggagaagatagtggaacaaaatgttatatagataatatttttctaatggaaataaaataggcagatttcctttgg

SEQ ID NO: 287057 - DNA, 1000 bp, Homo Sapiens; identical to SEQ ID NO: 116498

SEQ ID NO: 287058 - DNA, 1000 bp, Homo Sapiens; identical to SEQ ID NO: 116499

SEQ ID NO: 287059 - DNA, 1000 bp, Homo Sapiens
ctacagtgatttagagttgttttgattgggtaccgtgggagcagggaaattggttttttaaaaagcaactgtttaattgcttaaataagctatgtattaaatctgtctccagttagggctatcttcctagcataggccccttaagtagcatgggggatatattttttgctataacgtaaaaattttcctttaaccactgccctctccttctttctccttcaaggttctttccccctcagttttgttgttgtcttactctggagatgccaagtgtattttttctttctatgtaattttagattcgccttacaatgtaaatcttcacattggagataatattggttggaccttgcccatcttcactctagccttcgtatttgtgaaggactcagccaccttccttcttcaccccatgcttctcaccaaatttttgttgtcattgagggcacttggataactcaagttgatatttatagctgatcaatctatatgtgtcacagaactatgctgcctaaagtgatcttggctccttaatggtccttttggccccttggatagttaacagctgagtaattctaatctcttctgtgttttccttgccttaaccacaaattgtggtgctttttgtatattttatgtataaatcacaaagttgaattctgactatttttaagacaaaagtctgttaaacttttttattgtaaagaatatttattatgcgaatctctattattttatggtatttattgcaaaagactgttgaaatgtactcatgtttgaatataacaaaatatcaatacttaacggaaaataaggtgacacgaagaaagtacatatgttaactataatgcagaaaatatattaattaatgaaaaaaaaaaaaaaaaaaaaaaaaaaaaaaaaaaaaaaaaaaaaaaaaaaaaaaaaaaaaaaaaaaaaaaaaaaaaaaaaaaaaaaaaaaaaaaaaaaaaaaaaaaaaaaaaaaaaaaaaaaaaaaaaa

SEQ ID NO: 287060 - DNA, 1000 bp, Homo Sapiens; identical to SEQ ID NO: 116501

SEQ ID NO: 287061 - DNA, 1000 bp, Homo Sapiens
cacttcccaagaaggccaaacctctaaccgacattcctgaaatacgtggcattattcttttttggatttctcatttatggaaggctaaccctctgttgactgtaagccttttggtttgggctgtattgaaatcctttctaaattgcatgaataggctctgctaacgtgatgagacaaactgaaaattattgcaagcattgactataattatgcagtacgttctcaggatgcatccaggggttcattttcatgagcctgtccaggttagtttactcctgaccactaatagcattgtcatttgggctttctgttgaatgaatcaacaaaccacaatacttcctgggaccttttgtactttatttgaactatgagtctttaatttttcctgatgatggtggctgtaatatgttgagttcagtttactaaaggttttactattatggtttgaagtggagtctcatgacctctcagaataaggtgtcacctccctgaaattgcatatatgtatatagacatgcacacgtgtgcatttgtttgtatacatatatttgtccttcgtatagcaagttttttgctcatcagcagagagcaacagatgttttattgagtgaagccttaaaaagcacacaccacacacagctaactgccaaaatacattgaccgtagtagctgttcaactcctagtacttagaaatacacgtatggttaatgttcagtccaacaaaccacacacagtaaatgtttattaatagtcatggttcgtattttaggtgactgaaattgcatcagtgatcataatgaggtttgttaaaacgatagctatattcaaaatgtctatatgtttatttggacttttgaggttaaagacagtcatataaacgtcctgtttctgttttaatgttatcatagaattttttaatgaaactaaattcaattgaaataaatgatagttttcatctccaaaaaaaaaaaaaaaaaaaaaaaaaaaaaaaaaaaaaaa

SEQ ID NO: 287062 - DNA, 1000 bp, Homo Sapiens; identical to SEQ ID NO: 116502

SEQ ID NO: 287063 - DNA, 1000 bp, Homo Sapiens; identical to SEQ ID NO: 221755

SEQ ID NO: 287064 - DNA, 1000 bp, Homo Sapiens; identical to SEQ ID NO: 116503

SEQ ID NO: 287065 - DNA, 1000 bp, Homo Sapiens; identical to SEQ ID NO: 116504

SEQ ID NO: 287066 - DNA, 1000 bp, Homo Sapiens
aaatgaaagtagttagaaaaatgctctcctattctaccaaatttttaatttctttcttccctttcttgctacacagtgatcaagagtttctcatagtgctttgaagttagaaattatgtataggatattttaaatcattgagttttgtggggtttttttgtttgtttgtttcttttgttttttggaaaatccgtgtctttatctttttttcccacgtggtagatatgatcccattggaggtaaattgtagcttcttctcattcatgcagtaaataatacatcctttcactcagcagagatggccatattaaacacgttttgctatgttaaaagtggcagaacaggaaagacgaattaaaaataacattttttaagcgacataaggatgaaatactgatgaatctctgtgacattacagggaaaaaaatatagttttctatctctttcaagggcagaagagttttcatttttatttttgtaattttatctgtaagtcataaatattacttaatcaggcctgattctacttttgaaaattacagttcttgaaatgcagataatgtttactttgaaaacaaatgtcatgaatgatttccagtttttaaagctatatgtttcactgcttcatatctctgtccactttctgaatgagaacttattttgtgcctagagctctcactcactgataatgcttattaccttctgggcatttattccaaagtgggatcaactgtacgcctttggtatctgaccataaagtcttttgctccgctgacatttgggtgatgtcttcacatggaaatataataaaaataaaaatctagtttaatactgcattatttattttcctaaggctaaagaggagcagtcctatgcttttattcagcatcctttatctgtgacttcatgctctgataactgcctttccttccttctgtgcctttgaatacaaatttcagttctgcaaaagtgaaacattaaacattgccaacgcaaatgt

SEQ ID NO: 287067 - DNA, 1000 bp, Homo Sapiens
tatagaggatttttttttgtatgtttcaagcttcagcctttaacctatacctttgtagtgcaccatatggtgtgtgactttcacaggacttcgcagcacctggttcacatgtggcactgaccgcgtcacatccacgcactcccaaaggccagaagtatctgaccgacctacgccactggaaacacacccaccgcaacctcaagaaccagactgtgcagagggcattgcgtcccaatctttagtccttgctgaatcagttctctaatattttacctcatttgtgttccacctctagattacttcaggtttttttcctttaaaattagttactaccactcaaatgtatttacaaagagaatttggccaggcacggtgatgcatacctataatcccagcacttggggaggccgtggtgagaggatagcttaagcccaggagttcaagaccaacctggacaacatagcaagaccccatctcttaaaaaaaaaggaaagaaaacttgatgtgattgccataggtggaataatccaacataaattgccatagatagaaggtatctgtaatatatatatatatataaaatgaaatatatgtttcattttagagaaataactattactttagatctttccaaatctgagaaagggaggctagcatgtgttcaaggttagcacgcaacagaatttcctaaaatcagaagaattggaagatcctccccttttgaaatggccctgctgtgtcagtttccctgtggccttttgaactgtacatctcacatgttgggaaacgctggccactgggaaatcattagaaaggaggctgtagaatatttgccgagcctctactgtataccaggggctaactcaccaagcacattctaggaattgggccctgctcatgaggagccttagtggagattccaggtgaatatttatgaaaaagtcaacattagaactgaaaatggaaataaactgcttgaaaagaaaaaaaaaaaaaaaaa

SEQ ID NO: 287068 - DNA, 1000 bp, Homo Sapiens
cctgtgattagagatgtgtatatatatgagggctaggcatgctgtgtgtctgagctttgtctaaatgttatgcagaagtttgtagagttaaaggtacgtaggtttaattcatgcaaggtaaacaataagtgctctcttttatacaatatgcattgcatctggaccttaaacttataaaaatggtcagtgaaacttctgtgaacatgaagaaattattaaaaaaggcatttaaatgaaatttgctaagttgtgatttttatggttggaaccaaagttattcaaatagtaaaaggaaaaagaaagaaaaaggagatctcccataatatttttctgcatctgtttgctttgactgagtaggcgttttgtcattattgtgtatatgagatgtacttgtatcgttcataatatattttttttattatgtgtagaaagattttaaaaaactaacgtgcagcaatttccagtgaacctgtacttggacatcaggtagtgagtctatttgtggtcactagcactgtctcctaaacttgtaagaggtctgaagctattctttgatttttgctagtgctattaacttatgtagacctgttaaaaagcagagcaacacaattatagttatcctactgagccatggattctgagttttgttttaaaagtgaaagccaagttggtgtatgtaaaggatttccatgtagctgtggtgctagttattactggctacattatatgctaagtgtatttgtgttccccaagtgtacaagccttctatcaaaagtatgttctataactcatatattcaaggtgtagggtatgaaaatgcaaagtttaggagagcactttaccaagctggtgtcctccaaactgaaattgtttgtaacgatagtcttttacaggttttcctttaaagatgtttgtgtgcttttaattgacaactaacttcttgctgctgtatagtaaaatattaatatatttttatcattaaactgctgcatgactatca

SEQ ID NO: 287069 - DNA, 1000 bp, Homo Sapiens
ctgggtgtgtacggagggtctagtctgagtgcgtgtggggacctcagaacactgtgaccttagcccagcaagccaggcccttcatgaaggccaagaaggctgccaccattccctgccagcccaagaactccagcttccccactgcctctgtgtgcccctttgcgtcctgtgaaggccattgagaaatgcccagtgtgccccctgggaaagggcacggcctgtgctcctgacacgggctgtgcttggccacagaaccacccagcgtctcccctgctgctgtccacgtcagttcatgaggcaacgtcgcgtggtctcagacgtggagcagccagcggcagctcagagcagggcactgtgtccggcggagccaagtccactctgggggagctctggcggggaccacgggccactgctcacccactggccccgaggggggtgtagacgccaagactcacgcatgtgtgacatccggagtcctggagccgggtgtcccagtggcaccactaggtgcctgctgcctccacagtggggttcacacccagggctccttggtcccccacaacctgccccggccaggcctgcagacccagactccagccagacctgcctcacccaccaatgcagccggggctggcgacaccagccaggtgctggtcttgggccagttctcccacgacggctcaccctcccctccatctgcgttgatgctcagaatcgcctacctgtgcctgcgtgtaaaccacagcctcagaccagctatggggagaggacaacacggaggatatccagcttccccggtctggggtgaggagtgtggggagcttgggcatcctcctccagcctcctccagcccccaggcagtgccttacctgtggtgcccagaaaagtgcccctaggttggtgggtctacaggagcctcagccaggcagcccaccccaccctggggccctgcctcaccaaggaaataaagactcaaagaagccttttttttttttttttt

SEQ ID NO: 287070 - DNA, 1000 bp, Homo Sapiens
tctgatttgttttttaatcaaatgattaaggtcaatccctttttgcagtgacagaagaggagcatgtaaattacccaagggaatgttggtgaatgtcaactcagaaagactgacctgaaaatcatttgtgtcctactattggacttatcccaatacagatgtgtgtgtttttctggagggaggaagaaattttaaatttttaaaacagctgtcaagataaacactgttatacacctgttttatgaaaactcaacattgagtaaaaaaaaacatatttttaactttattttcctgttgtacaatttaaaaaccgttttaacattttgcctttttatgttttaaaagctaaccatttttattaaacctatgagtaagcagctcatcctaattgcgaagagtgttttggagttcactggatttggttgacctttgtggaacacaaataatgaaggagcagaacattgacaagctaagatgaaattctgacatagtacatctctgccaaaaaccacacaccctctgtggatatggatatgaattcccagattttatatactcttgaataaaaggtttatttttatttataagtgggcataaaataagaaatgtccatgcagccatttttccaacagatgctgtacaccgttcattttatatagactagggagattcaaatacagtgcattttctattggtatttgttctgtgcatttttagcaacttctaccagcaaataaagtattctcagtaaaacgaaaatgattctcaagttatcagtttgctgtttttaccacttatttcatgccctgccaaattcaagttacacagacttccattttcttaagataatcaatcatgaagaaatcctttatcaatcattcaaaagtaattttaagtgtaacataactgtgtttacttcccatgcacttaatacccttatgcgctaattttgtgaattaagtttactgattatagaagtatgtgctgcatagaagtctgt

SEQ ID NO: 287071 - DNA, 1000 bp, Homo Sapiens
tttcaaactttacattgaaacataatttccttggaaaacaaaccataagcctgaggaggtttttatcaactggaatgctttatattagtttgtttttcactgtacattcctcattttacattcatttaacctgccgattatttaatttttttattgtaaagtagtttttagcatttgcttttatttttttactttgatgccttttcaaattggcatgtctttaaagtatttttcttcctgattaaaaatgtgtgtgtatgtgtgtgtgtgtgtgtatatatatatatttttttaaatcacattaattttaccaagtgaaaccaagccatactgtttttgagccaattaagaaaattgccatttttaaagtgtagcatttcagggtaaagacccatgaaatggcttgatgtattctagactactgaaagaaaaccacttcaaagattttgttgaaagttttagtgttgtctgaaatgcaagagggaaggtgattggtagtgagttaaaagaaaaagagaggaaaagagagtagttttgtcttcaagtaaaatgtctggttgtgccagacatttcacaagtgtgaaaggagataggagaagctcaacttgagggcgtgtagtaagttgtagaaggctcgaggggacgtggacttatttgccttggtttgcaatacctgcaaataatgagtttgaaaagaaacaatgaaatgtgttaaaaatttgaccatattagataaattttggtggatttagtcataagatggaaaaagactggtgaatcttttattacaaaatgtttctgttaaaatgggatcatcatctttgaaaggggggaggaggagtaaaagcccgattataatggtgatcaattcaagtcagtgttgactattctgtgaaatatatttggccagtggaaatgataatcagaaaagactgtaaatagatccatccaaatgatttctctgtacaaatgaatgatactattaaaaaaaaaaaaaaaa

SEQ ID NO: 287072 - DNA, 1000 bp, Homo Sapiens; identical to SEQ ID NO: 116506

SEQ ID NO: 287073 - DNA, 1000 bp, Homo Sapiens
tccatgtcgttaatcatcttgacgagagatgatgaaccccggatatttaccccagacagtgatgccgcttcaccagcattgcactctacttccccgcttcctgatcctgcctcagcttctcctctccacagagaagaaaaaattctgcctaaagtctgcaacatcgtttcctgcctgagtttcagcctgccagcttctcctacggattctggacttgccagccccacaatcataaccagagaggggcagcaattttgggcaaaatgtctgatttggaaataccaactttacctccatgggctccacaagaaatcagatgggagaagggacaagcagataagcgcaagcccatcaacctgaaggcataaaccacatccagccacctccttctgatcagcagcaaagctgacgttttgatctccatctgtctgattcttgtgtctacttctcagtttacaactccagtgggaaagaaagagctttatttacagacccataaaaatcccatcagtgtcgtcccctgctgagaggccatgtgagaccatatggaaaaacaacagccataatggcagcatggcagtggaagggtttgtcttgtgcccaggccttgcggtcatgcaagtttcttgtggatcctgttgggaccagccactcaccaaggctgagtaggtccacaaataatggggactttctaccagactcacagagaactgctgggtttttgggaagggtgtgcgtgtctttggggcatggaagttggggttatagtggagacccagaggatgagaaaacttctctgcctcagcagaagagtggcagctgagagagaggcaagaaactcgcacccactgtggactggggcagagagattttgaggagaatgaaatccagaaactctgtgtggtattagtttgtatccagagggtgaccctcttctcaaggaaatgggtgtcatcaattttctacactattaaagatataaagttcttggcattaaaaa

SEQ ID NO: 287074 - DNA, 1000 bp, Homo Sapiens
aggtgatgcatgtaattgtgaatttggaatttgttccaacttaatggcttgcagtaccactttgataaaaatcagcatcaaaacattcctagtgttcaaatactgtggcattttccattgaaaattgctgaattttgcttattttataaatcacattagttaatacagtggtctttgaatactgtttcttaatgactcattttagcccctattttcaggggtagtgagagggtgtggctccactaatttccagtttgtttttctattgtttgccaactgtcagattaaatagcattataatattttgttgtaatcataaatgcaggtttatgtcccatgtaaggaaacttagtgggagagtaacagaatgcctggagagcctgactctgagctcttgaagtagtcagccagtttgtggtaaaatggtaattgaattttcctaactgcatcaactgtaatgatatactcccttctcctcctttatttagttaaaattgtaggctgatttctttttacctacaatcttcctaataatttttgatgataatgacccctcatttctttctgcccaaagacctcattctttaaataaaacttgttattttggcatatttctggtagggcccattgcacatgtgtatcagtatagttattatttcatattaactttatgaattctcttgacttggcttataatagttttatgatttttactacataggtagcacatttatcatttgtgacagaataatgtgaagttaagtaattactgaactttaaatggaaatagtatgcaagaaactcaggcattgaacttgaagataagagtattattgctttaatccagtgtatttgtttatggaaagaaaaacacaaaggcagactgttgagtaaaaaatattaaatattgttaaatattctgtattttggaatttatccatttataggcttcaaaagtaaatttttaaataaaatatattagtcgaaaaaaaaaaaaaaa

SEQ ID NO: 287075 - DNA, 1000 bp, Homo Sapiens; identical to SEQ ID NO: 221757

SEQ ID NO: 287076 - DNA, 1000 bp, Homo Sapiens
tcatggcggcagttccacactttccttctgaccaaggcgggagcagctgatgccccactccgtctaagatcaatacacgaatatcctaagtaccaggctgaattccccatgagtcctgtgacctcagcccacgcggggacctacaggtgctacggctcactcaactccgacccctacctgctgtctcaccccagtgagcccctggagctcgtggtctcaggaccctccatgggttccagccccccacccaccggtcccatctccacacctgcaggccctgaggaccagcccctcacccccactgggtcggatccccaaagtggtctgggaaggcacctgggggttgtgatcggcatcttggtggccgtcgtcctactgctcctcctcctcctcctcctcttcctcatcctccgacatcgacgtcagggcaaacactggacatcgacccagagaaaggctgatttccaacatcctgcaggggctgtggggccagagcccacagacagaggcctgcagtggaggtccagcccagctgccgacgcccaggaagaaaacctctatgctgccgtgaaggacacacagcctgaagatggggtggagatggacactcgggctgctgcatctgaagccccccaggatgtgacctacgcccagctgcacagcttgaccctcagacggaaggcaactgagcctcctccatcccaggaaagggaacctccagctgagcccagcatctacgccaccctggccatccactagcccggagggtacgcagactccacactcagtagaaggagactcaggactgctgaaggcacgggagctgcccccagtggacaccaatgaaccccagtcagcctggacccctaacaaagaccatgaggagatgctgggaactttgggactcacttgattctgcagtcgaaataactaatatccctacattttttaattaaagcaacagacttctcaataaaagcaggtcgtctcgttccaatct

SEQ ID NO: 287077 - DNA, 1000 bp, Homo Sapiens; identical to SEQ ID NO: 221759

SEQ ID NO: 287078 - DNA, 1000 bp, Homo Sapiens
tcacctggcgctgcatgaggacaagcctgactttttcggcatcatctgtactcgtctctcaccaaagaagattattgagaagtgggtggactttgccagacgcctgtgtgagcacaagtatggcaatgcgccccgtgtccgcatcaatggccatgtggctgcccggttccccttcatccctatgccactggactacatcctgccggagctgctcaagaatgccatgagagccacaatggagagtcacctagacactccctacaatgtcccagatgtggtcatcaccatcgccaacaatgatgtcgatctgatcatcaggatctcagaccgtggtggaggaatcgctcacaaagatctggaccgggtcatggactaccacttcactactgctgaggccagcacacaggacccccggatcagccccctctttggccatctggacatgcatagtggcgcccagtcaggacccatgcacggctttggcttcgggttgcccacgtcacgggcctacgcggagtacctcggtgggtctctgcagctgcagtccctgcagggcattggcacggacgtctacctgcggctccgccacatcgatggccgggaggaaagcttccggatctgaccccacagcctttggcctgctcacccgaccagcctgggccgcattccctgcaggacctcccgggtcaggcagggcggccccctgctaccacacactgctgcatcttgggtctcagggacccagacagatggacttacatggagctgggcactgccctgcctcaacagggtccattgcctcttgcctccagaacttggagagcagggaagtgggcacccttgaggcctccagcaccagttccgtcattctcgttcctggggaacccccactctgacctgttattaaagttcacattttgaatgccctctcgggccccgtgtgtggggagggcaggtgaaaaaaaaaaaaaaaaaaaaaaaaaaaaaaaaaaaaaaaaaa

SEQ ID NO: 287079 - DNA, 1000 bp, Homo Sapiens; identical to SEQ ID NO: 116508

SEQ ID NO: 287080 - DNA, 1000 bp, Homo Sapiens; identical to SEQ ID NO: 221761

SEQ ID NO: 287081 - DNA, 1000 bp, Homo Sapiens; identical to SEQ ID NO: 116511

SEQ ID NO: 287082 - DNA, 1000 bp, Homo Sapiens; identical to SEQ ID NO: 116512

SEQ ID NO: 287083 - DNA, 1000 bp, Homo Sapiens; identical to SEQ ID NO: 116513

SEQ ID NO: 287084 - DNA, 1000 bp, Homo Sapiens; identical to SEQ ID NO: 116514

SEQ ID NO: 287085 - DNA, 1000 bp, Homo Sapiens; identical to SEQ ID NO: 116516

SEQ ID NO: 287086 - DNA, 1000 bp, Homo Sapiens
gaattattctcataattcttattctcataatttctgtaatccacctcaagcttcatagttatttggcattgaaataacacccagagcatgatagaaatgttgttactcttcctctctcaaggagaaagtaattttcctgcaatacttaataattggcaccgttgctttctaaagactccatggtgcattcaagagtatccaacttcaagggaatctccgcatttcaatgaaaggaggaagagtgtgctgataaacctaccagcacctattgagcaatgtctattatagtaattttgcatacatttttatttaagggaaaaaatataggtattgtgaaatattttgctaatcttatagaaaaggaaaaaatcccgttatttaaagggaaaagtaaatttaacagttgccttttttcttaatgtcagggcagatcttattttacagtacagtgggggaaatagaaaacatgtgaaaggcaaaaggcaggctcctaaattaatgtcagtgaagttcagggtgggcaaatgagtgtgtgtgaggtataggaaatgctgatgacttctttaatgcttgaagtccgttcacaggtatctagccctagaatgcctagaacaggaagaggcagctggtgttctgcaaaacttggacaggggcaaagttgctgaaaaagttttggtttaacccgaagataagtggaaaagagcttgtccatgaacccaggttctcactctgtttacagaagtgtgttgagtacagttggtgaaggaagaggtaacaaaaaatgctaaatattttatccatgaaaatgacttccagaaaaggaagaatatgaaccccagaccgaaggggaaaagatagttaatagtattatctaacctggttggtatttgtaatgaatggtgattttaattagtcattagccataatgatgtttatttacagtataactcctgaatgctacttaaataaaccaggattcaaactgcaaaaaaaaaaaaaa

SEQ ID NO: 287087 - DNA, 1000 bp, Homo Sapiens; identical to SEQ ID NO: 221764

SEQ ID NO: 287088 - DNA, 1000 bp, Homo Sapiens; identical to SEQ ID NO: 221766

SEQ ID NO: 287089 - DNA, 1000 bp, Homo Sapiens
aaataacaggaacagattctgtcttggacttctttctaatgtaaacagaaactcaacgatagaaaataccaggagacatataggaaagggtgtgcacttgtactacgtcgggggagaggtgtatgccgagtgcgtgagtgacagcagcatctttgtgcagagccggaactgcaactatcaacacggcttccacccagctaccgtctgcaagatccccagcggctgcagcctcaaggtcttcaacaaccagctcttcgctcagctcctggcccagtcagttcaccacggctttgaagtcgtgtatgaactgaccaagatgtgtactatccggatgagttttgttaagggttggggtgctgagtatcatcgccaggatgtcaccagcaccccctgctggattgagattcatcttcatgggccactgcagtggctggacaaagttctgactcagatgggctctccacataaccccatttcttcagtgtcttaacagtcatgtcttaagctgcatttccataggatagaggctattgcagggagtggcttgtatcatttcagatttgcaactgaagtttctaaaaacatgtgtaaatacatagaatgtatactgttcttattttttttaatcaccgtttgttttgtgctttctagttaacctgatgccagtacagtgcaattggaaaagcaggactttggtgcctgtgctataagcagcagattttgtgggaggaaacacttgagaggcgatattgtcaacagtatttgaagggtgttagcagaataaaagacagctttagtcagccgtgtcattataaagcatgttgtgtggcctcacagaaacattgaaactgtttatacagcaaaagtcaggtattagcagcactaaagcaaatatcactcagatgaaacaaagcagtgaaaccctacagtttaaatgatgtcacttttagtgctgttggcaagaaaaaaaaaaaaaaaaaccaaaaaaaaaaaaaaaaaa

SEQ ID NO: 287090 - DNA, 1000 bp, Homo Sapiens
tccattccctactacacagagaggtgagctttcaaattttgcagagctctgctatcactgaattacatttatctgaagaaaatagtacaacttaatggattagcttttgggtttaactgaatatatgaagaaattgggtctgtctaaagagagggtatttcatatggcttttagttcacttgtttgtatttcatcttgatttttttctttggaaaataaagcattctatttggttcagatttctcagatttgaaaaaggctctatctcagatgtagtaaattatttcctttcagtttgtgaaagcaggatttgactctgaaagaagctttgccaattttacttattcgtgatcaatcaaggaaaatctaataaattttaggccaaataagaatatagcatatttagtatggttatagtcaacacagagatcacaacttagaagaaatataaagaaatggccactccccatcccccacagtcctggagtaaatcaaaatcaatatatgattcttttaaacattaagtttgaaataggaatggttttctcaagaatagatttggtgtgataccttgtgtttgcttacattggcccactatatatacatatatatttatgtagatatacttccatgaaagggctaatacgatgcatatactgaagggcaaggactttgaccatgtcaattttcagccgagaatggtcagaaagatcagtacaaccccatggattaggctgaaacatatgaaattgctgcatttgtagtttaaaaactgtcagcagtttcatatggttccacctaatattattgaagacaattattttcttagctatcaataggcttaatagttttagttattttagcttttgaaagtgttttaaaagatttcctttatcggacaggaccatctttatgacctgctttctgtttttcaatatcatacattggtgtatgtcaaagaataaattagtaaaattagtaaaaaaaaaaaaaaaaaaaa

SEQ ID NO: 287091 - DNA, 1000 bp, Homo Sapiens; identical to SEQ ID NO: 221767

SEQ ID NO: 287092 - DNA, 1000 bp, Homo Sapiens; identical to SEQ ID NO: 221768

SEQ ID NO: 287093 - DNA, 1000 bp, Homo Sapiens
tctttgtcagggagtgttccctatccaatcaatcttgcatgtaacgcaagttcccagttggagctccagcctgacatcaaaaaaggcagttaccattaaaccatctccctggtgcttatgctcttaattgccacctctaacagcaccaaatcaaaatctctccactttcagctgtcttttggaggacgtacgtaataaggttttaatttagtaaaccaatcctatgcatggtttcagcactagccaaacctcaccaactcctagttctagaaaaacaggcacttggcagccttgtgatgtcatacagagaagtcacagggcagtacctgagggtctgtaggttgcacactttggtaccagataacttttttttttctttataagaaagcctgagtactccacactgcacaataactcctcccagggttttaactttgttttattttcaaaaccaggtccaatgagctttctgaacagctggtgtagctacagagaaaccagcttccttcagagagcagtgcttttggcggggaggaggaaatcccttcatacttgaacgttttctaattgcttatttattgtattctggggtatggcgtaagtacagagaagccatcacctcagatggcagcttttaaaagattttttttttttctctcaacaccatgattcctttaacaacatgtttccagcattcccaggtaggccaaggtgtcctacagaaaaaccttgggttagacctacagggggtctggctggtgttaacagaagggagggcagagctggtgcggctggccatggagaaagctgacttggctggtgtggtacagagaagccagcttgtttacatgcttattccatgactgcttgccctaagcagaaagtgcctttcaggatctatttttggaggtttattacgtatgtctggttctcaattccaacagtttaatgaagatctaaataaaatgctaggttctaccttaaaaaaaaaaaaaaaaaa

SEQ ID NO: 287094 - DNA, 1000 bp, Homo Sapiens; identical to SEQ ID NO: 116517

SEQ ID NO: 287095 - DNA, 1000 bp, Homo Sapiens
agttggaaccaaataatgtgtagtctctataaccaatacctttgttttcatgtgtaagaaaaggcccattacttttaaggtatgtgctgtcctattgagcaaataactttttttcaattgccagctactgcttttattcatcaaaataaaataacttgttctgaagttgtctattggatttctttctactgtaccctgattattacttccatctacttctgaatgtgagactttccctttttgcttaacctggagtgaagaggtagaactgtggtattatggatgaggtttctatgagaaggagtcattagagaactcatatgaaagctagaggccttagagatgactttccaaggttaattccagttgtttttttttttttttaagtttataaaagtttattatacttttttaaaattactctttagtaatttattttacttctgtgtcctaagggtaatttctcaggattgttttcaaattgcttttttaggggaaataggtcatttgctatattacaagcaatccccaaattttatggtcttccaggaaaagttattaccgtttatgatactaacagttcctgagacttagctatgatcagtatgttcatgaggtggagcagttcctgtgttgcagcttttaacaacagatggcattcattaaatcacaaagtatgttaaaggtcacaaaagcaaaataactgtctgaggctaaggcccacgtgggacagtctaatacccatgagtactcaacttgccttgatgtctgagctttccagtgcaatgtgaatttgagcagccagaaatctattagtagaaagcaagacagattaatataggttaaaacaatgatttaaatatgtttctcccaataattatctctttccctggaatcaacttgtatgaaaccttgtcaaaatgtactccacaagtatgtacaattaagtattttaaaaataaatggcaaacattaaaaacaaaaaaaaaaaaaaaaaaaa

SEQ ID NO: 287096 - DNA, 1000 bp, Homo Sapiens
tatgtgacatttctgcagttcagtatccgaaggtttctcttgggggtaggggctcctgggcggccagatgaatgggtccctgggaacccagacctcagatgaggacttaatgtcttcttcctctcaagccaaattcgcctccacccactccctctgaagaactgggcatttgccaaagtaaccactggagtcatctaatggccctccccctccccaggtttcccacagctttcagggacagtgggcaagaggacacccccccccaccacctcagtggaacacaccattctccccccctcaacagcacactcagtgcagcaagactgacccctgaccccctcccagccctccctaccttggacaggaaggaagtaatgcaccttctcttgctgattatttatttgtttggagagacagaaatgtaaaagtgtatctagaaatatctatatctctatatatttttaactgactctttggaatcccctggggtggggtgaggggtaagtttaggctttcgcggaggggaggagacatggagcctgggaactccttgttctcccctctgctgcctctccccaccccttaaagcagttggtagaaggaatggtatttgtatggggggagggaggctggaatggagaatctggattctctcctcttccccattctccagagggagggaggtggtgaggaagaggaagggaggggcaggatgggccatggaggtgccccacccccacacctgacaatcacccacactcctggggctcttcctgggtcctggggcagggcgagtccaagtgtgaggctgttgatttgttttcaatatttcttttcgtgctgtatggtgatgctttcttagtattctacacaataagaaaagacaaagtcctcgagattcttatgagttttgtttgaaaactctttcactatatttgttgtaaagaggtttactattaaaagaaaaagaatacacgtttctgataaaaaaaaaaaaaaa

SEQ ID NO: 287097 - DNA, 1000 bp, Homo Sapiens; identical to SEQ ID NO: 221771

SEQ ID NO: 287098 - DNA, 1000 bp, Homo Sapiens
gcttaagtcccaacccatagaaattcctgaattgcctgtatttcatctaaattcttctggcacaaatactgaagattctgaacttaccgactggctgagagtgaatggagctgatgaagacactataagccggtttttggctgaagattatacactattggatgttctctactatgttacacgtgatgacttaaaatgcttgagactaaggggagggatgctgtgcacactgtggaaggctatcattgactttcgaaacaaacagacttgactgttgctcaatctaatcttcgatggaaattctaaaaattaatacagagctgatcttcttgggggtgggaaaatcgaagggagaggagaaaggcgctgcactttaaatccagtatttgtttactcatgttaaaaaaaaaaaaaacagacaaaacacactgaaatttcctaactacatctatttctataatttttaaggactcttcataaggactcttaaaataatcctgaacattagaaccctaatgttcaggaagattttaatctaagcatttttatggaaatatttttaatgcagcagctattgcacttcagccaaatgtttatttcacacaaaacggatgtaacatttcatgtgatcgtgcaccactggaacaaaaccaaaatgtgaccataactgtttaggcttctgtgtgtttgtaatatgctctaataatctgagtagaaatgcgtaatttcaattactgtataaagtttatgtttttttaagtgtgcagaatctgagagcaatggtttttacttctctgtgttaattgtaatattgactctattttgtaacttaagtttctgacctgtcgtacatttgtttgagtcgtttatgtactactgaactgtaccagttgcacatgcttgaactgtagtaatgttagcttgttctaaagctatccattgtgtcatatttactctaaaaattaaagagactctcaacaaaaaaaaaaaaaaaaaaaaa

SEQ ID NO: 287099 - DNA, 1000 bp, Homo Sapiens
taaagagcttccacagtgaagatggagaaggtgaacttgctttgaatattccagatgtgtttggtcgtgcgtatggcagtgagcaggtatgtgtttgcttttgcttgcactgaaaattaaattgctatcaagagcaaactatgaacggttttttattcaagatgtctccagagtgaagatgccgaggatgaacttgcattgaacattccagatgtgtgagatcatgtgtattacagtgggcaggtatttgcttttgcttgcactgaaaattaaattgctatcaagaataaaccatgaaacattttatcctgaacagccacagtgcctgaattcactcaagtggataaaaagtgtattttaactctgtatatattacccttaagtcattttcctgtcttcactaatttagcaatgcattcatattagctgatgaaaataggcactcacaatgacaaccagagccagtttcttgtcttttttatacattttgtcatcccagagacaatcagtatgtgcttacctgtgttcaagtagagaaaaatacagtagagtctgataggacatattcttgtaccacagacaaaacaaatcttatgttgcatttactatcaactgctgctaatacgttattataaaacttacctagctcctgaattcttcctatcttatagcttaaaaaaattaggatcataggcaaatcagttaccttgcagaaagagctttgtatgacagacattgtcttattttatttctgtaaaatattagctgtatgaatatgatttaattaacaagaaaacatttcttcctgattgacaacagtgttagacaaggtgcaaagcgaaactggttgctcaagttgatagaaaacaaaattctgaatatcttcaaattaaattcggtaaaaacacattattttttcatatgtgatgtattcatgcagaacaactatctttgtattttgtttttaaaatgtgtttaataaatgatcctttgtaaataa

SEQ ID NO: 287100 - DNA, 1000 bp, Homo Sapiens
ttttccgtcaataagatgagggattaggtgagatctgaagttgtttctagctctatagcttcttaacccatcacctttaaattaccagaatcttcactcatctctaagtaaacctttcccgggacttttactcgcttcttttggaaaggattaagctgagatctaaatttccacaccaatgtcataatgcacagaggtttttgaaaaacatctgagtgtttttcagatgttttgccatgtggagcatataatgatatgtgcaagattgaatcttttcaatgtagcacatgtctgtagggttatacagatgtcagagagctaactgctctgtaaactactttccatgagtaaattggtccttggtgggggtgtatcatatttttaacttactgagacatcattttagttcattgaggttggcagggattgcctaactgatcttccaaagtgagcagtttatttctaaggtataacgtctttgatgcttttagaataagaacagtgtcaaatcatctgtcttctggaaaatcatggattttcatatttctgttaacagaatttctcaggctttccctttttaaaagtattggactctacaaataggttctatatttgggatctcatcctaggagaaaacccaaaactggattcctcttaagacctctgtcaaccctcctgccctttgtggtcttaggtatggtgctataggttgcatgcgtctttatcttgtttgtttggttaatattttgttgttgaggtttttatttttgtttacttcagatacgtaattctgagctatggctgcttttgtagcctttccgagaagcactaacctgaaataagattagataattgtgagggtgtgttactatattaaaatacacacacaactgatctagacatcaagaggaagaaaaatgatggatgatgccacctgcttcaactgtatataataaacacttatgatgacaaaaaaaaaaaaaaaaaaaaaaaaaaaaaa

SEQ ID NO: 287101 - DNA, 1000 bp, Homo Sapiens
acctgggctcctcgaaggaggtgacaggcatcatcacccagggggcccgtaactttggctctgtccagtttgtggcatcctacaaggttgcctacagtaatgacagtgcgaactggactgagtaccaggaccccaggactggcagcagtaagatcttccctggcaactgggacaaccactcccacaagaagaacttgtttgagacgcccatcctggctcgctatgtgcgcatcctgcctgtagcctggcacaaccgcatcgccctgcgcctggagctgctgggctgttagtggccacctgccacccccaggtcttcctgctttccatgggcccgctgcctcttggcttctcagcccctttaaatcaccatagggctggggactggggaaggggagggtgttcagaggcagcaccaccacacagtcacccctccctccctctttcccaccctccacctctcacgggccctgccccagcccctaagccccgtcccctaacccccagtcctcactgtcctgttttcttaggcactgagggatctgagtaggtctgggatggacaggaaagggcaaagtagggcgtgtggtttccctgcccctgtccggaccgccgatcccaggtgcgtgtgtctctgtctctcctagcccctctctcacacatcacattcccatggtggcctcaagaaaggcccggaagccccaggctggagataacagcctcttgcccgtcggccctgcgtcggccctggggtaccatgtgccacaactgctgtggccccctgtccccaagacacttccccttgtctccctggttgcctctcttgccccttgtcctgaagcccagcgacacagaagggggtggggcgggtctatggggagaaagggagcgaggtcagaggagccggcatgggttggcagggtgggcgtttggggccctcatgctggcttttcaccccagaggacacaggcagcttccaaaatatatttatcttcttcacggg

SEQ ID NO: 287102 - DNA, 1000 bp, Homo Sapiens; identical to SEQ ID NO: 116519

SEQ ID NO: 287103 - DNA, 1000 bp, Homo Sapiens
gagcagacaaaccacatcaggattgccatttcactatccgtggaggcagactaaaggaagatggagactatcaactcccacttgtagttcttatgctgaatcttccccgttcctcaaggagttctccaactttgctaactcctggcatgatggaaaatcttttccatgaaatgggacatgccatgcattcaatgctaggacgtactcgttaccaacacgtcactgggaccaggtgccctactgattttgctgaggttccttctattctgatggagtactttgcaaatgattatcgagtagttaaccaatttgccagacattatcagactggacagccactgccaaaaaatatggtgtctcgtctttgtgaatctaaaaaggtttgtgctgcagctgatatgcaacttcaggtcttttatgccactctggatcaaatctaccatgggaagcatcccctgaggaattcaaccacagacattctcaaggaaacacaagagaaattctatggcctaccatatgttccaaatactgcctggcagctgcgattcagccacctcgtggggtatggtgctagatattactcttacctcatgtccagagcggtcgcctccatggtttggaaggagtgttttctacaggatcctttcaacagggctgccggggagcgctatcgcagggagatgctggcccacggtggaggcagggagcccatgctcatggttgaaggtatgcttcagaagtgtccttctgttgatgacttcgtaagtgccctcgtttccgacttggatctggacttcgaaactttcctcatggattctgaataaaagaaacactctacacctctaatcaaggtcatgtagtaatgactttgttataaatgctacagctgtgagagcttgtttctgattgtttcattgttcgcttctgtaattctgaaaaactttaaactggtagaacttggaataaataatttgttttaattaaaaaaaaaaaaaaaaaa

SEQ ID NO: 287104 - DNA, 1000 bp, Homo Sapiens
acgataaagcagatttttctctgcctctgccacaaggtttcagagtagtgtagtccaagtagagggtggggcacccttttctcgccgcaagaagcccattcctatggaagtctagcaaagcaatacgactcagcccagcactctctgccccaggactcatggctctgctgtgccttccatcctgggctcccttctctcctgtgaccttaagaactttgtctggtggctttgctggaacattgtcactgttttcactgtcatgcagggagcccagcactgtggccaggatggcagagacttccttgtcatcatggagaagtgccagcaggggactgggaaaagcactctacccagacctcacctcccttcctccttttgcccatgaacaagatgcagtggccctaggggttccactagtgtctgctttcctttattattgcactgtgtgaggtttttttgtaaatccttgtattcctattttttttaaagaaaaaaaaaaaaccttaagctgcatttgttactgaaatgattaatgcactgatgggtcctgaattcaccttgagaaagacccaaaggccagtcagggggtggggggaactcagctaaatagacctagttactgccctgctaggccatgctgtactgtgagcccctcctcactctctaccaaccctaaaccctgaggacaggggaggaacccacagcttccttctcctgccagctgcagatggtttgccttgcctttccaccccctaattgtcaaccacaaaaatgagaaattcctcttctagctcagccttgagtccattgccaaattttcagcacacctgccagcaacttgggggaataagcgaaggtttccctacaagagggaaagaaggcaaaaacggcacagctatctccaaacacatctgagttcatttcaaaagtgaccaagggaatctccgcacaaaagtgcagattgaggaattgtgatgggtcattcccaagaatcccccaa

SEQ ID NO: 287105 - DNA, 1000 bp, Homo Sapiens; identical to SEQ ID NO: 116520

SEQ ID NO: 287106 - DNA, 1000 bp, Homo Sapiens; identical to SEQ ID NO: 116521

SEQ ID NO: 287107 - DNA, 1000 bp, Homo Sapiens; identical to SEQ ID NO: 116522

SEQ ID NO: 287108 - DNA, 1000 bp, Homo Sapiens
gaagggccaaggtctgagcactggagtggctcgccaggccaaatcacccttagaaggctgcagataacagaaaggctttttataaacttttaaagaaatataaacacaaatatagagattttttaaccatggcagggtgctagtggtgggcagaatgcttttttttctttctgaaggctttgtgatagtgacatgatacaaacactacagacaataaatattaggagacacagggaagtggggagaggtggggagtaatagtaaacacagggaagagctcccctacggaccaggtatagagaaaggtctatgcagaaataggttagagtttccctaacaaaaaagctaacccaggtcccctcattccttcaacttgtgcctgggagtgtgtggtgttagggtgcagccacactcttctatgacccagcatgggttagtgctatggtgggagagtacattgaaggcctggaattagcttggggccagggaagggactgggaggggagagaagagaaggagggaaggatttaggatggtaaagttaggtacagagacctccctgttcaaggcccctgacagctgtccctgcccttcttccccttccctgactgcaggggttatgtggaagtgtgtgtggcagcaggcagcggggaggggaggaacagggaagggggagctggggagcttggctgagggtctgggaaatgagcagggatggggggggatgtggatcaggtttactagcacctgccagggaggccatctggggctccttctccaccccagcccccaaagcagcccttcccccagtgccctttgcatcgtcccctcccccacccctgctgtgggttcccatcatttcctgtgtcagcgcctggcctacccagattgtatcatgtgctagattggagtggggaagtgtgtcaaatcaataaatgaataaattcaataaatgcctataaccagcagaaaaaaaaaaaaaaaaaaaaaaaaaaaaaaa

SEQ ID NO: 287109 - DNA, 1000 bp, Homo Sapiens; identical to SEQ ID NO: 116523

SEQ ID NO: 287110 - DNA, 1000 bp, Homo Sapiens
acaaagaaaatggctttacgtatttctacaaaggaaaggagtattggaaattcaacaaccagatactcaaggtagaacctggatatccaagatccatcctcaaggattttatgggctgtgatggaccaacagacagagttaaagaaggacacagcccaccagatgatgtagacattgtcatcaaactggacaacacagccagcactgtgaaagccatagctattgtcattccctgcatcttggccttatgcctccttgtattggtttacactgtgttccagttcaagaggaaaggaacaccccgccacatactgtactgtaaacgctctatgcaagagtgggtgtgatgtagggttttttcttctttctttcttttgcaggagtttgtggtaacttgagattcaagacaagagctgttatgctgtttcctagctaggagcaggcttgtggcagcctgattcggggctgacctttcaaaccagagggttgctggtcctgcacatgagtggaaatacactcatggggaagcttccatgatgcacagtatctgctgttcttcagtcctttgtctttctttgtcattcagttctaggcctttcctctgcacgctcaatgcccagtaaaatttcaggattaactaaagaagaggagaaaaagaagaaaagattctttcttaaaagtttctaatgttattttccttctgaagtctgagcccatttctggggggagaaaaaaaaagcaaatcagaaaacccacggtttttctttttttctttttttctttttttcttttttggctttaaaacaaagggaaaaaagagtttaaacaaaaaacccacaattgaacttccaggaaagtgtgaagacccaaaacagctttgtctccaaagaagatagctctctgactgctttggatagtctcctacgcaccattttgtcaggtgggagatttggaatacacatgcaggacgttagactgttgggacagccattttccaaca

SEQ ID NO: 287111 - DNA, 1000 bp, Homo Sapiens; identical to SEQ ID NO: 220695

SEQ ID NO: 287112 - DNA, 396 bp, Homo Sapiens
actccgccttccacgtgcacccactgcctcttcccttctcgcttgggaactctagtctcgcctcgggttgcaatggaccccaactgctcctgtgccgctggtgtctcctgcacctgcgccagctcctgcaagtgcaaagagtgcaaatgcacctcctgcaagaagagctgctgctcctgctgccctgtgggctgtgccaagtgtgcccaaggctgcatctgcaaaggggcatcggagaagtgcagctgctgcgcctgatgtcgggacagccctgctcccaagtacaaatagagtgacccgtaaaatctaggattttttgttttttgctacaatcttgacccctttgctacattcccttttttctgtgaaatatgtgaataataattaaacacttag

SEQ ID NO: 287113 - DNA, 372 bp, Homo Sapiens
agtcccagcgaacccgcgtgcaacctgtcccgactctagccgcctcttcagcacgccatggatcccaactgctcctgcgccgccggtgactcctgcacctgcgccggttcctgcaaatgcaaagagtgcaaatgcacttcgtgcaagaaaagctgctgctcctgctgccctgtgggctgtgccaagtgtgcccaaggctgcatctgcaaaggggcgtcggacaagtgcagctgctgcgcctgatgctgggacagccccgctcccagatgtaaagaacgcgacttccacaaacctggattttttatgtacaaccctgaccgtgaccgtttgctatattcctttttctatgaaataatgtgaatgataataaaa

SEQ ID NO: 287114 - DNA, 1000 bp, Homo Sapiens; identical to SEQ ID NO: 221775

SEQ ID NO: 287115 - DNA, 1000 bp, Homo Sapiens; identical to SEQ ID NO: 221776

SEQ ID NO: 287116 - DNA, 1000 bp, Homo Sapiens; identical to SEQ ID NO: 221777

SEQ ID NO: 287117 - DNA, 1000 bp, Homo Sapiens
ggccctgaggaactataggaacacccaagccatcctcaaggatacccagctccacctagatgatgctctccggagccaagaggacctgaaggaacagctggctatggtggagcgcagagccaacctgctgcaggctgagatcgaggaactacgagccactctggaacagacggagaggagcaggaaaatcgcagaacaggagctcctggatgccagtgaacgtgttcagctcctgcacacccagaacaccagcctgatcaacaccaagaagaagctggagacagacatttcccaaatccagggagagatggaagacatcatccaggaagcccgcaatgcagaagagaaggccaagaaggccatcactgatgctgccatgatggctgaggagctgaagaaggaacaggacaccagcgcccatctggagcggatgaagaagaacttggaacagacggtgaaggacctgcagcatcgtctggatgaggctgagcagctggccctgaagggtgggaagaagcagatccagaaactggaggccagggttcgtgaacttgaaggtgaagttgaaagtgaacagaagcgcaatgttgaagctgtcaagggtctacgcaaacatgagagaaaagtgaaggaactcacttaccaaactgaggaagaccgcaagaatattctcaggctgcaggacctggtggacaagctgcaagcaaaggtgaaatcctacaagagacaagctgaagaagcggaggaacaatccaacgtcaacctctccaaattccggaggatccagcacgagctggaggaggccgaggaaagggctgacattgctgagtcccaggtcaacaagctgagggtgaagagcagggaggttcacacaaaaatcataagtgaagagtaatttatctaactgctgaaaggtgaccaaagaaatgcacaaaatgtgaaaatctttgtcactccattttgtacttatgacttttggagataaaaaatttatctgcca

SEQ ID NO: 287118 - DNA, 1000 bp, Homo Sapiens; identical to SEQ ID NO: 221778

SEQ ID NO: 287119 - DNA, 1000 bp, Homo Sapiens; identical to SEQ ID NO: 116526

SEQ ID NO: 287120 - DNA, 1000 bp, Homo Sapiens; identical to SEQ ID NO: 221779

SEQ ID NO: 287121 - DNA, 1000 bp, Homo Sapiens
ttcggccttgagcgcatggccgctcccatcgaccgtgtgggccagaccattgagcgcatgggctctggcgtggagcgcatgggccctgccatcgagcgcatgggcctgagcatggagcgcatggtgcccgcaggtatgggagctggcctggagcgcatgggccccgtgatggatcgcatggccaccggcctggagcgcatgggcgccaacaatctggagcggatgggcctggagcgcatgggcgccaacagcctcgagcgcatgggcctggagcgcatgggtgccaacagcctcgagcgcatgggccccgccatgggcccggccctgggcgctggcattgagcgcatgggcctggccatgggtggcggtggcggtgccagctttgaccgtgccatcgagatggagcgtggcaacttcggaggaagcttcgcaggttcctttggtggagctggaggccatgctcctggggtggccaggaaggcctgccagatatttgtgagaaatctgccattcgatttcacatggaagatgctaaaggacaaattcaacgagtgcggccacgtgctgtacgccgacatcaagatggagaatgggaagtccaaggggtgtggtgtggttaagttcgagtcgccagaggtggccgagagagcctgccggatgatgaatggcatgaagctgagtggccgagagattgacgttcgaattgatagaaacgcttaagcagttgccttttttaaacatcgatacgagacctctgaatttgtattttttcttgttaaccattttaatttgttggctggatgtataaagatgtttaaaaaattcagttgctttttggggtaatttgaattacttttttaatgactggggttccatttgactgtttgcattgagattgcaatgtgcgcaattttttttgtagttgtggcatcttgttgacatcgaatatgactttgataataaataccggttcctgaaaaaaaaaaaaaaaaaaaaaaaa

SEQ ID NO: 287122 - DNA, 1000 bp, Homo Sapiens; identical to SEQ ID NO: 116527

SEQ ID NO: 287123 - DNA, 1000 bp, Homo Sapiens; identical to SEQ ID NO: 116529

SEQ ID NO: 287124 - DNA, 1000 bp, Homo Sapiens
ttcgagaatagctttaagtataatgctgatctgacaattgacgtgtaatttgggaagtcattttgataattttgcttaaaccactcattcgttaaagtgattacaaaaaagttcaagaatgatgtccactgctttctaacaagataataaaccccccccctcttttctttttctttatttttatttcttttagctatttgatcctttctgaagcagttgtttctggaagagtctgtgcgcccatggatggctgagcaccactacgacttagtccgggataagggcctccccagtcctctccgggagatgatttgggaaattttataatgcttgttctgttaactcaccgggaccttgagggtccaatgggaccttgagggttttctctgaaatatacaaacttaaaggactctctctgaggttctttgactgacgtccactctcagtctggcccctgtgctcccctgtgtgtaccctggagtttctgtgtccaattgttggcatctaggtcttggctcaagattaggatgtgggccccactttagaggcacagactatgaaaagctgagttagtgcgcccgggacgccaggcaagcagcttttacagtttggcatcttattgcaggtgcttcgtgcacagtcagctgaaatagccaatgccaggtgctccaaccaccttatttccttgttttgttgattagaacaacacagaaaaaagcaaatataaatttttaatgactccatttaaaaatatcacagggtgggggcaaggaaattagctgagattcatctcaggattgagattctatccccccttccccgcccccagcagtgtcgctccaattcaaattagtggagaaaagattacagtaggccctgagccgactgtgaattcggtgcttggccaaggtaacactcatcgtattcacggagtgaaatactatatgatgatagttattatattatatgacgacttcattcacttcccaaatcacagggt

SEQ ID NO: 287125 - DNA, 1000 bp, Homo Sapiens
atctctcttgcatccttaaagggcctgagtctcaacatggctgctgatccatacttacacatcttactgtcaatcttgcctacattgattatagaaccactattacgtgaaaaggcttgaaacaaccaacatatacaaataaaaccctgccttgtaaaatagtaaaagagaagccatatattggcttttcttcttaacttgggagatatattgaaacaaggtgctttataagattattgtacttaagactttaatagtgttacttggatagcttatatgaattttgagaattttatatgaattttgagaaagcaagttcaaaagaactctggtaattttcctgtatgtacaatttaaagagtgaataagattattagaattcagcaatagagatatatctattttcaattcaactacagaaatatattttattggccgggtgcggtggctcatgcctataatcccagcactttgggaggccaaggtgggcagatcaggaggtcaggagatcgagaccatcttggctaacaaggtgaaaccccgtctctactaaaaatacaaaaaattagccaggcgcggtggcgggggcctgtaatcccagctactcaggaggctgaggcagaagaatggcatgaacccgggaggaggagcttgcagtgagccgagatagcgccactgcagtccggcctgggtgaaagagcgagactccgtctcaaaaacaaaaaaaaaagaaaagaaatatattttattcattcacattaggtcactgtcatactgtcataggctgagagagttcttcaaaaattatgttttcccaagatcagttgcttatagataatgttcaatgacctcaagacatatatttttgagaaattatcattttaaaaaatttggtctatactgattgttttcactgattccaatattattacttataacactgacctctggaaaatattttgttcacaagaaataataaagtataatgatttgttgcatc

SEQ ID NO: 287126 - DNA, 1000 bp, Homo Sapiens; identical to SEQ ID NO: 221784

SEQ ID NO: 287127 - DNA, 1000 bp, Homo Sapiens; identical to SEQ ID NO: 221785

SEQ ID NO: 287128 - DNA, 1000 bp, Homo Sapiens; identical to SEQ ID NO: 117415

SEQ ID NO: 287129 - DNA, 1000 bp, Homo Sapiens
gagcttaaggcctcgaaaggtcaacaccccggctggtagctctcagaaggcgcgagaagagaaggcactactgccattagaactacaagatgacggctctgacagtcggaagtctatgcgtcagtctacagctgagcatacacgacaaacgttccttcgggtacaggagaggcagggccagtcaagacggcgaaaggggccccactgtgagcggccactaacccaggaggaactgctccgggaggccaagatcacagaagagcttaatttacggtcactggagacatatgagcggctcgaggctgataaaaagaagcaggttcataagaagcggaagtgccccgggcccataatcacctatcattcagtgacagtgccacttgttggggagccaggccccaaggaagagaacgttgacatagaaggacttgatcctgctccctcggtgtctgcattgactcctcatgctgggactggacccgtcaacccccctgctcgctgctcacgtaccttcatcacttttagtgatgatgcaactttcgaggaatggttcccccaagggcggcccccaaaagtccctgttcgtgaggtctgtccagtgacccatcgtccagccctataccgggaccctgttacagacataccctatgccactgctcgagccttcaagatcattcgtgaggcttacaagaagtacattactgcccatggactgccgcccactgcctcagccctgggccccggcccgccacctcctgagcccctccctggctctgggccccgagccttgcgccagaaaattgtcattaaatgaagagatgtctagtcctcagaaacttctttcctgccctgattggggctcttgctgttccgtttcttctccctgcttctcccctttgtcatctctgatctttgcctaatctgtttctttttccttttcccctagttcttacaggtttcgttgtgttttttaatctaataaaatagaaagatccctttt

SEQ ID NO: 287130 - DNA, 1000 bp, Homo Sapiens; identical to SEQ ID NO: 116534

SEQ ID NO: 287131 - DNA, 1000 bp, Homo Sapiens; identical to SEQ ID NO: 116535

SEQ ID NO: 287132 - DNA, 1000 bp, Homo Sapiens
tgaggtcacctgcgatttgccccatttcctatctctagcaacctcctgggccccatgcccccaccccttctagaacctgcattcccagggccttcaccacctgaccaaaggtctaggctaacctttggtcatttgtaacaagacctcggaacagacacgtgtgtggcatggtttggcctggggatcttagatgtctgacctgaactattgtagaacagcgctggcttttgggggagcagcaaaaatgagaggagtgctaggtgggtggcctgagcatctgtatccagggacaggactccaaaggcttttggtcccagagctggggtatgttggccccagcccccagcctgtggctcccaaaaggcctctggttttttgtaatctcagtttacagccatttcttaggtttttaattacctttattttattttgccaaacatacctgggaataccttttattttttttttaccttggggtgatggttccaaaccataaatgtgattatagttaacacatgacccttctagcgtcccagccagtgtttttcctgacctctcttctttggagaggaggatggaagggaggggtccggcatgctgctggcattttgctgtgtcctgcagcccctttccgggacacctgggttcacacagctttttagcttacataactggtgcagattttctgtgtggagatgttgccttgaccagccttggctggactttaccaggcatgcagaagcctgtaccaacacagactacagcacccaggaggtgcgagtgtggctgctcagcggttataacaggcctgactgcattgttcaccggattataatgagccaaaatgtttcccggtgtttgctggtttcagggaaggagtttgatatagcagattaaccaccctccttgtagctattggggcttaatggtttcctggtgattcttaccaatccacaataaacatggcccattggcatatctgcaaaaaaaaaaaaaaaaa

SEQ ID NO: 287133 - DNA, 1000 bp, Homo Sapiens
ctctgggtagtgctttaagaatgaacacaatcacgttatagtccatggtccatcactattcaaggatgactccctcccttcctgtctatttttgttttttacttttttacactgagtttctatttagacactacaacatatggggtgtttgttcccattggatgcatttctatcaaaactctatcaaatgtgatggctagattctaacatattgccatgtgtggagtgtgctgaacacacaccagtttacaggaaagatgcattttgtgtacagtaaacggtgtatataccttttgttaccacagagttttttaaacaaatgagtattataggactttcttctaaatgagctaaataagtcaccattgacttcttggtgctgttgaaaataatccattttcactaaaagtgtgtgaaacctacagcatattcttcacgcagagattttcatctattatactttatcaaagattggccatgttccacttggaaatggcatgcaaaagccatcatagagaaacctgcgtaactccatctgacaaattcaaaagagagagagagatcttgagagagaaatgctgttcgttcaaaagtggagttgttttaacagatgccaattacggtgtacagtttaacagagttttctgttgcattaggataaacattaattggagtgcagctaacatgagtatcatcagactagtatcaagtgttctaaaatgaaatatgagaagatcctgtcacaattcttagatctggtgtccagcatggatgaaacctttgagtttggtccctaaatttgcatgaaagcacaaggtaaatattcatttgcttcaggagtttcatgttggatctgtcattatcaaaagtgatcagcaatgaagaactggtcggacaaaatttaacgttgatgtaatggaattccagatgtaggcattccccccaggtcttttcatgtgcagattgcagttctgattcatttgaataaaaaggaacttgg

SEQ ID NO: 287134 - DNA, 1000 bp, Homo Sapiens; identical to SEQ ID NO: 221791

SEQ ID NO: 287135 - DNA, 1000 bp, Homo Sapiens
gatgtcttttttttttctaagcctatatgaaatgaaaaatatattggcaaagtaaatgtttaaaccttttacgttaaaattactttgaaagatgaaaagttagtgctgtttttgtcacgttatactgaaattaaatgtttataatttatattttgggtttatgtataaatcatggaatttatgcaaaaatatgagtagtacagattctcctctaattctgtaggactttgaataatgtgatatttttcttataattggacccttgtgttttgaagaaatgccaactgcttgaagaatctccttgttatttgtattatttgctatagggttagatgttgagaaattctgctgacaaaaaattttaagccagttttacactaaatgttcctcagtctgattaatttgttattggatgtattctgtatctttcttttgtaatttgtgacttttatccacttagcacgaatgattctattaaagaaaatcattaggaagtggtagaaactttaaatcgccccagagtttgcctgtttccatattttattatcttataatcttcgggagtgcttacacttatggagctaacattttcagagatacagcttcttatagtaacactaaaactttcttcctctttggactgaatacctataattataactatatggtagtttaagtttccttgtgattagtcaaaaataccattttagtatgaagcaatgaagtctattatttgttgtcccataattgagaaagcttaaatacaccttttatgtaagagtttagtaagattctagcttagtctacacagatttttatatcaatttgtttatatttttattaatgtcatttctggaagtgtgaaaatgttaatgttcaacaagcaacattaaaaatagatttgaaacatttatatatagagaggtacacatttatttactgtttaggtactgaagattatcacttaataaaaaatatatatcccaaaaaaaaaaaaaaa

SEQ ID NO: 287136 - DNA, 1000 bp, Homo Sapiens
agcagatggtgctttttacccagatgaaatacaaaggccacctgtcagagtcccctcttggggactggaagacaatgttgtctgcagccagcctgctcgaaactttagtcggcctgatggcttagaggactctgaggatagcaaagaagatgagaatgtgcctactgctcctgatcctccaagtcaacatttacgtgggcatgggacaggcttttgctttgattccagctttgatgttcacaagaagtgtcccctctgtgagttaatgtttcctcctaactatgatcagagcaaatttgaagaacatgttgaaagtcactggaaggtgtgcccgatgtgcagcgagcagttccctcctgactatgaccagcaggtgtttgaaaggcatgtgcagacccattttgatcagaatgttctaaattttgactagttactttttattatgagttaatatagtttagcagtaaaaaaaaaaaaaaaaaaccacacctaaaatagaccactgaggagaccatagagcggatgctttcatgcaccctttactgcactttctgaccaggagctactttgagtttggtgttactaggatcagggtcagtctttggcttatcaataaattttaatctctgttaatcttacctgctttaaaaaaaagttcttgtgtgttcgtatctttatttattccctagtttgcagaactgtctgaataaaggatacaaggattatttcaatgttactgcactgaaaaacgtgtatgtattagtgtgctagattatttagcagaatattcacaagtttctgttgaccttgttgattgagcatgactactaaatattatgtaataaaaagcatttgtcataacaaaaaaaaaaaaaaaaaaaaaaaaaaaaaaaaaaaaaaaaaaaaaaaaaaaaaaaaaaaaaaaaaaaaaaaaaaaaaaaaaaaaaaaaaaaaaaaaaaaaaaaaaaaaaaaaaaaaaaaaaaaaaaaaaaaaaaaaaa

SEQ ID NO: 287137 - DNA, 1000 bp, Homo Sapiens
gccgggcaagtacagccagctggtggtggagaccatccgtaggctgggcgagcgcaacggctcgtcgctggccaagatctacaccgaggccaagaaggttccgtggttcgaccagcagaatgggcgcacctacctcaagtactcgatcaaggcgctggtgcagaacgacacgcttctgcaggtgaagggcaccggcgccaacggttccttcaagctcaaccgcaagaagctggagggcggcggggagcggcgcggagccccggcggccgccaccgccccggcccccaccgcgcacaaagcgaagaaggcagccccgggcgcggccggctcccggcgcgcggacaagaagcccgccaggggccagaagccggagcagcgctcgcacaagaagggcgctggcgccaagaaggacaaaggcggcaaggccaagaagacggcggccgccgggggcaagaaggtgaagaaggcggccaagcccagcgtccccaaagtgcccaagggccgcaagtgagcgtgtcggccggtcagagcggccggcgtgggcttttcggtgtttttgtttttctaccccaagtgacgtagattttgtacggctcacgccggccggggccgcgaggcctggtctgagcctcagggaggggccccgggtcctctcagtctttcccctcccccaacgatgtagcgtttttcgttgtttgctttaggtttttgaaacagccccggcgacgcctctattggctctcggccttggcaacggccgtcgtcatggttactggcccctaggcgccgatggccgaggccgcgcctgcccaccgggcggggtcgctggttggccgggcccaggcgcgcggggacgcggaggccgcgcatcctttcccagctccccaccctccttgcctttgggtgcgcgacaaacaatcgctccgggctcagggctgcgcggctcttcccttcattccatgggcctttttttgggcacaataaagcgtttaaacctttc

SEQ ID NO: 287138 - DNA, 1000 bp, Homo Sapiens
caggtgatcatattccagacaaggcaacagtgtttacagatgaagagtcctactcttttgagagcagcaaatttacaaggaccatttcaccacccactttgggaacactaagaagttgttttagttggtctggaggtcttggagatttttcaagaacgccgagcccctctccaagcacagcattgcagcagttccgaagaaagagcgattcccccacctctttgcctgagaataatatgtctgatgtgtcgcagttaaagagcgaggagtccagtgacgatgagtctcatcccttacgagaaggggcatgttcttcacagtcccaggaaagtggagaattctcactgcagagttcaaatgcatcaaagctttctcagtgctctagtaaggactctgattcagaggaatctgattgcaatattaagttacttgacagtcaaagtgaccagacctccaagctatgtttatctcatttctcaaaaaaagacacacctctaaggaacaaggttcctgggctatataagtccagttctgcagactctctttctacaaccaagatcaaacctctaggacctgccagagccagtgggctgagcaagaagccggcaagcatccagaagagaaagcatcataatgccgagaacaagccggggttacagatcaaactcaatgagctctggaaaaactttggatttaaaaaagattctgaaaagcttcctccttgtaagaaacccctgtccccagtcagagataacatccaactaactccagaagcggaagaggatatatttaacaaacctgaatgtggccgtgttcaaagagcaatattccagtaaatgcagactgctgcaaagcttttgcctgcaagagaatctgatcaatttgaagtccctgtttgggaatgaggcacttatcagcatgaagaattttttctcattctgtgccattttaaaaatagaatacattttgtatattaactttaaaaaaaaaaaaaaaaaaa

SEQ ID NO: 287139 - DNA, 1000 bp, Homo Sapiens
tcattgccggggccaaccacagcggggccatccgaaggcagctgtggcttaccggggctggggaagggccagccccaaacctctttcagttgctggtgcagatccgtgaggaggaagccaaggaggaggaggaggaggctgaggccacccttctgcagttaggcctggaagggcacttctgagtgccaggaaaggcagctttagtgcagacctagatcacagctacttttcttgtccctgtggggtcttacagatgtgtctctgagtagtaaaggcttagccttgttctgttttgttgttttttggaggggaaggttagtcaggcctgagtattcatgtaacattctaaaattgtgccagcgagcaccgtgaacgactgcaatgcaagcgggtcttgctggctaaaatgccaggtaaagggttggttggacacagcgcttagtgcacgctgtcatcatggacatcataatcagttgtgaaaaacacgcgaacctatgacacttcttattccacactgaatgtgaaattgcatgttcagatgtttactacgaggcctggctcacaggaagtgttcagtaaaagtatgcactgttagattactgataacgcggatagatttttgtttaccataaattgttccagatttatattaatggaaggaagtgtgcatttattagctattactcaactttacaatgcaaacatcttatttctcatctttaaacatgtcgaccagtttaattgaaaagtattctgagactgcaaaatggggtgttaaaaaatactgcagttacggagctgtgtaaaccagtttctcattgcataagatacagatgtaaattgcatggagaggttgatatgcacctgtacagtaattcactcccccatttcacatctttgtcagagaatagttcttgttcatactgagtgttctaaatttgaagttatatatacaaattaaaatattttaaaaattcaaaaaaaaaaaaaaaaaaaaaaa

SEQ ID NO: 287140 - DNA, 1000 bp, Homo Sapiens
ttatcaaaagaagtatcttttgctgttgattggtggattccaggattctgaacaagaaacactctccatgattgcccatttgggggtatttccttccaaagcagaacggaaaatcacatctcgtcctttcaccaggttccgcacggccgtcagggtggtcattgcaatattaagattacgttttttggttaagaaatggcaagaagtagatcggaaaggagctctggcacaaggcaaagcccctcgcccagggccccgagcacgacagccgcagtctccacccagaaccagagagtcccccccaacccgggatgtaccctctggccacaccagggaccctgccagaggccgcagactggcagcagcagcctccccacacagtgggggaagagccactccatccccaaattcaagattagaaagatccctgactgcttctcaagatccagaacattccttgacagagtatattcaccatttagaagtgatccagcaaagattgggaggggtactaccagattctacttcaaagaaatcctgccacccgatgattaaacagtgaataaaatgtcatggctctttcctgcgacaattctatttgaggaaaagatttgtttttcccttttcccaaggaagctcgtgggacagcatgggcactactcttcatgtgcggtgacaccagcccccagatgccttgaattaagtgtcctcacctttatgcatgactgcaaagccagctggagcattttctatggagcctccgtatgttttaggcccatgaccttcgtgaggtgacgggcactcactcccatgagccctggctgtgtgctgttgtgtgcctatcggcagatccatccttcctgcctccaaggaggatacacagagaatggcttcctgttgttttgtttattttcttaacgtgtacagatggaaacttcatttaaaaataaaaacaaaacaactcaaaaaggaataaaatttaatcactgttttgtttgtg

SEQ ID NO: 287141 - DNA, 1000 bp, Homo Sapiens
tcacggtggccattgacttcactgcctccaatggggacccgaggagcagccagtccctgcactgcctcagtccccgacagcccaaccactacctgcaggccctgcgtgcagtgggaggcatctgccaggactatgacagtgataagcggttcccagcttttggctttggggctcgaatcccccccaacttcgaggtgtcccatgactttgctatcaactttgacccggaaaatcctgaatgtgaagagatctcaggggtcatcgcctcctaccgtcgttgcctgccccagatccagctctacggccccaccaatgtggcccccatcatcaaccgtgtggctgagccggcccagcgggagcagagcaccggccaagccacgaagtactcggtgctgctggtgctcactgacggtgtggtgagcgacatggctgagactcgcactgctatcgtgcgtgcctcccgcctgcccatgtccatcatcatcgtaggcgtgggcaatgctgacttctctgacatgcggctgctggatggcgacgacggccccttgcgctgcccccgaggggtgcctgcagcccgagacattgtccagttcgtgcccttccgagacttcaaggatgctgccccctctgcactcgccaagtgtgtcctggctgaggtgccacggcaggtggtggagtactacgccagccagggcatcagccctggggctcccaggccctgcacactggctacgactcccagccctagcccgtgactgcctccctccggaccgacactccctcagcctctcagtgcctgtcctgaccctcgtgactccagtgaccaatgcctccacctcttggaccaggtgtgccccctgggttctggacgtgagtggtgggtcctgctcctatctctccaaaccccatacccttcaatgctgtggcccctcagtgacttccttgggtgatcctgactttctagccattaataaagagaactgctcctagcaaaaaaaaa

SEQ ID NO: 287142 - DNA, 1000 bp, Homo Sapiens; identical to SEQ ID NO: 221793

SEQ ID NO: 287143 - DNA, 1000 bp, Homo Sapiens; identical to SEQ ID NO: 116537

SEQ ID NO: 287144 - DNA, 1000 bp, Homo Sapiens
tggggacacagcctcagtacccagtcttttccctagttcctgaaactttcctaggaccttaagagaatagtaggaggtcctatagcattcccagtgtcactagaattttgaagacaggaaagtggaggttagtctgtggcctttttttcatttagccattgcacagtcagctgcagaagtcctgctgaccacctagtcatggacaaaggcccaggaccagtgacaccctgcgtccctgtgtgcattaagttcattctgggtcgcagccatgaagtgtcaccagtatctactactgtgaagtcagctgtgctgttttccattcgcttccacggcttctgcctcctgccataaaaccagcgagtgtcgtggtgcaggcaggccctgtggcctgctgggctgagggaagtcagagccccagggcgccacgaagcagccactgggataccccaccccgccccgccctgcccccccccccccccaccagtcctgcccccgcatggagcccccgtgattagtagcccgtatgatcacgtagacccacccaacacactcctgcacactggccccggcccacggcacagcaatcccctgcgcgtggatttcacctcaccctttgtaccagatgttgagtgaccagctctgtggccctgtgtcgtcagaggcttgtgattaactgtggcggcagacacagcttgtccacagcttgggccaggcttcccctgtcctcccaccggtcggctgcttggcaaggctgttcaggacgtgcacttccccaagtcggcactgagtggcccagcaccgcctagccctgccaccccactgccctcctgggccttctgctggatgggcacctggggggttctggtttttacttttttaatgtaagtctcagtctttgtaattaattattgaattgtgagaacatttttgaacaatttacctgtcaataaagcagaagacggcagttttaaagttaaaaaaaaaaaaaaaaaaaaaaaaa

SEQ ID NO: 287145 - DNA, 1000 bp, Homo Sapiens; identical to SEQ ID NO: 221794

SEQ ID NO: 287146 - DNA, 1000 bp, Homo Sapiens; identical to SEQ ID NO: 116538

SEQ ID NO: 287147 - DNA, 1000 bp, Homo Sapiens
atctgcaacatttgcaatctttttgcactaaaagtgggcaggagtcggcatgtgcccatcagagagacggctcctcagatgctcagctaagcctaagcgcttccaagcctgaaggccccttcagcttctcatgtgaattaccaacccctggattttccttgtgggggtacaagagcaggagtggggcaagagtttgaaaataaagccgcttccttgtgaactaactatattttagccataactgtttgtgatgtacacaatgttaagggatttatatgcagtgggcttttctgggagaaagttattcagctcttgagcaagtttaagtctggctgaatcctgaggccactgtgaatttgctgatgttcttccaactcagttgagtgattttaaggttttccaaatcttctatggctctctttttaatatatatatatatatatatatatatatatatatatatatatatatatctatctggtagatcacatgtagatgtacagtgtgtatattaagctgaatttcaaccaactttattactaagaccagcctagcagggcattcatctttgatgttcttccttttcacatttcagaatcggcaatgcctggcccactcctgagagctctagttttctagttttccatttccagattgcgccagcattacagtaactaactctttctaaccaaccgtgatgccacgtaacttaccctatggacaaaagcaggaatgactaacacatcctaggagggaaagtccagtgtacctgtcatcacggacgcactgtggtcacagactggaatacgaaatactacagccctgctcccaggtgtgcatcttactggatgaggttgctgtgattgagatagttaaatacatgctaatttaaaaatgcagatgttttacatttgatttctaccaagagttgaaatgttgagagatgattaaaaataataataataaagtgtcttccattgttaaaaaaaaaaaaaaaaaa

SEQ ID NO: 287148 - DNA, 1000 bp, Homo Sapiens; identical to SEQ ID NO: 221797

SEQ ID NO: 287149 - DNA, 1000 bp, Homo Sapiens; identical to SEQ ID NO: 116539

SEQ ID NO: 287150 - DNA, 1000 bp, Homo Sapiens; identical to SEQ ID NO: 224255

SEQ ID NO: 287151 - DNA, 1000 bp, Homo Sapiens; identical to SEQ ID NO: 116540

SEQ ID NO: 287152 - DNA, 1000 bp, Homo Sapiens
ctgagtagctgagactacaggtgagtgccaccacactcagctaattttcaaattttttgtagacagggtctccctatgttgcccaggctggtcttgaactcctagactcaagtgatcctcctgtcttggcctcccaaagtgctgagattacaggtgtgagccactgtgcccagcagtttcccagaatatatttaaatgcaaagttacatgaggggaaaacatgtatgtttgctcctgttgttactgggtaggttctgaacagcagaaacccatgtgcagggtgggctggtgaaggcccctctccgcaaggtggtagcaggaaaaggtccttgacttgatgaatttggtctgcctctgagccactggaggaagctgttttgagccagggttttttggcctaaagccagcatttcctcagtctccctttgtggttcgaaggatatggactattgcaatacatttcttccttcaaatcctgccactgttttgttggcccacaactaataggacctcaaaataagccatgctgctttgcacacacactagccttcttttgtacttttcattctggatgggcttggccaaaacaggctcaggccaaagacctcccaagctgtatgtacttccagtatcctgaaacagtgtttggtgacataatgccaagggtaaacaagcctgatttaggcactgctttatccaggggcttcacccatgaaattaataaaacttatctgagtcacttgaaacttggttcccagaaaacacatttctggtttataatctccttttatgctcacctgacattaattatctatccttgatgatgtgtttaaactgagtagcagaaaacagaggccacactttctgggaaattttaaaggaagaaaccatttttaatgagatgaaaatatttaacgaatttaaaaagctaatgacaattttgagaaaaggtttgggatgtatattgctatgtaatttaataaactgattttatggatat

SEQ ID NO: 287153 - DNA, 1000 bp, Homo Sapiens; identical to SEQ ID NO: 221798

SEQ ID NO: 287154 - DNA, 1000 bp, Homo Sapiens; identical to SEQ ID NO: 116542

SEQ ID NO: 287155 - DNA, 1000 bp, Homo Sapiens
gaagttattatctgcatctttatcaaccccaagccccacttcctccctgacctccccatgccctccccagcctctcccagcacaagtggggcaaagccagcatgcaagcagaccccaccaccacagcccacctccgtcctcacatacgtgcaggctggctcgggagtccagtgagcagagcattggacttggctggccagagggtctctgagggcaagagacatggccaaccaagggcaaggagtgaccctgtggagggttctgccgaactcaatgcagtgagaagagggacagggacaagtagtccttgaaactgagccccattctgaatccctgcaggccaagtcattgctcagccaggactcagttcatgggggaaacttgacctgctgcagtccctgagtcttgtcctcctgagaggaagccctggcttccaaggctgggagctggaggatgaccttcggtcggtctgtctgggttctccctgcagacagcttcctagctcatgcccatagctcatgctccctgccgagaaagtggaggacgtggtacagggttgcagatgtttagttttaaaaattcaattataaaaataataaatgctcatgatagaaaatttggaaagtgcaaataagcaaaaatgaaaacaattttaaaaatgtaaaacctctcttgccagggaatgggggaagggcaagtgaggagttctttaatgggtgaagagtttcagttttgcaaaatgaaaaagttctggagatcagttgtgcaacaatatgaatatacataacaatactgaactatacactgaaatggttaagatggtacattttatgttatgtgtattttaccacaatttttataaaaagaggattaaatctaaaggaaagaaaaaattaaaaccacccataactttactctgaagcagtaacagtggcatgtttcctcctaaaaaaaaaaaaaaaaaaagaagaaaaaaaaataaagaaaaaaaaaaaaaaaa

SEQ ID NO: 287156 - DNA, 1000 bp, Homo Sapiens; identical to SEQ ID NO: 116543

SEQ ID NO: 287157 - DNA, 1000 bp, Homo Sapiens
gccaggactctgctggctgatctggaaggaatgaagctgcagtttccccggcccaaggaccaggcggcattgcagaggaaggcagactccgtcagtgacagactccttgcagacacgagaaagaagaccaagcaggcggagaggatgctgggaaacgcggcccctctttcctccagtgccaagaagaagggcagagaagcagaggtgttggccaaggacagtgccaagcttgccaaggccttgctgagggagcggaaacaggcgcaccgccgtgccagcaggctcaccagccagacgcaagccacgctccaacaggcgtcccagcaggtgctggcgtctgaagcacgcagacaggagctggaggaagctgagcgggtgggtgctgggctgagcgagatggagcagcagatccgggaatcgcgtatctcactggagaaggacatcgagaccttgtcagagctgcttgccaggctggggtcgctggacacccatcaagccccagcccaggccctgaacgagactcagtgggcactagaacgcctgaggctgcagctgggctccccggggtccttgcagaggaaactcagtctgctggagcaggaatcccagcagcaggagctgcagatccagggcttcgagagtgacctcgccgagatccgcgccgacaaacagaacctggaggccattctgcacagcctgcccgagaactgtgccagctggcagtgagggctgcccagatccccggcacacactcccccacctgctgtttacatgacccagggggtgcacactaccccacaggtgtgcccatacagacattccccggagccggctgctgtgaactcgaccccgtgtggatagtcacactccctgccgattctgtctgtggcttcttccctgccagcaggactgagtgtgcgtacccagttcacctggacatgagtgcacactctcacccctgcacatgcataaacgggcacaccccagtgtcaataacata

SEQ ID NO: 287158 - DNA, 1000 bp, Homo Sapiens
attttcacatgaacccttggctgtagttgcctttcctagctccactctaaggctaagcatcttcaaagacgttttcccatatgctgtcttaattcttttcactcattcacccttcttcccaatcatctggctggcatcctcacaattgagttgaagctgttcctcctaaaacaatcctgacttttattttgccaaaatcaatacaatcctttgaattttttatctgcataaattttacagtagaatatgatcaaaccttcatttttaaacctctcttctctttgacaaaacttccttaaaaaagaatacaagataatataggtaaataccctccactcaaggaggtagaactcagtcctctcccttgtgagtcttcactaaaatcagtgactcacttccaaagagtggagtatggaaagggaaacatagtaactttacaggggagaaaaatgacaaatgacgtcttcaccaagtgatcaaaattaacgtcaccagtgataagtcattcagatttgttctagataatctttctaaaaattcataatcccaatctaattatgagctaaaacatccagcaaactcaagttgaaggacattctacaaaatatccctggggtattttagagtattcctcaaaactgtaaaaatcatggaaaataagggaatcctgagaaacaatcacagaccacatgagactaaggagacatgtgagccaaatgcaatgtgcttcttggatcagatcctggaacagaaaaagatcagtaatgaaaaaactgatgaagtctgaatagaatctggagtatttttaacagtagtgttgatttcttaatcttgacaaatatagcagggtaatgtaagatgataacgttagagaaactgaaactgggtgagggctatctaggaattctctgtactatcttaccaaattttcggtaagtctaagaaagcaatgcaaaataaaaagtgtcttgaaaaaaaaaaaaaaaaaaaaaaaaaaaaa

SEQ ID NO: 287159 - DNA, 1000 bp, Homo Sapiens
cctaacagtgtttcttcccctcggccccacggcccatactcaccccttcacctgaggcttctcccctctcaacttgctgttgatttcttttgaggggtaaaagaaagaccgagttcattgaagcagagatgggaggtggtgaggcgtcctcacctccccccaccacagctgtggctggtaaggcaactgcttgaccactggcccagcaagcagaggcgggcaggaggatctgggcatcctgagccccttccctgaggctgtctcctgggaatgctggaccagggggattacttcccccacccacacccccatttggacatctggggaagtggagattaacccctcccccagactcgtgccttgcctctcaggacctggcacagtggctggccttatggagtatggaaaaggcctctgccttcctcaggagggacacatagtgggtcatcaccctttctcacacctgcttcccaatgagcactcagcagcatggctgagacctggggcttgacaggcctgcgctccttagattaggatgctctggtattcctggggccagttaaaatgggtcagtgaggggctctcctggcctcaatctccatctttagggtctccacagactaacattgaagtcttccagaaacctcgaggagctgggctagatacttcgagagtagccctgtcttgtcccctcctacccccagattagcaccacccctctcactcttgggttggatgctatgggaattacaacccatcactcccaatgcctccctttcctggaggagcctgctgcattctcctgctgagggatcccagagagggcaggtgcccaccccacaggccctttcctggaccatggagccaggtgaaacctgtctggccccttacccattgggttcttactccttcacaacggtcagcactcctctcccagcccccctgcccactgttctcaataaaatgtgagtggtgagaggccaaaaaaaaaaaaaaaaaa

SEQ ID NO: 287160 - DNA, 1000 bp, Homo Sapiens; identical to SEQ ID NO: 116544

SEQ ID NO: 287161 - DNA, 1000 bp, Homo Sapiens; identical to SEQ ID NO: 221801

SEQ ID NO: 287162 - DNA, 1000 bp, Homo Sapiens
attgacatgctgtatgggcagccagagaagaacagccaccgttatctggggctgaagaccagaaacatcaacgggaagaaaatggtttaccttgttgtttgatgaatgatggtttcatgagtcacaagcaagcgttcccccaactgctgagtctgtgggattaaggggattagggagtgtcagtggcctagtcatgctttctactcatgtccttcacaaggcacatcccctacatttggaagaatccccaatcttgtcctctgctcttgggagtgtaaaagttgggagtgtagtgtagcatctggggagacagcaggatcacagtgtgggattcctggactgatttccctttagaggggagttatgtgactccccgtacaagggcaaccctgtttctttggtgcctgcagtttagagaaggcagagccactggttttgagaaccagatttgagagagggacctggccagggtggagcattgtctgggtgtttctgcgcttgacccatgctggaagctaatggcctgttgctcctgacagagccccaaactcctcggcctcactgggaggcccctttgtagaccagggctcccctcctcttgttccccctgggcttagggcctcgtggggagttccaggacttgcttcatgcttgagaatgcagatgtggtgcttctcatttattcttaaagctactggtagttaaagtaaaattcagtaacattttctgaccaagagacatgttttgttaaacaacaaaaaggtacatatgggttcacattgaaatatgtctatatgctgaatatagcaacatatgcatctaagatttgggcatttggttattaatagcgtgctggactattcaggaataaggaaaatgtggtttatcacttaagagaaacaagggctggtagctgtactattttcactcagaagcatgttcatttatgtagatgccactttaagctttatcagaattaaatgtgagatttcttctttga

SEQ ID NO: 287163 - DNA, 1000 bp, Homo Sapiens
tcttcaattacacaatgtgacaaaagcagaaaaacctgcaagagtatcaaaagatgttgaagatgtaccagcttcaaagaaagctaaagaaggaactgaagatgtgtctcccacaaagcagaaaagtcccatcagtttcttccagtgtgtctacttggatgggtacaatggctatggatttcagtttcctttcactcctgcagaccgccctggagagagctctggtcaagcaaattctccaggacagaagcaacaaggacagtaaacacacatgtatgacccttacaagtgctttaagattttaaaaatgtgatgttttgtccacagtagttcaggcaattaagaatatgcaacccagagaatttctgtgaaaacattttgctctttggcctggtgtggacggaaagggtggccaaatggattgagtgatgagcagacatgtttaagggtctaagtctcaagaatctgttatgtgtgtttgctgcggtgggagggggtgcttgtatttatcttatttccagtcactataaggttgtacacaaactaatttaaagtttacttaataatggtatctttaaaataattgacacaattgcaaaatgaattcctggcttcagttagctattatttttttaatgacaacatagactgtgctctaagtttaaaagatggggaagcttatataaaagtgacccttttgcatcatatgggtatctaaacttaatttacccaataagttgatgcttaatgattttattttatttttgtctattttctattttagttgtggctttgctctaagaatgggtaatagttgtactacagactgctataaatttcttgtgatactcttttagagctcaaaatatctctgagctttagacatggtaaggtggagagtaaatgcttgataaatctttaagatatgtcttgaatgataattaggacattcagtccagtggaaatacaccattcaattagtcaggtctggtgaatttcc

SEQ ID NO: 287164 - DNA, 1000 bp, Homo Sapiens; identical to SEQ ID NO: 116546

SEQ ID NO: 287165 - DNA, 1000 bp, Homo Sapiens; identical to SEQ ID NO: 221803

SEQ ID NO: 287166 - DNA, 1000 bp, Homo Sapiens
gtccttggtgatagaaatgggtttggaccgcatcaaggagctgcccgaactctggctggggcaaaacgagtttgattttatgacggacttcgtgtgcaaacagcagcccagcagagtgagctgttgactcgatcgaaaccccggcgaaagaaatcaaacccccaacttcttcggcgtgaattaaaagaaacattcccttagacacagtatctcacttttcagatcttgaaaggtttgagaacttggaaacaaagtaaactataaacttgtacaaattggttttaaaaaaaattgctgccacttttttttcctgtttttgtttcgtttttgtagccttgacattcacccacctcccttatgtagttgaaatatctagctaacttggtctttttcgttgtttgtttttactcctttccctcactttctccagtgctcaactgttagatattaatcttggcaaactgcttaatcttgtggattttgtagatggtttcaaatgactgaactgcattcagatttacgagtgaaaggaaaaattgcattagttggttgcatgaacttcgaagggcagatattactgcacaaactgccatctcgcttcatttttttaactatgcatttgagtacagactaatttttaaaatatgctaaactggaagattaaacagatgtgggccaaactgttctggatcaggaaagtcatactgttcactttcaagttggctgtcccccccgccgccccccccacccccatatgtacagatgataatagggtgtggaatgtcgtcagtggcaaacatttcacagatttttattttgtttctgtcttcaacatttttgacactgtgctaatagttatattcagtacatgaaaagatactactgtgttgaaagctttttaggaaattttgacagtatttttgtacaaaacatttttttgaaaaaatacttgttaatttattctattttaatttgccaatgtcaataaaaagttaagaaa

SEQ ID NO: 287167 - DNA, 1000 bp, Homo Sapiens; identical to SEQ ID NO: 221804

SEQ ID NO: 287168 - DNA, 1000 bp, Homo Sapiens; identical to SEQ ID NO: 116548

SEQ ID NO: 287169 - DNA, 1000 bp, Homo Sapiens
atgaacacgtttagtgtggtgccttcgcccaaagtgtcagacacagtggtggagccctacaacgccaccctctcagtccaccagctcgtagaaaacacagacgagacctactgcattgataacgaagctctctacgacatttgcttcagaaccctaaagctgaccacgcccacctatggtgacctgaaccacctggtgtctgctaccatgagtggggtcaccacctgcctgcgcttcccaggccagctcaatgctgacctgcggaagctggctgtgaacatggtcccgtttccccggctgcacttcttcatgcccggctttgccccactgaccagccggggcagccagcagtaccgggcgctgaccgtgcccgagctcacccagcagatgtttgatgccaagaacatgatggctgcctgcgacccccgccatggccgctacctgacggttgccgccgtgttcaggggccgcatgtccatgaaggaggtggatgagcaaatgcttaatgtccaaaacaaaaacagcagctattttgttgagtggatccccaacaatgtgaaaacggctgtctgtgacatcccacctcgggggctaaaaatgtccgccaccttcattggcaacagcacggccatccaggagctgttcaagcgcatctccgagcagttcacggccatgttccggcgcaaggccttcctgcactggtacacgggcgagggcatggacgagatggagttcaccgaggccgagagcaacatgaatgacctggtgtccgagtaccagcagtaccaggatgccacagccgaggaggagggcgagttcgaggaggaggctgaggaggaggtggcctagagccttcagtcactggggaaagcagggaagcagtgtgaactctttattcactcccagcctgtcctgtggcctgtcccactgtgtgcacttgctgttttccctgtccacatccatgctgtacagacaccaccattaaagcattttcatagtg

SEQ ID NO: 287170 - DNA, 1000 bp, Homo Sapiens
ctgtaggtttacacacaagtaaatctttttttcttgaatttaatctgggcactttgcactgccacaggggtgacgatggaactatgtatatagttaggatgttttgatttcggtaaaaaatatatgtcccatcgttgctatcaccagtacctctcagcttactcttcaggggatatgaaacaatctgtagattgggtttccataacagggaagtccgtcctaatgccaagtttctaattaatttgcttagttctgagccatttattctgctacactttgaaagatatattagttctgacttattgttggggctttattttatttttatttttttgagatggagtttcactcttgtgcccaggctggagtgcaatagctcgatctcggctcactgcaacctcgcctccctggttcaagcaattctcctgcctcagcgattacaggaatgcaccaccacgcccagctaattttgtagagatggggtttctccatgttggtcaggctggtctcaaactcctgacctcaggtgatccgcccacctcggccttgcaaaatgctgggattacaggcatgagccacctgcccagccatgtttggggctttattttataagttagaactttgaagaggaaatggtgctatatgtttattgttattactttgtgtaactttgatgtaatgtttataagctatgagaatcagttataaaagtattagccatttgttgtaaatgccaataaaatattcaccaggggcaagaatgtacattttctttttagaaaaccaaatgtactttagacatgaatgcaactatttaaagaatagcttcatttatgttattccttacatgtcataagattcttacttaaacttggtcttctttcaagttgtttgtatgaagatgctgtacccacttgaacagtcctcaggtgtttacataaatactatgttttacagttttcatattttaaaatattaataaagttaatcgcaacgattc

SEQ ID NO: 287171 - DNA, 1000 bp, Homo Sapiens; identical to SEQ ID NO: 116550

SEQ ID NO: 287172 - DNA, 1000 bp, Homo Sapiens; identical to SEQ ID NO: 221806

SEQ ID NO: 287173 - DNA, 1000 bp, Homo Sapiens
taatttagttaccattttcagtgttatttcaaaggttctttgaagaattttggggcagggcatcagattagagttttaaaatttgagtattttggatatcagtgttcctcatgaagatatacatggatattcaattttgatggcttccagatttgtaagattgtatgttgtatataccattctattaagaaacatgtccactgtgctttcaaacatagataaagcatgataaagattattatttaagatatacttgtatttatacctcagatattcttttgggttttgtacctcaaggcttttttcttcttattgtaaatacactttacgtgaatacagtctaagtgaagaaaataaataaaaggaagaggtttataacttgctctatatctgtacagattataatcaataagtgcactattattaaatgtttaaagtaagggaaaagtctgggctgccttccttaatattgcatctcactcccacccttaaaaccacagattgcaaagcatagcattttagcatcaactacaatcaaaagagcgatttgctgaaggaaaaatcggactgcaaatcattccaaggccaaactgcaactgagccacccactcccaaacaggaaaccctggtgaaggttcaggaagcacggagattctctccaacaaaggtccagttaggaaacgacgctgagaggatgacgacaacgtgcaacagcagaaagatgcttgcaagcagagtcagggtcaccagtgaatgccacaaaagttctctttcccactgtttaatttgacaagagaagaatttgaaggatatgaacattttcaagaactctgctgaggtcacttagagcgccatcacaacttatttgtgtgactaattgcctagattgtaagctctttgagggcagggcttgtctcttacacatctttataatcccctgcagcggctttcagtattttgtacttgtaggcacctaataaatttattatttgctatactg

SEQ ID NO: 287174 - DNA, 1000 bp, Homo Sapiens
atgccctggacttcaacaccaaggttttctgggttcattgtttaaatggcctcttccactcagttattctgttttggtttccactaaaagcccttcagtatggtactgcatttggaaatgggaaaacctcggattatctgctactgggaaactttgtgtacacttttgtggtgataactgtgtgtttgaaagctggattggagacatcatattggacatggttcagccacatagcgatatgggggagcatcgcactctgggtggtgttttttggaatctactcatctctgtggcctgccattccgatggcccctgatatgtcaggagaggcagccatgttgttcagttctggagtcttttggatgggcttgttattcatccctgtggcatctctgctccttgatgtggtgtacaaggttatcaagaggactgcttttaaaacattggtcgatgaagttcaggagctggaggcaaaatctcaagacccaggagcagttgtacttggaaaaagcctgaccgagagggcgcaactgctcaagaacgtctttaagaagaaccacgtgaacttgtaccgctctgaatccttgcaacaaaatctgctccatgggtatgcgttctctcaagatgaaaatggaatcgtttcacagtctgaagtgataagagcatatgataccacgaaacagaggcccgacgaatggtgatggggagagcctgaaaggcaggctctgttacctctctaaggagagctaccaggttgtcaccgcagtctgctaaccaattccagtctggtccatgaagaggaaaggtagatctgagctcatctcgctgatggacattcagattcatgtatattatagacataagcactgtgcaactgtactgtaacaccatctcttttggatttttttaaggtatttgctaagtctttgtaaacggaaattgaaaatgacctggtatcttgccagagggctttcttaaacggagaataagtcagtattcg

SEQ ID NO: 287175 - DNA, 1000 bp, Homo Sapiens
tttgaaggctttagttctgctttctgcctctcctccacagccccaacctcccacccctgatacatgagccagtgattattcttgttcagggagaagatcatttagatttgttttgcattccttagaatggagggcaacattccacagctgccctggctgtgatgagtgtccttgcaggggccggagtaggagcactggggtgggggtggaattggggttactcgatgtaagggattccttgttgttgtgttgagatccagtgcagttgtgatttctgtggatcccagcttggttccaggaattttgtgtgattggcttaaatccagttttcaatcttcgacagctgggctggaacgtgaactcagtagctgaacctgtctgacccggtcacgttcttggatcctcagaactctttgctcttgtcggggtgggggtgggaactcacgtggggagcggtggctgagaaaatgtaaggattctggaatacatattccatgggactttccttccctctcctgcttcctcttttcctgctccctaacctttcgccgaatggggcagcaccactgacgtttctgggcggccagtgcggctgccaggttcctgtactactgccttgtacttttcattttggctcaccgtggattttctcataggaagtttggtcagagtgaattgaatattgtaagtcagccactgggacccgaggatttctgggaccccgcagttgggaggaggaagtagtccagccttccaggtggcgtgagaggcaatgactcgttacctgccgcccatcaccttggaggccttccctggccttgagtagaaaagtcggggatcggggcaagagaggctgagtacggatgggaaactattgtgcacaagtctttccagaggagtttcttaatgagatatttgtatttatttccagaccaataaatttgtaactttgcagcggaaaaaaaaaaaaaaaaaaaaaaaaaaaaaaaaaaaaaaaaaa

SEQ ID NO: 287176 - DNA, 1000 bp, Homo Sapiens; identical to SEQ ID NO: 116551

SEQ ID NO: 287177 - DNA, 1000 bp, Homo Sapiens; identical to SEQ ID NO: 116552

SEQ ID NO: 287178 - DNA, 1000 bp, Homo Sapiens; identical to SEQ ID NO: 116554

SEQ ID NO: 287179 - DNA, 570 bp, Homo Sapiens; identical to SEQ ID NO: 116555

SEQ ID NO: 287180 - DNA, 1000 bp, Homo Sapiens; identical to SEQ ID NO: 116556

SEQ ID NO: 287181 - DNA, 1000 bp, Homo Sapiens; identical to SEQ ID NO: 116557

SEQ ID NO: 287182 - DNA, 1000 bp, Homo Sapiens
tgacaatgaattgtcgcctgagtgcctggatggagcccagcacttcctaaaagatgatggtgtgagcatccccggggagtacacttcctttctggctcccatctcttcctccaagctgtacaatgaggtccgagcctgtagggagaaggaccgtgaccctgaggcccagtttgagatgccttatgtggtacggctgcacaacttccaccagctctctgcaccccagccctgtttcaccttcagccatcccaacagagatcctatgattgacaacaaccgctattgcaccttggaatttcctgtggaggtgaacacagtactacatggctttgccggctactttgagactgtgctttatcaggacatcactctgagtatccgtccagagactcactctcctgggatgttctcatggtttcccatcctcttccctattaagcagcccataacggtacgtgaaggccaaaccatctgtgtgcgtttctggcgatgcagcaattccaagaaggtgtggtatgagtgggctgtgacagcaccagtctgttctgctattcataaccccacaggccgctcatataccattggcctctagccctgcgtgccaagtgtccagagccttggaagcagcttcaggttcctgctcctgtagtacagaaggtgcagtacatctatgggctgtgattcccccttgcccatcagagaggagcatttcaatctgctttcctgccttacatcaaggtgggcaagggattataattaattgcagggctcaagccaccaatctatgaagacctcaggccagggggtgaggaattagtgctggatttgaagctacgcactcagcctcaagaactccctggaatatccctgagaacatggggtttgaacggattttcagcctttttctgttcttgttttgatggttttgtgtaagaggaaataccaataaagttatagccctttactgccaaaaaaaaaaaaaaaaaaaaaaaaaaaaaaa

SEQ ID NO: 287183 - DNA, 1000 bp, Homo Sapiens; identical to SEQ ID NO: 116558

SEQ ID NO: 287184 - DNA, 1000 bp, Homo Sapiens
gaaggctcttccaggccagtttggtcagatgatgactggttgaagaagttttctgggaagacgcttgaagagaataaagaggaagaagggtcagagcctcccaaagcagagacccaggagggagagcccattgctaaaaaggcccgctcaaatcctcaggtgtacatggacatcaagattgggaacaagccggctggccgcatccagatgctcctgcgttctgatgtcgtgcccatgacagcagagaatttccgctgcctgtgcactcatgaaaagggctttggctttaagggaagcagcttccaccgcatcatcccccagttcatgtgccagggcggtgatttcacaaaccacaatggcactgggggcaagtccatctatgggaagaagttcgatgatgaaaactttatcctcaagcatacgggaccaggtctactatccatggccaactctggcccaaacaccaatggctctcagttcttcctgacatgtgacaagacagactggctggatggcaagcatgtggtgtttggagaggtcaccgaaggcctagatgtcttgcggcaaattgaggcccagggcagcaaggacgggaagccaaagcagaaggtgatcatcgccgactgtggggagtacgtgtgaggcggcactctctctgcttccccctccgctcttgaccctgcatatccaggaaggaactgccagcctcagaggaggcagcaccgagggtgcctgtttgaagcaagcagcatttgggatatgtgcccttcctcagggtctgcttggagcagctcctctgcaggcacagcctggactattcccaggcacagctgtgggcccaggagccagctcaggtgctcccctccaccatgggcaggctgtgcaaaaagccactggcttttctcagcatttgctgctgggcctctcctgggactaccagtgtggctcttacgtgttttctttgctaaaataaaccctagttcttatattgctaaaaaaa

SEQ ID NO: 287185 - DNA, 1000 bp, Homo Sapiens
cccagccatcactcttttttgtgaggagcctaaatacattcttcctggggtccagagtccccattcaaggcagtcaagttaagacactaacttggccctttcctgatggaaatatttcctccatagcagaagttgtgttctgacaagactgagagagttacatgttgggaaaaaaaagaagcattaacttagtagaactgaaccaggagcattaagttctgaaattttgaatcatctctgaaatgaagcaggtgtagcctgccctctcatcaatccgtctgggtgccagaactcaaggttcagtggacacatccccctgttagagaccctcatgggctaggacttttcatctaggatagattcaagacctttacctcagaattatgtaaactgtgattgtgttttagaaaaattattatttgctaaaaccatttaagtctttgtatatgtgtaaatgatcacaaaaatgtattttataaaatgttctgtacaataaagttacacctcaaagtgtactcttggaatggattctttcctgtaaagtcttatctgcgactctgtctcgggaatgttttgtctgttgccgtcagccgaactttgttatggagggagcagcctcacacaagcagaaacactcctgtggatggtattgtagcatgtattgtttattttagtcaatagaccctctccttataaatggtgtttagtcttcctgttgcatttcatgggcctgggggtttcctagcagaggatattggagcccctttttgtgacattaccaattacatctttgtccacgtttaatactttgttttggaaaatttaaatgctgcagatttgtgtagagttctaataccaaagacagaagtaaatgttttccatatactttgtcttgcctgtatgcagcccttgtgtaatatggtgaattagagtggtatttcactttgtattattttgtaaatatgtcaatataataaatagtgactaaaaaaaaaaaaaa

SEQ ID NO: 287186 - DNA, 1000 bp, Homo Sapiens
gcctgggcttccccagagccaggcgtgcgggagaggtgaggactggccccggtgggctgaggcaggggccgctgtcgtcaggcctgagccagggtgagctggtgcctgccttgcattttccttctggtgctgtgaagaccataggctggcaggcagctgagatgaactgtctttaccactgatgaggggcctctgccggctgagggtagcaagcaggggttgtgagtcaggctgggggacttgtttgaaagaaagaggagtggaaaatggttccaggagggaagaggttctttgagacacagtaccctgggaggcataggagaagggtcgggccagcccagcccagggcctgagttagactatttcccacatgttctctgccttcagtggggagggggtgccaccagggctgtcggccaggattgccactcctgtttcagaggaagcaggccgagagacttgcaccttggccaagccacacaatcagtggggcagccagagctcagacctgagccattttgtcagtatccaggaccccccggattctccacgccctccccatctcccagtctccctgccccccatgccccagaccggcccaccagggactagccgctgtcgcacagcctctggggtgcttggtctctgcgaagtcaaaggcctgacagctctgtggcctgggaatccattttcctgcggcagagcagggcctggtgtggaaccagggagctgtgggaagccacagcagaaatggaagaaaaacaggtctcagcccagggtcctcgctcactccctcactccccactttgaagccatctctgttctgcaggtgagaggatttaaagtcagtcacaaaggcttgggaacaaaaggaattctcttccaagaatgcctctgtggtgctgtttggtctctagaaacagggtcacttttttaatgtagtaaagaagtaataaatggtggcattacacattgtgatattaaaaaaaaaaaaaaaaaa

SEQ ID NO: 287187 - DNA, 1000 bp, Homo Sapiens; identical to SEQ ID NO: 116559

SEQ ID NO: 287188 - DNA, 1000 bp, Homo Sapiens
atattgaccaactggcatcccacagcctcctcttccagaatgcctttgcgcagcaagcagtgtgcgccccgagccgcgtttctttcctcactggcaggagacctgacaccacccgcctgtacgacttcaactcctactggagggtgcacgctggaaacttctccaccatcccccagtacttcaaggagaatggctatgtgaccatgtcggtgggaaaagtctttcaccctgggatatcttctaaccataccgatgattctccgtatagctggtcttttccaccttatcatccttcctctgagaagtatgaaaacactaagacatgtcgagggccagatggagaactccatgccaacctgctttgccctgtggatgtgctggatgttcccgagggcaccttgcctgacaaacagagcactgagcaagccatacagttgttggaaaagatgaaaacgtcagccagtcctttcttcctggccgttgggtatcataagccacacatccccttcagataccccaaggaatttcagaagttgtatcccttggagaacatcaccctggcccccgatcccgaggtccctgatggcctaccccctgtggcctacaacccctggatggacatcaggcaacgggaagacgtccaagccttaaacatcagtgtgccgtatggtccaattcctgtggactttcagcggaaaatccgccagagctactttgcctctgtgtcatatttggatacacaggtcggccgcctcttgagtgctttggacgatcttcagctggccaacagcaccatcattgcatttacctcggatcatggtttcctcatgaggacaaatacctgattttgaataaagcagcattcagttgaaataaccctttctgtggtaattccaagtgaatatttttcttctaggtgatgagtttctacttcctctggtttttacaacaggaaatgaaatggtatctaaaataaacaagctgtggtatgatgataatt

SEQ ID NO: 287189 - DNA, 1000 bp, Homo Sapiens
cttcattctgcagcggcatggtccctcccattctggctccacctgcagcctccctgggtggcctaggctcccccgaccaagagacctccctctcatgatcactggtacctgggggcctgaattctggcccccggctccccacacagctgggactggcctggatggctgtcctgggagcccctgcccaccctgacagagggagctgggcctcccctcatcctctgtaactcccgccttcaccagactcaaggacaccctggccctgctgaggcatacagagcttcagcccagcacagaagcaagacaaaatcagtggctcttagagtttagaaaacaagacagactctcagatgaaagatctgacaagcaccgtggccagtcacagggagagacttgatgtctggccttttaattcctcctctgccagggtgggtcctgggacctctaatgtgggcatgtcgtccaccccaggacgagccatcagggacagaccccccacccccaaggctgcagccacaccatgtttcaggcttggggctggggcaggcttgggctcaatcctgggcacccaggggcagcccacccctaacctggctcctacccacctcgcccttgaaggatgggcctgctgcacgtctccctcctccaccccataccacactggggggtctgagccacccccctcagccccgttcggctcagaccgacccccactccatccccagacctgcagcacaagtgcgcgggcctgtcctcccaggggcctgggcgactccatatgcaatcagtagcgagcagccgggccccacagaccctcatgcactctcttacgtgccattctccccagactttttttgtacttaatgtatgaaagatccaaactaatattgctgtaaaaaggagagacaaattaatatagcttattctataaatatatctgtatataaaggtttctgtatattgtatagagctgtgtataaactggatgtagaagcaaaaa

SEQ ID NO: 287190 - DNA, 1000 bp, Homo Sapiens; identical to SEQ ID NO: 221809

SEQ ID NO: 287191 - DNA, 1000 bp, Homo Sapiens
tattgcatcgtcatatcatatttatcgcatctcataactaactttctaaagtttggattgggacttttcaggtcctttttggagggcaaaggaagttccagcttctctggggaacttgtttttaaatccaaagacttgaaccacattccctgcacatgaacatgtttgcttttatcccttctctcattggctccttcccatcttagtaccattgtagttatacatctgcattttttagaagcattttacccatttatttttttaaacattcaagaactgctgacgtactgtggatgtagagtataaaacttgaaaaatgcagatgttgaaggaataataggtatcttgtgctttaatactttatggcaggattgtactataagcaaatgaattaaacagctatgtaaatcataaagaaaaactaaaaatgaaccaaagtgaaaggataacttccaggcagtatctttctattgtaacctgttatttaaggaaatactagtgatttcttctaaataggatgtaaacttctttcaaattactcttcctcagtctgcctgccaagaactcaagtgtaactgtgataaaataacctttcccaggtatattcggcaggtatgtgtgtaatctcagaatacacaggtgacatagatatgatatgacaactggtaatggtggattcatttacattgtttacacttctatgaccaggccttaagggaaggtcagttttttaaaaaaccaagtagtgtcttcctacctatctccagatacatgtcaaaaagaaaaggtgtttgtgctccgttttgtttctgctcagtaatatagtcaagcaagtttgttccaggtgacccattgagctgtgtatgcatttttgtttatttcaataaaatatatttgtattatttgtccttcatactatccatccataccacactatcttctgtatcaggtagtctaatagaaatatacctgttttgttctaaaaaaaaaaaaaaaaaaa

SEQ ID NO: 287192 - DNA, 1000 bp, Homo Sapiens
aggtggttgatggatttagccatatatgctgctaaagaaattgtctaccttttcttcctcacctgttccatttatgtaaagttgagattagagggaaagcattttctatatcaattgtgtttaaacctttcaagaaggttatttagctagcttagtgttgaactaaattttttttaaacaaggcaaggtctaatgctgttttgagattctgaaattaatgaaaatacttatttcagaaatgcatttaatgctttttttcttgtgacagttacgcaaatcagcttgaattccatatgtccctgagttatttttatcataaagccacaaatgtattataacaaggcaaattgtaatatatataatcctgaactcatgaccatgtctcggtttattttttttttcttggattgaaaagtactgaaattcaatgtgacattaaaatgcaaattttcctatttatttgagtagaaaatcacttaccagtgagcatatatattttaaaatactttctttggatattgtaattcttaactggttgtaaattagaaaagctgggattacatatggtgtgcggttacagtctaaattttttcatcctcctatgcatcataagcatgtttgtaatattttcaaaaatagttctactgatgctacaggaatttcaagcctgtggtgaatgttagtatttaccatagggagtgaagtggagttatggtttcattcaatagagtattgctgattatacttgagtggaatcctttcctcacgtactcccacagacgtctgggcctggaaattttttttttattttattttattgtttttttttttagaaaaacaccacttttattatgtacaataaaatatttcattagcttgaattgtatagatttttaaaaattcaatgaaagcatgttgtttaatttctttttaaaatcactgttgggctttgaaagcattgagaatataatatgaaattatgaaaaaaaaaaaaaaaaaa

SEQ ID NO: 287193 - DNA, 1000 bp, Homo Sapiens; identical to SEQ ID NO: 221810

SEQ ID NO: 287194 - DNA, 1000 bp, Homo Sapiens; identical to SEQ ID NO: 116561

SEQ ID NO: 287195 - DNA, 1000 bp, Homo Sapiens
agactgagctccagggcgtgtgcgacaccgtgctgggcctgctggacagccacctcatcaaggaggccggggacgccgagagccgggtcttctacctgaagatgaagggtgactactaccgctacctggccgaggtggccaccggtgacgacaagaagcgcatcattgactcagcccggtcagcctaccaggaggccatggacatcagcaagaaggagatgccgcccaccaaccccatccgcctgggcctggccctgaacttttccgtcttccactacgagatcgccaacagccccgaggaggccatctctctggccaagaccactttcgacgaggccatggctgatctgcacaccctcagcgaggactcctacaaagacagcaccctcatcatgcagctgctgcgagacaacctgacactgtggacggccgacaacgccggggaagaggggggcgaggctccccaggagccccagagctgagtgttgcccgccaccgccccgccctgccccctccagtcccccaccctgccgagaggactagtatggggtgggaggccccacccttctcccctaggcgctgttcttgctccaaagggctccgtggagagggactggcagagctgaggccacctggggctggggatcccactcttcttgcagctgttgagcgcacctaaccactggtcatgcccccacccctgctctccgcacccgcttcctcccgaccccaggaccaggctacttctcccctcctcttgcctccctcctgcccctgctgcctctgatcgtaggaattgaggagtgtcccgccttgtggctgagaactggacagtggcaggggctggagatgggtgtgtgtgtgtgtgtgtgtgtgtgtgtgtgtgtgcgcgcgcgccagtgcaagaccgagattgagggaaagcatgtctgctgggtgtgaccatgtttcctctcaataaagttcccctgtgacactcaaaaaaaaaaaaaaaaaaaaa

SEQ ID NO: 287196 - DNA, 1000 bp, Homo Sapiens
cctggaggtcagcggtcatgccatttatgccatcaggctgtgccagtgcaaggtgtactggtctgggccatgtgccccatcacttgttgctcccaacctgattgagagacaaaagaaggtcaagctattttgtctggaaacattccttagcgatctcattgcccaccagaaaggacagatagagaagcagccaccgtttgagatctacttatgctttggggaagaatggccagatgggaaaccattggaaaggaaactcatcttggttcaggtcattccagtagtggctcggatgatctacgagatgttttctggtgatttcacacgatcctttgatagtggcagtgtccgcctgcagatctcaaccccagacatcaaggataacatcgttgctcagctgaagcagctgtaccgcatccttcaaacccaggagagctggcagcccatgcagcccacccccagcatgcaactgccccctgccctgcctccccagtaattgtgaatgccatcttcttccttctcttttttataatattgtacatatggatttttttattgtttagatttaaccagcttttaaatctctcttttctctaacagtgttagaagtttgtgattctccaaatatgcctagatttaaagctgatttaatttatggaaaaatcacccttcagactttgcttttctttttcaaatctcctaatggtagtatgatatagcatagtagaaggagatttggcctgggagtttggacaccaaagttctagctgcagctttgcttccaatgtgaccttgaacaagtcctttaacctctgggcttcagatttattgcttataaagtgaagagattggagtagtgcctgaaattgcatccagctttagaacggactcaatgaccttcttctacttgtacaaggctaaactgcctggaacagaatccttctgcattgttcttgtaccacatttttccttggttttgttaaagtttcctcaagcacta

SEQ ID NO: 287197 - DNA, 1000 bp, Homo Sapiens; identical to SEQ ID NO: 116562

SEQ ID NO: 287198 - DNA, 1000 bp, Homo Sapiens
gctggcaatccttggtattatggcaaagtcaccaggcatcaagcagaaatggcattaaatgaaagaggacatgaaggggatttcctcattcgtgatagtgaatcttcgccaaatgatttctcagtatcactaaaagcacaagggaaaaacaagcattttaaagtccaactaaaagagactgtctactgcattgggcagcgtaaattcagcaccatggaagaacttgtagaacattacaaaaaggcaccaatttttacaagtgaacaaggagaaaaattatatcttgtcaagcatttatcatgatactgctgaccagaagtgactgctgtgtagctgtaatttgtcatgtaattgaagactgagaaaatgttgggtccagtcgtgcttgattggaaattgttgtttctaaatctatatgagaattgacaataagtatttttattataactcagcccatacatatatactatgtatgcagtgcatctgcatagaacagttccttatccttggccttctgttttattgtttttttctttgctgttttccctttgcttctaatattacagttttgtattttgtaaacaaaaatcaaataatgcatatcagaatctttatatggaagaaatcctttattgcctttcctttgtttccttgtaaaggcaccctgttctgttatggtttttcattatataaaattattatatctatatatgacatatgctaaaatttcttggagagtgttaatcttttctgtgactaaatagcaataataagtggaaaattagaaattatttccaggtattatatttgtcacaggccattgtaaataccaagtatattgtgtctgccataatttttaaaaatacattcattgtcttcagtcatacagcaagacacatgagacatagattagaaaacatgttgtacaattttaatttacaactgttggaaataaaaatcacttaatttttttccaaaaaaaaaaaaaaaaaaaaaaaaa

SEQ ID NO: 287199 - DNA, 1000 bp, Homo Sapiens
agattgtcagaagttccagacagatgagaaagcaaaaagtactttgtaaagtgttatacaatcagaaggtgctttgtgctgaccgtcagattgtgtcaagtcaggtgtgcaaattgaccacactcccaaagaatcatttaaaagtaaagtgacttctaagagacaaggaagtaggaacatttctgatattaaatatataaataatatggatacacatgtgtatatctgtatatggatcttaccatcataattcattttcttcatatcagcaaagtaatagtaatgtgggccaatgcattttggaaatgtcctcattatgtagaatggaatgtgaaaattatttttgttaaaacaggattttgccacaattatttaaatattatgtttgtgaactatctaagcatgagaaaatacaaagctttctttgtatctggctgatactcatttggatgattctgtgactcatagaacatgatgttaaatgagaccagactcaactgccaccagtccccagctgcagaccttcatccccttcatctcccactaggggctcgtggtctggaagaaacatgtatcaagcaacacagccccttatcccagatagaaaagtgtctcaaatgcattctactgcgggacagtcagtaggatcattttcataaagcaaggacatcatatgtttctagaaattacaagcatataactttagcctacaatctcttattaaaaatttttaacaaaattgtattacaaatgcatttcatcagaactcaaatttaaatggtgtttgttttgggtttttatttataatgctgaagttattccatataagtatcaagttaaacacaattcattttgattataaactatttgactttttaaaatcttctgacacagtaaatatatatatcaagattgatgtatcaaaatttattgcacactttaaagtgtaaaatcattttttaaaatcttgaatccacaaataaagttctattctgatttt

SEQ ID NO: 287200 - DNA, 1000 bp, Homo Sapiens; identical to SEQ ID NO: 116194

SEQ ID NO: 287201 - DNA, 605 bp, Homo Sapiens; identical to SEQ ID NO: 116564

SEQ ID NO: 287202 - DNA, 1000 bp, Homo Sapiens; identical to SEQ ID NO: 221816

SEQ ID NO: 287203 - DNA, 1000 bp, Homo Sapiens
cctaagccccaagaagacccagaatccgactcaggattatccctcaactatagcgatgctgaatctcttgagctggaggggacagaggctggtcggcggcgcagcgaatatgtagagatgtacccagtggagtacccctactcactcatgcccaactccttggcccactccaactataccttgccagctgctgagacccccttggccttagagccctcctcaggccctgtgcgggctaagcccactgcacggggggaggcagggagtcgggatgaacgtcgggccttggccatgaagattccttttcctacggacaagattgtcaacttgccggtagatgactttaatgagctattggcaaggtacccgctgacagagagccagctagcgctagtccgggacatccgacgacggggcaaaaacaaggtggcagcccagaactgccgcaagaggaagctggaaaccattgtgcagctggagcgggagctggagcggctgaccaatgaacgggagcggcttctcagggcccgcggggaggcagaccggaccctggaggtcatgcgccaacagctgacagagctgtaccgtgacattttccagcaccttcgggatgaatcaggcaacagctactctcctgaagagtacgcgctgcaacaggctgccgatgggaccatcttccttgtgccccgggggaccaagatggaggccacagactgagctggcccagaggggtggaactgctgatgggatttccttcattcccttctgataaaggtactccccaaccctgagtcccagaaggagctgagttctctagaccagaagaggatgacaatggcaacaagtgtttggaagttccaaggtgtgttcaaagaggcttgccttgagggagggctggaatctgtcttccctgactcggctcctcaggtctttagcctccaccttgtctaagctttggtctataaagtgcgctacagaaaaaaaaaaaaaaaaaaaaaaa

SEQ ID NO: 287204 - DNA, 1000 bp, Homo Sapiens
aaagacaaacattcaagccgcttggaggctcatctcacaagagatgaacttagggcaaaagctctccatatcccattccctgtagaaaaaatcattaacctccctgttgttgacttcaacgaaatgatgtccaaagagcagttcaatgaagctcaacttgcattaattcgggatatacgtaggaggggtaagaataaagtggctgctcagaattgcagaaaaagaaaactggaaaatatagtagaactagagcaagatttagatcatttgaaagatgaaaaagaaaaattgctcaaagaaaaaggagaaaatgacaaaagccttcacctactgaaaaaacaactcagcaccttatatctcgaagttttcagcatgctacgtgatgaagatggaaaaccttattctcctagtgaatactccctgcagcaaacaagagatggcaatgttttccttgttcccaaaagtaagaagccagatgttaagaaaaactagatttaggaggatttgaccttttctgagctagtttttttgtactattatactaaaagctcctactgtgatgtgaaatgctcatactttataagtaattctatgcaaaatcatagccaaaactagtatagaaaataatacgaaactttaaaaagcattggagtgtcagtatgttgaatcagtagtttcactttaactgtaaacaatttcttaggacaccatttgggctagtttctgtgtaagtgtaaatactacaaaaacttatttatactgttcttatgtcatttgttatattcatagatttatatgatgatatgacatctggctaaaaagaaattattgcaaaactaaccactatgtacttttttataaatactgtatggacaaaaaatggcattttttatattaaattgtttagctctggcaaaaaaaaaaaattttaagagctggtactaataaaggattattatgactgttaaaaaaaaaaaaaaaaaaaaaaaaaaaaaaaaaa

SEQ ID NO: 287205 - DNA, 1000 bp, Homo Sapiens
gctggacgatcccggcgccaacgcggccgccgccaaaatccaggcgagttttcggggccacatggcgcggaagaagataaagagcggagagcgcggccggaagggcccgggccctggggggcctggcggagctggggtggcccggggaggcgcgggcggcggccccagcggagactaggccagaactgagcattttcaaagttcccgaggagagatggatgccgcgtccccttcgcagcgacgagacttccctgccgtgtttgtgaccccctcctgcccagcaacctgccagctacaggagccccctgcgtcccagagactccctcacccaggcaggctccgtcgcggagtcgctgagtccgtgcccttttagttagttctgcagtctagtatggtccccatttgcccttccactccaccccaccctaaaccatgcgctcccaatcttccttcttttgcttctcgcccacctcttcccgcacccagcatgcagctctgcctccgcagcctcagtgcgctttcctgcgcgcactgcggagggcgccctaagcgtcacccaagcacactcacttaaagaaaaaacgagttctttcgttctgtgcgcagtaaaaggggcgccctacatctccgtgccactcccgccccagcctagccccaagactttggatccggggcgagatgaagggaagagggttgttttggtttcggacgacccttgctctgaccggaagagaagtccctatcccacacctgcctgtcacgttccctcccctttccccagcgcactgttgagggcagcctctccagctctcttgtttatgcaaacgccgagcgcctgggaggctcggtaggaggagtcttccacggccccgccccgccctgtcggtcccgccctccccccccgccgggctcctggggctgtggccgaaaggtttctgatctccgtgtgtgcatgtgactgtgctgggttggaatgtgaacaataaagaggaatgtccaa

SEQ ID NO: 287206 - DNA, 1000 bp, Homo Sapiens
gttctctgcatcgttaccagagcgccttctggtcctagccacgccctgtatgaccgcgcaaatatccccaaagcttttgggtcctcaagtcatgcccgaatttagatgctggtcattttctggagaggggtcccctccccttacgaacacagaaacccagcccacatgactagcacgctgagctctgcagggaccagtgccaggcactggggggtggaagtgtggtgacacagtgaatgggaggtggaggagggttgcagctcccacctcagtttagtttttaattcagggttttcaacctgtaacacattaaagctgtaattagcaatgaggctgtattttcattctgaagcttgtaacctccccattttagcactacagaattttcaagatttcaatatccaacaactagatagattaggacctctatccgagatgctttttccctgcccaaccctgtggccttcagggctcagagcagcaaaggcctgaagagtgagctctgggggttgttggtgtgggttgggagagagctgtgtgcagaagtctggaaacctgggtcctagtcccagctcttccatgggatccccctgtcaccctgagcaaatcagttgcttcctggacttgtgttacttcatctaattctcatgtggattggacgacttctgctccctttccagttctggcatctccccagtatggaagtcccggtggtctccccaagaagtccccaagacaatctcgccaaaggcacctcctatcctgctgcagtttcccagctgcagcctaggcaggggatgcacagcccaggcgaggaagcctggcttctctgtgagcacatacgtgggtcctcggcagctccctccaggctgtctgggcctccagacctgcacagggtgctcctgccacctcccacctctctgagggctgaggtgagacttctcctgggatgacaatttgctgagagagtgcagcttttgtgaattaaacttgaagtcca

SEQ ID NO: 287207 - DNA, 1000 bp, Homo Sapiens
ataactaatttgctctgtggtaagagatatgctcattattaccacttagaagatgttgttaaaaacatgtgaaagataggtatggaaaaagcatacacccccaaacagaaaggagttattaaagtaatttacaaacctctcagcactaattagtgtccaactccaagtgggtcaattccttagtataatattaaggcttactagtatcactgctttttccttagcttaatgacttacttagaatttatcctttattttaaatgatctgtactatctagtgtctaaaacactattctccagaaaaatcaatcattttctagccctctccctcagtcctttattgtccattccaatacattgaacacatttcctttaccctccacacacttcttccaaaaggaagcacccgttgagtccttttgagggtgatttgtcttacaactgactgacttagcaggaatttaattaggtcatatttggtgatgagacttatggagtgtgcctctctctcccaactgctgcttaaaatgcaaggacaagcaattagaagccatcctaaggtgcttacctcacacgccacccatgaggcttgtggccacagtggcacttgggtgtggctcctctgttatttgtcctcatgtgagaaagcagatcatctccaaatcttgccatttgtatacttttggtggagacttggatgtcatatcttctttgttttgggttttcttccctagcttattttgtggcttttaaagaagtggattgtattgtgagatcctgtgattcctggtggccagtatcctggattcctctaagatcttgcctctttcctcctcatgaaagcagcacacattgtgttaacttatgtctcttgttaaatgagcttaatgtctttgtgttttgtccaaaactgtattgaaaaaatattgtttaatgcaaatgaaggaatgcaataaagagtaaatatacttgaaaaaaaaaaaaaaaaaaaaaaaaaaaa

SEQ ID NO: 287208 - DNA, 1000 bp, Homo Sapiens; identical to SEQ ID NO: 116567

SEQ ID NO: 287209 - DNA, 1000 bp, Homo Sapiens; identical to SEQ ID NO: 116568

SEQ ID NO: 287210 - DNA, 1000 bp, Homo Sapiens; identical to SEQ ID NO: 221819

SEQ ID NO: 287211 - DNA, 1000 bp, Homo Sapiens; identical to SEQ ID NO: 116569

SEQ ID NO: 287212 - DNA, 1000 bp, Homo Sapiens; identical to SEQ ID NO: 116570

SEQ ID NO: 287213 - DNA, 1000 bp, Homo Sapiens; identical to SEQ ID NO: 221821

SEQ ID NO: 287214 - DNA, 1000 bp, Homo Sapiens
ccttctctcttgccaaagtgtgcttcagaaatatatactgctttaaaaaagaataaaagaatatccttttacaagtggctttacatttcctaaaatgccataagaaaatgcaatatctgggtactgtatggggaaaaaaatgtccaagtttgtgtaaaaccagtgcatttcagcttgcaagttactgaacacaataatgctgttttaattttgttttatatcagttaaaattcacaataatgtagatagaacaaattacagacaaggaaagaaaaaacttgaatgaaatggattttacagaaagctttatgataatttttgaatgcattatttattttttgtgccatgcattttttttctcaccaaatgaccttacctgtaatacagtcttgtttgtctgtttacaaccatgtatttattgcaatgtacatactgtaatgttaattgtaaattatctgttcttattaaaacatcatcccatgatggggtggtgttgatatatttggaaactcttggtgagagaatgaatggtgtgtatacatactctgtacatttttcttttctcctgtaatatagtcttgtcaccttagagcttgtttatggaagattcaagaaaactataaaatacttaaagatatataaatttaaaaaaacatagctgcaggtctttggtcccagggctgtgccttaactttaaccaatattttcttctgttttgctgcatttgaaaggtaacagtggagctagggctgggcattttacatccaggcttttaattgattagaattctgccaataggtggattttacaaaaccacagacaacctctgaaagattctgagacccttttgagacagaagctcttaagtacttcttgccagggagcagcactgcatgtgtgatggttgtttgccatctgttgatcaggaactacttcagctacttgcatttgattatttcctttttttttttttttaactcggaaacacaactgggggaat

SEQ ID NO: 287215 - DNA, 1000 bp, Homo Sapiens
atttgtaccagatgaaatccacgtctccattagcaagacttcatggttcttctattttggagaggcaccacctggagtacagtaagactctgttgcaggatgagagtttaaacatcttccagaacctaaataagcggcagtttgaaacagttattcatttgttcgaggtcgcaataatagcaactgacctggctttatatttcaagaagaggaccatgtttcaaaaaattgttgatgcctgtgaacaaatgcaaacggaagaagaagccatcaaatatgtaactgttgatccaaccaagaaagagattatcatggcaatgatgatgacggcatgtgacttgtctgctattaccaagccctgggaggtgcaaagtcaggtagcacttatggttgcaaatgaattttgggaacaaggagatctggagagaacagtgttgcagcaacaacccattcctatgatggacagaaacaaaagagatgaattacctaaacttcaagttggatttattgattttgtttgtacttttgtatataaggagttctcacggtttcacaaagaaatcacacctatgctgagtggtcttcagaataacagagtagaatggaaatcactagctgatgagtatgatgcaaagatgaaggtcattgaagaggaggcaaaaaagcaagaaggaggagccgaaaaagctgctgaagattcaggaggtggtgatgacaaaaagtccaaaacatgtttaatgttgtaatattatctaactggtctaaacttcaaatatcattttacctttgaagaaaaccagaaaacattcaaaagaacttcaacaaatcatcacgtaacaggatcttcagaaaaactaccctgtgactatgaagaaaatatatattgctagcccaaaaatcccaggggcaaaataaagttcaacaaaagtgcaaaatatgacaaaaataggtacatttttggtgccaatttattttaaattaaaaaatcatgcaatcctga

SEQ ID NO: 287216 - DNA, 1000 bp, Homo Sapiens
actgtgctatcggcagatgatgctttggaagatgcagaagcaataataaagtacttgactacctactggtgtaatctcaatgcaagccccaactttcttatccaactttttcatagtaagtgcgaagactgagccagattggccaattaaaaacgaaaacctgactaggttctgtagagccaattagacttgaaatacgtttgtgtttctagaatcacagctcaagcattctgtttatcgctcactctcccttgtacagccttattttgttggtgctttgcattttgatattgctgtgagccttgcatgacatcatgaggccggatgaaacttctcagtccagcagtttccagtcctaacaaatgctcccacctgaatttgtatatgactgcatttgtgtgtgtgtgtgtgttttcagcaaattccagatttgtttccttttggcctcctgcaaagtctccagaagaaaatttgccaatctttcctactttctatttttatgatgacaatcaaagccggcctgagaaacactatttgtgactttttaaacgattagtgatgtccttaaaatgtggtctgccaatctgtacaaaatggtcctatttttgtgaagagggacataagataaaatgatgttatacatcaatatgtatatatgtatttctatatagacttggagaatactgccaaaacatttatgacaagctgtatcactgccttcgtttatatttttttaactgtgataatccccacaggcacattaactgttgcacttttgaatgtccaaaatttatattttagaaataataaaaagaaagatacttacatgttcccaaaacaatggtgtggtgaatgtgtgagaaaaactaacttgatagggtctaccaatacaaaatgtattacgaatgcccctgttcatgtttttgttttaaaacgtgtaaatgaagatctttatatttcaataaatgatatataatttaaagttaaaaaaaaaaaaaaa

SEQ ID NO: 287217 - DNA, 1000 bp, Homo Sapiens
tgcagcggctacatctgcaggaaggacgaggccaaaacgggctccacctacatcttttttacagagaaaggagaactctttgtaccttctcccagctacttcgatgttgtctacttgaacccggacagacaggctgtggttccttgtcgggtgaccgtgctgtcggccaaagtcacgctccacagggaattcccagccaaggagatcccagccaatggaacggacattgtttatgacatgaagcggggctttgtgtatctgcaacctcattccgagcaccagggtgtggtttactgcagggcggaggccgggggcagatctcagatctccgtcaagtaccagctgctctacgtggcggttcccagtggccctccctcaacaaccatcttggcttcttcaaacaaagtgaaaagtggggacgacatcagtgtgctctgcactgtcctgggggagcccgatgtggaggtggagttcacctggatcttcccagggcagaaggatgaaaggcctgtgacgatccaagacacttggaggttgatccacagaggactgggacacaccacgagaatctcccagagtgtcattacagtggaagacttcgagacgattgatgcaggatattacatttgcactgctcagaatcttcaaggacagaccacagtagctaccactgttgagttttcctgacttggaaaaggaaatgtaatgaacttatggaaagcccatttgtgtacacagtcagctttggggttccttttattagtgctttgccagaggctgatgtcaagcaccacaccccaaccccagcgtctcgtgagtccgacccagacatccaaactaaaaggaagtcatccagtctattcacagaagtgttaacttttctaacagaaagcatgattttgattgcttacctacatacgtgttcctagtttttatacatgtgtaaacaattttatataatcaatcatttctattaaatgagcacgtttttgtaaaaaat

SEQ ID NO: 287218 - DNA, 1000 bp, Homo Sapiens; identical to SEQ ID NO: 116571

SEQ ID NO: 287219 - DNA, 1000 bp, Homo Sapiens; identical to SEQ ID NO: 116572

SEQ ID NO: 287220 - DNA, 1000 bp, Homo Sapiens; identical to SEQ ID NO: 116573

SEQ ID NO: 287221 - DNA, 1000 bp, Homo Sapiens
cctgcaccaggacctgcactatttccccttcaggcccagcgatctcatcgtttgcgcctggacggcgatggagcacatcagccggaacaacggctgtctggttgtgctcccaggcacacacaagggctccctgaagccccacgattaccccaagtgggaggggggagttaacaaaatgttccacgggatccaggactacgaggaaaacaaggcccgggtgcacctggtgatggagaagggcgacactgttttcttccatcctttgctcatccacggatctggtcagaataaaacccagggattccggaaggcaatttcctgccatttcgccagtgccgattgccactacattgacgtgaagggcaccagtcaagaaaacatcgagaaggaagttgtaggaatagcacataaattctttggagctgaaaatagcgtgaacttgaaggatatttggatgtttcgagctcgacttgtgaaaggagaaagaaccaatctttgaaatagccatctgctataactctttcaacagaaaaccaaaaccaaacgaaatgtctaaggaaaatgttttcttaatgagatgatgtaaccttttctatcacttgttaaaagcagaaaacatgtatcaggtacttaattgcatagagttagttttgcagcacaatggtgttgctttaatggaaaaaaaaaacagtaaaagtgaaatattactgttttaaggaaaactaatttagggtggcagccaataaaggtggttggtgtctaatttaagtgttaaatcaatttctttcattcagttagctctttacccaagaagaagtgaatgatttggagcttagggtatgttttgtatcccctttctgataaacccattccctaccaattttatgtcataagagatttttttcccccaaatctagaacaatgtataatacattcacatctagtcaagggcataggaacggtgtcatggagtccaaataaagtggatattcctgctcgg

SEQ ID NO: 287222 - DNA, 1000 bp, Homo Sapiens
gctgaaagttcttggcattactgacatgtttgattcatcaaaggcaaattttgcaaaaataacaacagggtcagaaaacctccatgtttctcatatcttgcaaaaagcaaaaattgaagtcagtgaagatggaaccaaagcttcagcagcaacaactgcaattctcattgcaagatcatcgcctccctggtttatagtagacagaccttttctgtttttcatccgacataatcctacaggtgctgtgttattcatggggcagataaacaaaccctgaagagtatacaaaagaaaccatgcaaagcaacgactactttgctacgaagaaagactcctttcctgcatctttcatagttctgttaaatatttttgtacatcgcttctttttcaaaactagttcttaggaacagactcgatgcaagtgtttctgttctgggaggtattggagggaaaaaacagcaggatggctggaacactgtactgaggaatgaatagaaaggcttccagatgtctaaaagattctttaaactactgaactgttacctaggttaacaaccctgttgagtatttgctgtttgtccagttcaggaatttttgttttgttttgtctatatgtgcggcttttcagaagaaatttaatcagtgtgacagaaaaaaaaaatgttttatggtagcttttactttttatgaaaaaaaaattatttgccttttaaattcttttcccccatccccctccaaagtcttgatagcaagcgttattttgggggtagaaacggtgaaatctctagcctctttgtgtttttgttgttgttgttgttgttgttttatataatgcatgtattcactaaaataaaatttaaaaaactcctgtcttgctagacaaggttgctgttgtgcagtgtgcctgtcactactggtctgtactccttggatttgcatttttgtattttgtacaaagtaaaaataaactgttatgagtagtaaaaaaaaaaaaaaaaaa

SEQ ID NO: 287223 - DNA, 1000 bp, Homo Sapiens
tattatgcaaattcagtgcaaaggcggcttgaaaggtgcactgcagttcaacagccacacactacatcagtggctcaaagacaagaacaaaggagaaatatatgatgcagccattgacctgtttacacgttcatgtgctggatactgtgtagctaccttcattttgggaattggagatcgtcacaatagtaacatcatggtgaaagacgatggacaactgtttcatatagattttggacactttttggatcacaagaagaaaaaatttggttataaacgagaacgtgtgccatttgttttgacacaggatttcttaatagtgattagtaaaggagcccaagaatgcacaaagacaagagaatttgagaggtttcaggagatgtgttacaaggcttatctagctattcgacagcatgccaatctcttcataaatcttttctcaatgatgcttggctctggaatgccagaactacaatcttttgatgacattgcatacattcgaaagaccctagccttagataaaactgagcaagaggctttggagtatttcatgaaacaaatgaatgatgcacatcatggtggctggacaacaaaaatggattggatcttccacacaattaaacagcatgcattgaactgaaaagataactgagaaaatgaaagctcactctggattccacactgcactgttaataactctcagcaggcaaagaccgattgcataggaattgcacaatccatgaacagcattagaatttacagcaagaacagaaataaaatactatataatttaaataatgtaaacgcaaacagggtttgatagcacttaaactagttcatttcaaaattaagctttagaataatgcgcaatttcatgttatgccttaagtccaaaaaggtaaactttgaagattgtttgtatctttttttaaaaaacaaaacaaaacaaaaatccccaaaatatatagaaatgatggagaaggaaaaaaaaaaaaaaaaa

SEQ ID NO: 287224 - DNA, 1000 bp, Homo Sapiens
gaaggaggccatgcatacctgtttaaaacagagtgcttaccgggaagccctctctgacctgcagtcacccctgaacccatgtgttatcctctcagaactctatgttgaaaagtgcaaatacatggattccaaaatgaagcctttgtggctggtatacaataacaaggtatttggtgaggattcagttggagtgatttttaaaaatggtgatgatttacgacaggatatgttgacactccaaatgttgcgcttgatggatttactctggaaagaagctggtttggatcttcggatgttgccttatggctgtttagcaacaggagatcgctctggcctcattgaagttgtgagcacctctgaaacaattgctgacattcagctgaacagtagcaatgtggctgctgcagcagccttcaacaaagatgcccttctgaactggcttaaagaatacaactctggggatgacctggaccgagccattgaggaatttacactgtcctgtgctggctactgtgtagcttcttatgtccttgggattggtgacagacatagtgacaacatcatggtcaaaaaaactggccagctcttccacattgactttggacatattcttggaaatttcaaatctaagtttggcattaaaagggagcgagtgccttttattcttacctatgatttcatccatgtcattcaacaaggaaaaacaggaaatacagaaaagtttggccggttccgccagtgttgtgaggatgcatatctgattttacgacggcatgggaatctcttcatcactctctttgcgctgatgttgactgcagggcttcctgaactcacatcagtcaaagatatacagtatcttaaggactctcttgcattagggaagagtgaagaagaagcactcaaacagtttaagcaaaaatttgatgaggcgctcagggaaagctggactactaaagtgaactggatggcccacacagttcggaaagactacagatcttaa

SEQ ID NO: 287225 - DNA, 1000 bp, Homo Sapiens
cgttcaacaacaagcttccaagatgccgcccaaaggaaaaagtggttctggaaaagcggggaaagggggagcagcctctgggagtgacagtgctgacaagaaggctcaaggtcccaaaggtggtggcaatgcagtaaaggtcagacacattctatgtgaaaaacatggcaaaatcatggaagccatggaaaagttaaagtctgggatgagattcaatgaagtggccgcacagtatagtgaagataaagccaggcaagggggtgacttgggttggatgaccagagggtccatggtgggaccatttcaagaagcagcatttgccttgcctgtaagtgggatggataagcctgtgtttacagacccaccggttaagacaaaatttggatatcatattattatggtcgaaggaagaaaataaaatcatatgaaagactgaataagttttatacattttgtttctttaaaaggtattacatattcttttgagctggagctgcaaggaaatacaaaaatttttaaaaagaaaagatattggatgctccttgtattctgtgaaagctctaagtatgggtttgtaggtgtaagagagggtggggctaagtgaatgtcaactgtagtaggtattcagtcagtctttctcaaagagaagtcaagcagactccctttaacctgtattctctttcctcccagaactatttctgactctcagtctgtcccataaattaattcagaaaccatcttcaggggaagcagatatcaactcacactattcacacaactgaaaatattgggcatcaaatagattagtgtgtgagaatcataaaataagttcctagacaacatttgttttacatgttagtcaactctgatcttccaggacaggtggtattagctccactgtcttaacatagtacgtggcacgttatgcctttcagtgttaactcctttctttttaaataaatgtttattggaggaaaaaagcaaaaaaaaaaaaaaaaaa

SEQ ID NO: 287226 - DNA, 1000 bp, Homo Sapiens; identical to SEQ ID NO: 116576

SEQ ID NO: 287227 - DNA, 1000 bp, Homo Sapiens; identical to SEQ ID NO: 116577

SEQ ID NO: 287228 - DNA, 1000 bp, Homo Sapiens
ttgggacaattgttttaatctgaaattctaaagagcacttactgtaacctgttgctgtgtttaatttgacttctctgcctttgacatttaatttagtgatcttagcatagcttattattgaaggaagccaaatttatcaaagcatacatgttttggtagattaaatatagattagaaaaattcctaagaatcagagtagaaataaaagtgaatgaaagattaaacagatgatgagaatttctaaaaagattagcaaggtcatttcttcagtcagaaaactttaaaaaatatttattaaataaaatcaatttttaggaagttttctgtagtcatttactaaacatatgatttcactagaaaagctgatcataagtgaatttatacctacctgtgtggctactctgaaacacactgaaagctctgttgcaattaggatttgatgtgacataatattgttgtataatttcgagatttgtaggaaggtctcattcttccaagctgagagtctagcactcattttctataacagatatggcagcttagaggtgttggctttgtttggatgtaattttaggggtactaaaatttaaaatttaaagataattgttcaacaatatcatatcatcacattgagctgatataaattctgtgggtccgataatatctttgtgataatttaagagctaaccagttaccacacatctatgatataaccctaacacacacagaaagcatacatgcaaaaagaaatgactaattagggtacatttataattgcatctaggtaatttttaccctaatgtcttcataaagtacttgagtgtaatgtttgttacctccaacagaactaaatgttctatggttatgaaagaatatatttatttaaagcattgcttttattttgaaaagcttcttaattaatttgattaacaaatatgctaatttggggaaacctagagaagataattgttgaaattttgcaaatataaacatctcctat

SEQ ID NO: 287229 - DNA, 1000 bp, Homo Sapiens; identical to SEQ ID NO: 221826

SEQ ID NO: 287230 - DNA, 1000 bp, Homo Sapiens
ctgctcctgcaccatgaaagtcctgctttgtgacctgctgctgctcagtctcttctccagtgtgttcagcagttgtcagagggactgtctcacatgccaggagaagctccacccagccctggacagcttcgacctggaggtgtgcatcctcgagtgcgaagagaaggtcttccccagccccctctggactccatgcaccaaggtcatggccaggagctcttggcagctcagccctgccgccccagagcatgtggcggctgctctctaccagccgagagcttcggagatgcagcatctgcggcgaatgccccgagtccggagcttgttccaggagcaggaagagcccgagcctggcatggaggaggctggtgagatggagcagaagcagctgcagaagagatttgggggcttcaccggggcccggaagtcggccaggaagttggccaatcagaagcggttcagtgagtttatgaggcaatacttggtcctgagcatgcagtccagccagcgccggcgcaccctgcaccagaatggtaatgtgtagccggaaggggcgctcctcccagctgtaccggccactgcaacccatgagcgtccaggtgatcccccaaacagcatgtgctcagmcccagacctgccgcctgggaatcaggattccttcttccccaaggcactgagcgcctgcagatcccgcaggcttcgtttgcctccagaaccttcccgtctgattgttcctccccagccccctggcatgtttcaccacaaccctgttgctacatcagagtgtatttttgtaattcctctagctaccatttcaatagccccatctctcctgctcacccgcctcttgccccttctaggggcaggtgaaaggaataggaaattgaacctggggttttgacttgccactgccataacttgtttgtaaaagagctgttctttttgactgattgttttaaacaacgatttctccattaaacttctactgagcaaatggtta

SEQ ID NO: 287231 - DNA, 1000 bp, Homo Sapiens
ctctccttgaggatacgtgcaagggaagttgggctgttgtaaacagggtgaagggtgtgtttggtcggccatttctctctcacctctaggccctctgctggtgctgtggaggccaagaccccattaagcctaaaggtgatgggtcctcgcctaggcttagtgctaccatgtgggttttgtttctttccttccttccttccttccttccttccttccttccttccttccttccttccttccttccttccttctttccttccttccttccttccttccttcctctctctttctttcttttttttggttttttttgggacggagtctcactccattgcccaggctggagtacaatggtgcgatcttggctcactgcacctctgtctcccaagttcaagtgattctcctgcctgagcctcccgagtagctgggattacaggtgcatgccaccatgcctggctaatttttgtatttttagtagagacggggtttcaccatgttggccaggctggtctcgaactcctgaccttgtgatccgcgcgcctcagcctctcagagtgctgggatcacaggcgtgagccaccgcacccagccttttaccatgtgggtttctttagtgtcttaaaagcgtccataagccaccattctgtggaaccaaggccccctccacgcaaacaccctccctcctggggacctctggagcctcagccagaagtaccattaggtttaattttaatttgttttgctggagaaacatcaggtttgtaggagactgagttgttagcaggtgtgcttagctcttgatagtgaacgtgtaccttgggaactggctcacccacctgctaatagcaccatcgtcactattaagcagacatttcagttggtagaatccatgtagaagtcatggacttttctgggaaatgacttttctgggaaatgacagtttctttgacatattttctttgcccactttaaataaaaactctggagaaaaaaaaaaaaa

SEQ ID NO: 287232 - DNA, 1000 bp, Homo Sapiens
cccagaaaagaggaagacagatttaaagtgcccccacccccatttgtttcaaagaggtctgcatgttgggcgaaaacagaacaactgtgtttccttttacttgttcttattattcaagagtcatttattacaggggataaatgttgggtagcaagaactttaatttgcactaccagtctcccaaatagaaaatcatgtatagtatttcatagtaataatcaggtaccttacaagctgctggtggattttaaaaaattaagatagttgaaggtggttaggtaaaatgcctgctttgtgtacaagatactctttggatctctcgtagagatggtttgttaccatcctttaatcataactaaaacattgaaaacagaacaaatgagaaaagaaaaaaaacctgccgattaacaagactgaaatcatgcatgatctgaaaggtgtggaaagaaacacaattaggtctcactctggttaggcattatttatttaattatgttgtatatcattgtttgcagggcaaacattctatgcatttgaaactgagcactaaactgggctagctttctggtagaccgttttgtggctagtgcgatttcacagtctactgcctgtttccactgaaaacatttttgtcatattcttgtattcaaagaaaacaggaaaaaagttattgtaaatattttatttaatgcacacattcacacagtggtaacagactgccagtgttcatcctgaaatgtctcacggattgatctacctgtctatgtatgtctgctgagctttctccttggttatgttttttctcttttacctttctcctcccttacttctatcagaaccaattctatgcgccaaatacaacagggggatgtgtcccagtacacttacaaaataaaacataactgaaagaagagcagttttatgatttgggtgcgtttttgtgtttatactgggccaggtcctggtagaacctttcaacaaacaaccaaacaaaaaaaaa

SEQ ID NO: 287233 - DNA, 1000 bp, Homo Sapiens
ccttccatcttcacactggtttgccaggccaatgttgctgatggcccctccagcacacacacataagcactgaaatcactttacctgcaggctccatgcacctcccttccctccctgaggcaggtgagaacccagagagaggggcctgcaggtgagcaggcagggctgggccaggtctccggggaggcaggggtcctgcaggtcctggtgggtcagcccagcacctgctcccagtgggagcttcccgggataaactgagcctgttcattctgatgtccatttgtcccaatagctctactgccctccccttcccctttactcagcccagctggccacctagaagtctccctgcacagcctctagtgtccggggaccttgtgggaccagtcccacaccgctggtccctgccctcccctgctcccaggttgaggtgcgctcacctcagagcagggccaaagcacagctgggcatgccatgtctgagcggcgcagagccctccaggcctgcaggggcaaggggctggctggagtctcagagcacagaggtaggagaactggggttcaagcccaggcttcctgggtcctgcctggtcctccctcccaaggagccattctgtgtgtgactctgggtggaagtgcccagcccctgcccctacgggcgctgcagcctcccttccatgccccaggatcactctctgctggcaggattcttcccgctccccacctacccagctgatgggggttggggtgcttcctttcaggccaaggctatgaagggacagctgctgggacccacctccccctccccggccacatgccgcgtccctgccccgacccgggtctggtgctgaggatacagctcttctcagtgtctgaacaatctccaaaattgaaatgtatatttttgctaggagccccagcttcctgtgtttttaatataaatagtgtacacagactgacgaaactttaaataaatgggaattaaatatttaaaaaaaaaa

SEQ ID NO: 287234 - DNA, 1000 bp, Homo Sapiens; identical to SEQ ID NO: 116580

SEQ ID NO: 287235 - DNA, 1000 bp, Homo Sapiens
accgtcaaccaagaagtcaagaccactgtcccctgctgagttaggcaatcacttaaaactccaaagaactccaggctgaggagttcttttggtgctgaacagtggtctgacaacaggtgctagaattaaggtgtgggaaaaaaaaaaaaacagccaggaaggacaagatctccaatttgtgaagcttatgatacagctgaaaccagtctgatcaattttatgctacctgtcaccaagaaattaactctaaatttttgaatgcttgttggcatctgtcaaatcaatactgaaaggatgcatttcggcttttaaccagtttggttctgatcattgcaacctctgtgcttttataattcaaagaacaaggatagctttcttcggtatcttttaatataagaacactgaattttggcttgaaatattgtgactaaattgcacaatctctggctattagcactgttcactacattaacatgcaagagagagagaagccttgttacatttcctgctatttaacaaactgtccaattaggtcagcaagcctgttagggccttcactgctacgcccctggccccaaaacagagagcaagacagttgtccagagaatttagatatgagttaagagctgccagatttattttaaggcatgtagagaatctcataatctatgtgaaagtcacttgccaaaaaggttttggttatgaaagtgaatgttatatatttaatattaagtgaacctcccgtgccttttaaaaaataccaacattatgaaatttaaaagcttaaatatatttgcctagttgataaagaggctgtggaacaactgaaggagaactttcagaccctaaaacagttatattacttagatgttaaaattttctagtgggctgtgcaattgctgggttgtccccccaaacatattttaatatgttatttaaaatgattttacccaagcctaagtattaaagtatatgtgcaaaaacaaaaaaaaaaaaaaaa

SEQ ID NO: 287236 - DNA, 1000 bp, Homo Sapiens; identical to SEQ ID NO: 221829

SEQ ID NO: 287237 - DNA, 1000 bp, Homo Sapiens
aatttagcttgtctttctgctaagctgttaaatgtatttatagtaaaggaagaaaaaaagactgtcatttccttataagtttgtgtaacatcctcctctggataacttgactgtaatttaacatctttttcttttgcacatcttcctgagttgaatgtccacgtggaatggggtcatgaattataaaagtccctgataaaagttttgtttactggggtgaacatctttccagtaaccaggtagtcctggtactcctttagttttaaaattaggagttaagagagaagaggtgataaacatagtagggaagggaatatcggattcatgcatcagtttatggtgaatccaaatcaatgtcttgaatcctttgaaaacaggcactgggacatcacaggcttcagtacctgaccagtattagttgcatatatcattgaacacacataccagagatgttttagaaatgtgagaaaaacatccttttggaccatttgaaataagaaagacaaacactaaacaatacaaccatgaaattgatcaccgggattgcaaatctaattgggaaaagagttgagcaaacagcttggactgtttggagttgttgccttactttttaatatgtatttataaagtattccagcaaaagaggatgtagcctctgggaaaaaacaaacatgttacagtgttttttgtagattctcgttctatatctcatcacagcgccagccctgtttttagccggaaaggattcaggataaacattattatgcattctgaattggatgcatattcctaactactgtatttgttaccaaaagtggttctacaaatgctactgaaaaaaatctggaaattcctaatgtcctgagtattaataataaagtttaaaaatgcttttatatcaaaggtgcatcgtgaccaaattgtttaagaaaaaaaaacaaaaaaaacaaaatctagggctgtattttatatatatatatatatatatatatatatatat

SEQ ID NO: 287238 - DNA, 1000 bp, Homo Sapiens; identical to SEQ ID NO: 221831

SEQ ID NO: 287239 - DNA, 1000 bp, Homo Sapiens; identical to SEQ ID NO: 221832

SEQ ID NO: 287240 - DNA, 1000 bp, Homo Sapiens
tcatactgatgtcttttctgaaccaagagctgtattttatgctgcttgtgtagttcttgggttgcagtatttacatgaacacaaaattgtttatagagatttgaaattggataacttattgctagatacagagggctttgtgaaaattgctgattttggtctttgcaaagaaggaatgggatatggagatagaacaagcacattttgtggcactcctgaatttcttgccccagaagtattaacagaaacttcttatacaagggctgtagattggtggggccttggcgtgcttatatatgaaatgcttgttggtgagtctccctttcctggtgatgatgaagaggaagtttttgacagtattgtaaatgatgaagtaaggtatccaaggttcttatctacagaagccatttctataatgagaaggctgttaagaagaaatcctgaacggcgccttggggctagcgagaaagatgcagaggatgtaaaaaagcacccatttttccggctaattgattggagcgctctgatggacaaaaaagtaaagccaccatttatacctaccataagaggacgagaagatgttagtaattttgatgatgaatttacctcagaagcacctattctgactccacctcgagaaccaaggatactttcggaagaggagcaggaaatgttcagagattttgactacattgctgattggtgttaagttgctagacactgcgaaaccaagctgactcacaagaagacctcttaaaaatagcaacccttcatttgctctctgtgccaccaatagcttctgagttttttgttgttgttgtttttattgaaacacgtgaagatttgtttaaaagtaccattctaatacttcttcaaaagtggctcctcattgtacttcagcgtaaatatgagcactggaaacagtttcatggagtttaagttgagtgaacatcggccatgaaaatccatcacgaatacttttggatcaatagtctatttt

SEQ ID NO: 287241 - DNA, 1000 bp, Homo Sapiens
tttcaacttggaaaaagaaagaaacactcaacaataaagactgagacccgttcgcccccatgtgacttttatctgtagcagaaaccaagtctacttcactaatgacgatgccgtgtgtctcgtctcctgacatgtctcacagacgctcctgaagttaggtcattactaaccatagttatttacttgaaagatgggtctccgcacttggaaaggtttcaagacttgatactgcaataaattatggctcttcacctgggcgccaactgctgatcaatgaaatgcttgttgaatcaggggcaaacggagtacagacgtctcaagactgaaacggccccattgcctggtctagtagcggatctcactcagccgcagacaagtaatcactaacccgttttattctattcctatctgtggatgtgtaaatggctggggggccagccctggataggtttttatgggaattctttacaataaacatagcttgtaacttgagatctacaaatccattcatcctgattgggcatgaaatccatggtcaagaggacaagtggaaagtgagagggaaggtttgctagacaccttcgcttgttatcttgtcaagatagaaaagatagtatcatttcacccttgccagtaaaaacctttccatccacccattctcagcagactccagtattggcacagtcactcactgccattctcacactataacaagaaaagaaatgaagtgcataagtctcctgggaaaagaaccttaaccccttctcgtgccatgactggtgatttcatgactcataagcccctccgtaggcatcattcaagatcaatggcccatgcatgctgtttgcagcagtcaattgagttgaattagaattccaaccatacattttaaaggtatttgtgctgtgtgtatattttgataaaatgttgtgacttcatggcaaacaggtggatgtgtaaaaatggaataaaaaaaaaaaaagagtcaaaaaaaaaaaaa

SEQ ID NO: 287242 - DNA, 1000 bp, Homo Sapiens
atatgataaaagcacaactgctatagattctgctgagacctctcatagtaggtatatatgagttttcacagaagactgaaaaataatgcatgatatttgtttgttttttttgataaattggcatgacagagtggggaaaaaaagcaattcacaaaaccatttcatattttttaaaatattgtgcttaaagatggtcctggaagtaaatgactagcagccaattggttttacttaacataccctcaaactgaggcttaaagtattcccttttataaaaataaatgcttggggtagggtggagtggggagggattaaaacccatccaaaaaataaataaaaactatataggtgctatgtatatctttcatctgtaaatgtcagtgtctgaacagcaacacaaattcaaatcattatacgtgtagccagaaactcaagcattttcactaaagttattaaaccaaactcctgtccaatttgacttatacaacatagtcagtctagagttgagagacaaaggtaattataaacctatttgaactagcttcttgtcttaggcctgaaccaaaaaacaacaaacaaacaaaaaacaagaatgaaaaacagaaataaaagaagtagaaaagacaaagaaagaaagcccaaagtcaaagttgttaatatttacaggtttaccagatctggaacattacttatttgaggtcagagaacaaaacaagaacctggccaggtgttgattaccttttagtgaataagctgagtccatatacttgtctaactaagaaagcagtacagaggaaaacaggaacctgatttttttaaaataaattttaaataaaatagaattactacaattctgcaatttcatactacctaaaaaagactagatttgaaaatgtcaagctgatttactttattcacatggagaaaagaatccacaaattaaactgagtccttcactggcatgccagttgactattattagctgtcataagtaaccccg

SEQ ID NO: 287243 - DNA, 1000 bp, Homo Sapiens; identical to SEQ ID NO: 221833

SEQ ID NO: 287244 - DNA, 1000 bp, Homo Sapiens
agggcaatgacccttgaagatattcagaccagagaggtgcgccatatttctcatctgaatttcactgcctggccagaccatgatacaccttctcaaccagatgatctgcttacttttatctcctacatgagacacatccacagatcaggcccaatcattacgcactgcagtgctggcattggacgttcagggaccctgatttgcatagatgtggttctgggattaatcagtcaggatcttgattttgacatctctgatttggtgcgctgcatgagactacaaagacacggaatggttcagacagaggatcaatatattttctgctatcaagtcatcctttatgtcctgacacgtcttcaagcagaagaagagcaaaaacagcagcctcagcttctgaagtgacatgaaaagagcctctggatgcatttccatttctctccttaacctccagcagactcctgctctctatccaaaataaagatcacagagcagcaagttcatacaacatgcatgttctcctctatcttagaggggtattcttcttgaaaataaaaaatattgaaatgctgtatttttacagctactttaacctatgataattatttacaaaattttaacactaaccaaacaatgcagatcttagggatgattaaaggcagcatttgatgatagcagacattgttacaaggacatggtgagtctatttttaatgcaccaatcttgtttatagcaaaaatgttttccaatattttaataaagtagttattttataggggatacttgaaaccagtatttaagctttaaatgacagtaatattggcatagaaaaaagtagcaaatgtttactgtatcaatttctaatgtttactatatagaatttcctgtaatatatttatatactttttcatgaaaatggagttatcagttatctgtttgttactgcatcatctgtttgtaatcattatctcactttgtaaataaaaacacaccttaaaacatg

SEQ ID NO: 287245 - DNA, 1000 bp, Homo Sapiens
aattgtgttatgactgatagccttcagctacaaaaagataggactgacctggtttaaagtgttctattttgtaaatcattccatttgagtctttctgatgaacttggctatactgaaatctgttattttagtgaggctccaaaatgagcaaagctaggcctgattagagtagagtgactattaaaaaacataactttctaggagctataaatcaaagttttaaaaagatgtttggatatatttgagtattccgatcatgaaaacagaaattgccctgcctactacaaggacagactgatgggaaattatgcacctggtcaacttagcttttaagcagacgatgctgtaaaaactaacggcttctctgatatttattgtaagttttagtactgatctccttttccagtgctgcacactcctggtttggaactttaatagcgttgcaacgaaatcctatatccagtttcctgtaatttaattgaagaaaaatacatccaaataaagactttattattaacagaccagatagcatcagaaatcatgtgactgttatgattatcagaatatgtcttaactttttagggcaaagttaacactgaaagttctagcttaagtgttgaaacttttgtgggaaaaaaaaatcacttttgaaactcagacttcagtgtatacccaataatttaaaattatgtgaaatgttttaaatttgtgaactcgtaattactgttttaatgattcagtttcttcagagtggtaattgtataaaattgctattgcagctttatattcaatatgatgtgcctgtaaaccaaggagttttccccgtttgtaaaaagacattgtagataattgaatgtttgattttagaaaggtcattagtttcttgttacacattttgttagtctggtttttgttgcttatcgggtttaatattgttcttgaaaatagttgatgctatgttatgtataacttttctaataaaagttgtgttataagctgt

SEQ ID NO: 287246 - DNA, 1000 bp, Homo Sapiens
cctcaagaagcggaccttcaccaagggagtgaaggtcaagcacggagccagctccaccctccctcgcatgaagcagaaaggactcaagattgccaagggcatcttctgagggcatcctcccagggtctggctggctggtagccaagcacttatggaccagagtggcccaggccagctgggcgccttcctcccacctgccagcccagggtaccccagactccagtttcatcctgaacctctcccgctgctgggattgacgcctgccattggtcaggctgacctggcctcccgtggaccactcgctgccttaggtgccttctgctctctggaaccagaggactagctgacttttgccaaggagcagtgccaacgggcatggcatggtgccctgcctgcccccgggcgccacctctgtacacttccctgacaccttcccaggtgtgggtcactgccacctgtgcccatgggcaccccagagcacccactgtgaccactgcagttctctcatgcccacaggcactggcctgtgaccttcgcaggggtcccggcccctcccaccactctagcctttctcaggctgcaccaaagattccatcatcagggccaactgagagtgagggagtctcacccaccgcttaccccagccctcccctgggagcagagagagaaaccctcttcatggaccagactctgcacccggtgagtgaggacagtcccagctgagtcccatcgatgttgaatctcatgccactgcaagtgccattcaccactgcgtcctgggctttacgagaccatgcaagacgggggttagtgaggaaggaggatttggggtgggggtggggtgattgaatatttgtataaaaagcaaaaagaaaaaaaaaatgtttgtttactgattggggaggggcaatatttatttgttgtaaatagcaaatgctagacttgaatattatattaaaatcctgtttctactataaaaaaaaaaaaaaaaaaaaaaaaa

SEQ ID NO: 287247 - DNA, 1000 bp, Homo Sapiens; identical to SEQ ID NO: 116583

SEQ ID NO: 287248 - DNA, 1000 bp, Homo Sapiens
tgcgtgtggcccagtttctctctgctctccattaagtgcattcactctgcttgccttgggcccagcccctggtgatcacagggttcaaacagtgtcctcctagaaagagtgggagagcagctcacttctctgtgttctgcctcccctctggtctccagagttttcctgtcctctagaggcaagccaggccagggagctgggagcgagcaagctgaggccacgtccacaaggagcttttcatgcccctgtgccgcatagcctcacctctttcctccagagtggctctctgcggccctgtgttcctgctacagagtgttcttttctggagtcaggatgttctcggtcaccctcctggttctgccctgtcccattccaccccaccccagggggaacagtagcttcaccttgttattcccattgctctcctggctcactcttacggtcggtctccagtgactgaagcattccccacccttggaatttctcatcttctgcctcccttcctactccttttggttttgtggggagaggggaaggatcagggggccaggccagcagctcgggggccacaaggagatggataatgtgcctgttttttaacacaacaaaaaagcctacctccaaaatcccctttttgttcttcctggacctgggcattcagcctcctgctcttaactgaattgggagcctctgccacctgccccgtgtatcctggctctcagctcatggggaagccacatagacatccctttcttcccttgcacgctcgctagcagctggtaaggtcttcacaccctgattcctcaagttttctgcttagtggcactgacattaagtagtggggggacagtccatgccaggacaccctggagtagccttcccccttggccgtgggcaggccctaactcactgtcgctttggagttgaggtgtcttttctttttctttctttagttcctgtattctaaacattagtaaaaataaatgtttttacacagaaa

SEQ ID NO: 287249 - DNA, 607 bp, Homo Sapiens
ggactgttgaagacaggtctccacacacagctccagcagccacatttgcaaccttggccatctgtccagaacctgctcccacctcaggcccaggccaaccgtgcactgctgcaatgggctctgagctggagacggcgatggagaccctcatcaacgtgttccacgcccactcgggcaaagagggggacaagtacaagctgagcaagaaggagctgaaagagctgctgcagacggagctctctggcttcctggatgcccagaaggatgtggatgctgtggacaaggtgatgaaggagctagacgagaatggagacggggaggtggacttccaggagtatgtggtgcttgtggctgctctcacagtggcctgtaacaatttcttctgggagaacagttgagcagacagccacattgggcagcgcccttcctctccaccctcccagacctgcctcttccccctgcttccacctcaccccacttatccctctccataaccccacccttgcccaccccacccccacccccaccaagggcgcaagagtagcggtccaagcctgcaactcatctttcattaaaggcttctctctcaccagcaaaaaaaaaaaaa

SEQ ID NO: 287250 - DNA, 684 bp, Homo Sapiens
cattcccagcctcacatcactcacaccttgcatttcacccctgcatcccagtcgccctgcagcctcacacagatcctgcacacacccagacagctggcgctcacacattcaccgttggcctgcctctgttcaccctccatggccctgctactggccctcagcctgctggttctctggacttccccagccccaactctgagtggcaccaatgatgctgaagactgctgcctgtctgtgacccagaaacccatccctgggtacatcgtgaggaacttccactaccttctcatcaaggatggctgcagggtgcctgctgtagtgttcaccacactgaggggccgccagctctgtgcacccccagaccagccctgggtagaacgcatcatccagagactgcagaggacctcagccaagatgaagcgccgcagcagttaacctatgaccgtgcagagggagcccggagtccgagtcaagcattgtgaattattacctaacctggggaaccgaggaccagaaggaaggaccaggcttccagctcctctgcaccagacctgaccagccaggacagggcctggggtgtgtgtgagtgtgagtgtgagcgagagggtgagtgtggtcagagtaaagctgctccacccccagattgcaatgctaccaataaagccgcctggtgtttacaactaa

SEQ ID NO: 287251 - DNA, 1000 bp, Homo Sapiens; identical to SEQ ID NO: 116585

SEQ ID NO: 287252 - DNA, 1000 bp, Homo Sapiens
aaaagaagtgtattctcttgttctgtcagctgcataccagtaataaaactgttatgaaatggattttcaaggtctctaaaccttgaaaatccaaaggctattgttgcattgtacagcactgaaagggctttatgttacaatattctttattcctatctagtatactaggctatttattgtccccttaggtaaacttatttatttatgctattttggctttgtttcattttttaaggacaagatcaggatagctttggtgaaggtagggtcatattaatatgatgataatgtgcaaccaatttatactttctgcagggagctatggggtacattccttgatttccaggatagtttttcaaataggaaagcaataatggcagtagttctcaaatgggctaggccttttttatattgaagcaataattccatttttaccctttgaaattttgtttttttgatttttgatgtttggtacaaatagaactatatatatttaggtaaaatagatctatcgtgtttaaaaccaaagaaatcaatggaacccttgcacaaaaaagtgtgataaatatttttaaataaaaacttaatacaaatgtaatttgttaatattgtttcatgttttatgtgtagatctaatagctgaactgattcaaactgtaataagctcatcaatttcatttctatgaaaatgtgctctgttgtcacaggatgtttctgttgattttattcatttcctgggaattggtaaacatcatgttcctgatgataacccagtagcaaaaacatttgtactgagtggtacaagccttggggactgaaaaaaaaaaaagattaaaaccattaaaaagaaactcatttttacgctgaatgaacatttatatgattgcattgggaccagtcatttcctaagctacatatggccatcttgacagtgttttttcttttgtgtgtttaattattatgtgtaaatcataaagacaaataaatttcactgtgccac

SEQ ID NO: 287253 - DNA, 1000 bp, Homo Sapiens
aaaaataaaaagtaccaaaattcattcaagaagaaatagataccagcctgagcaacatggcaaaatcccatctctacaaaacatcaaaaaaaaaaaaaattagtcgggcatggtggtgcacacctgtaatcccagcttgtcaggaggctgaagtgggaggatcacctgagcccagggaggtcaaggatgcagtgagccatggtctcaccactgcactctagcctgggtgacagaatgagaccccgtctcaaaaaaaaagaagaagtagataatctgaatagccctatatctatagaaacttaatagtgctgggagatataggtattattatcctcattttacagatgtgaaaattgaggctcagagaagtaaagtctattgctcaaggtcatgtggctagaatatggcagagccatgattcagatccaggtcttctgattcttattccagtgtcctttctagcataccatgttgcctctaaagattgcagctccttatttactagaaaattgttcctgcccaatctacatctccacctcaccccatcttttcttaagcactatgtttgtgtttttatcagtattatattcattgtctttggaatacatgttcttgtttgtgtttggaaaaaaaatctcttttaccagcttgcactcggaccaacttggaaaaaaaaaagcttaaatgtttttgctatgtacagtttaaaaatgtgaagtttgtagctttaactttttgtaagaaaatctaataacactggcttaagtgctgacttgaaatgctattttgtaaggtttggatgtaagtaatcaattgaggtcagcagtttgtatgagacatagcttcctccattgcccccactccttttttcttttttaagtttgagatgcttcctgtgtttttatgttagaattgttgttctccttcttttcttcttcctatacctcatcacgtttgttttaaataaactgtcctttggaccacaaaaaaaaaaaaaaaa

SEQ ID NO: 287254 - DNA, 1000 bp, Homo Sapiens; identical to SEQ ID NO: 116586

SEQ ID NO: 287255 - DNA, 1000 bp, Homo Sapiens
atcaccattcccatccactcagctgcccttggtgaccactccggagaccctggtccagcctgggacacctgcccgccgctgccgctcactaccctcatcccccgagctcccccgccgtatggagacagcactgccaggtcctggccctcccgctgtgggcccctcggctgaagagaagatggagtgcgagggcagcagccctgagccggaacctccagggccagcgccccagctgcctctggctgtggccacagacaacttcatcagcacctgttcctcggcctcccaaccctggtcccctagatcaggacccgtcctcaataacaatcccccagctgtggtggtgaactccccacaaggctgggctggggagccctggaaccgggcccagcatagcctgccccgggcggcagccctggagcggacagaaccctcgccacccccttcagctccccgggagcccgatgaggggctgccctgtcctggctgctgcctcggccccttcagctttggcttcctgtccatgtgcccccgccccacaccagctgttgcccgctaccgcaacctgaactgtgaggcgggcagtctcctctgccaccgagggcaccacgccaagccacccacacccagcctgcagctgcctggggcacgctcttagcagtggagcccgtggtctcaggcctccaactttggccttcaggacaccctgtaagaacagagcacacttgctggacagtgccagttccagatgggctgaccggctcttctccccgtgtaggggagccccagcatggactcaagggacagagcacttccagtcgaccccccggctcgcgttcccgtggggatcactgaaccagacacagcattgctgacacatgagactaacacgtgcaattatttaaaaagatttcaataaaactgcctggctggctccgggccgcccctatccgctcaaaaaaaaaaaaaaaaaaaaaaaaaaaaaaaaaaaaaaaaaaaa

SEQ ID NO: 287256 - DNA, 1000 bp, Homo Sapiens; identical to SEQ ID NO: 221838

SEQ ID NO: 287257 - DNA, 1000 bp, Homo Sapiens; identical to SEQ ID NO: 221839

SEQ ID NO: 287258 - DNA, 1000 bp, Homo Sapiens; identical to SEQ ID NO: 116588

SEQ ID NO: 287259 - DNA, 1000 bp, Homo Sapiens; identical to SEQ ID NO: 116589

SEQ ID NO: 287260 - DNA, 965 bp, Homo Sapiens; identical to SEQ ID NO: 25424

SEQ ID NO: 287261 - DNA, 1000 bp, Homo Sapiens; identical to SEQ ID NO: 116590

SEQ ID NO: 287262 - DNA, 1000 bp, Homo Sapiens; identical to SEQ ID NO: 221843

SEQ ID NO: 287263 - DNA, 1000 bp, Homo Sapiens; identical to SEQ ID NO: 221844

SEQ ID NO: 287264 - DNA, 1000 bp, Homo Sapiens
atcagatggggaggaaggcacagctagtgaaccttcccccagtggcacacctgaagttggcagcaccaacactgatgagcggccagatgagcggtctgatgacatgtgctcccagggctcagaaatcccactggacccacctccttcagaggtcatccctggccctgaacccagctccctgcccattccacaccaggaacttctcagagagcggggccctcccaattctgaggactcagactgtgacagcactgaattggacaactccaacagcgttgatgccttgcggcccccagcttccctccctccatgaaagccactcgtattccttgtacatagagaaatatttatatggattatatatatatacatatatatatatatatgcgccacataatcaacagaaagatggggctgtcccagccgtaagtcaggctcgagggagactgatcccctgaccaattcacctgataaactctagggacactggcagctgtggaaatgaatgaggcacagccgtagagctgtggctaagggcaagccccttcctgccccaccccattccttatattcagcaagcaacaaggcaatagaaaagccagggttgtctttatattctttatccccaaataatagggggtggggggaggggcggtgggaggggcaggagagaaaaccacttagactgcacttttctgttccgtttactctgtttacacattttgcacttgggaggagggaggctaaggctgggtcctcccctctgaggtttctcaggtggcaatgtaactcatttttttgtcccaccatttatcttctctgcccaagccctgtcttaaggcccagggggaggttaggagactgatagcatgtgatggctcaggctgaagaaccggggtgctgtttaagtccctgcttttatcctggtgcctgattggggtggggactgtcctactgtaacccctgtgaaaaaccttgaaatataacactccatgcagga

SEQ ID NO: 287265 - DNA, 1000 bp, Homo Sapiens; identical to SEQ ID NO: 221845

SEQ ID NO: 287266 - DNA, 1000 bp, Homo Sapiens; identical to SEQ ID NO: 221846

SEQ ID NO: 287267 - DNA, 1000 bp, Homo Sapiens
caatccaacctggcttggtctggcacggagcccacctgtgcagccatgaacgtcaatgtgggtgtcagaacggcagctgcacttctggatcagttttatgagaaaaggagactcctcattgtgtccacacccacagcccgaaacctcctttaccggctccagctaggaatgctgcagcaagcacagtgtggccttgatcttcgacacatcaccgtggtggagctggtgggtgtgttcccgactctcattggcaggataggagcaaagattatgcctccagccctagcgctgcagctcaggctgttgctgcgaatcccactctactccttcagtatggtgctagtggataagcatggcatggacaaagagcgctatgtctccctggtgatgcctgtggccctgttcaacctgattgacacttttcccttgagaaaagaagagatggtcctacaagccgaaatgagccagacctgtaacacctgacatgatggttcctctcttggcaattcctcttcattgtctacatagtgacatgcacacgggaaagccttaaaaatatccttgatgtacagattttatttgtaattttaaaagtctattttattatgagctttctttgcacttaaaaattagcatgctgctttttgtacttggaagtgtttcaaaaaattatatgaccatatttactctttctaactttctttactccatcatggctggttgattttgtagagaaattagaacccataaccatacacaggctatcaacatgttattcaatgtgacacctaactcttttctattttgttttttaagtaagacttttattaataaaacaaaatgttttggagcaaaaaaaaaaaaaaaaaaaaaaaaaaaaaaaaaaaaaaaaaaaaaaaaaaaaaaaaaaaaaaaaaaaaaaaaaaaaaaaaaaaaaaaaaaaaaaaaaaaaaaaaaaaaaaaaaaaaaaaaaaaaaaaaaaaaaaaaaaaaaaaaaaaa

SEQ ID NO: 287268 - DNA, 1000 bp, Homo Sapiens; identical to SEQ ID NO: 116591

SEQ ID NO: 287269 - DNA, 1000 bp, Homo Sapiens; identical to SEQ ID NO: 116592

SEQ ID NO: 287270 - DNA, 1000 bp, Homo Sapiens; identical to SEQ ID NO: 221847

SEQ ID NO: 287271 - DNA, 1000 bp, Homo Sapiens
tctccaggccgggcccccccaccccgagaggaagactgctacagtgagaccgaagcagaggacccggacgatgaggctgggtcccactcagcctcgcccagccctgctcaagctgggagtcccctccatggagacacatcacctgcagccacccccacacagcgcagcccacggacctcctttggctctctgacagacagcagtgaagaggcactggaaggaatggtacgggggctgaggcagggtggcgtgtccctcctaggccagccacagcccctgacccaggaacagtggcggagctctttcatgcggcgcaaccgagaccctcagctcaatgagcgagtgcaccgtgtgcgggcgctacagagcacactcaaggcaaagctgcaggagctgcaggtcctagaagaagtgctgggtgaccctgagctgacaggagagaagttccgccagtggaaggagcagaaccgggagctgtactcagagggcctgggggcctggggagtggcacaggctgaaggcagctcccacatcttgacctctgactccacagaacagtcccccaactccctgccctctgaccctgaagagcactcccatctctgccccctgacctcagagagcagcctccgacctcctgacctctgaccctggccagcactctagctcctgacctttgacccgagggccacctcaaccccagcttctgacgtgtccaggacagagcatccctggattctgttcagggtgggaagtagtactgctagtcatggtctcaccccgagctgacccctctgcctgggctttgtgccaccctctcccttgccaaagaagaaactctccccccaaatcctccaacctctggggccacagccctgcccctccagttccttggcagttctcccccaaaccaggtctgtacaggtgttctttattttacatgagggctactttccaaccaaataaagtcaatttttctaagaaaaaaaaaaaaaaaaaa

SEQ ID NO: 287272 - DNA, 1000 bp, Homo Sapiens; identical to SEQ ID NO: 116593

SEQ ID NO: 287273 - DNA, 1000 bp, Homo Sapiens; identical to SEQ ID NO: 116594

SEQ ID NO: 287274 - DNA, 1000 bp, Homo Sapiens; identical to SEQ ID NO: 116596

SEQ ID NO: 287275 - DNA, 1000 bp, Homo Sapiens; identical to SEQ ID NO: 221849

SEQ ID NO: 287276 - DNA, 1000 bp, Homo Sapiens; identical to SEQ ID NO: 221850

SEQ ID NO: 287277 - DNA, 1000 bp, Homo Sapiens
caagggaaaaaaagaaaggcccagagcattccagccaggaagagaagacaaggtggcctctcattagaagaagaggaagaggaggatgccaattcagaatctgagggaagcagtagtgaggaggaagatgacgctgcagagcaggaaaaaggcattggatcagaggatgccaggaaaaagaaggaggacgaactctgggccagcttcctcaatgatgtgggaccaaaatcaaaagtgcccccaagtacacaagttaagaaaggagaggagactgaagagacaagttcaagtaaattgttggtaaaagcagaagagctagagaaacctaaagaaacagaaaaagttaaaatcaccaaggtgtttgattttgctggtgaagaagtaagggtaactaaggaagtggatgctacatctaaagaggccaaatccttcttcaagcagaatgagaaagaaaaaccacaggctaatgttccttcagctctgccatcactccctgccgggtcagggttaaaaagatcaagtggcatgagcagccttttggggaaaattggtgccaagaagcagaaaatgagcacccttgagaagtccaaactggactgggagagcttcaaggaggaagaggggattggtgaagaactggccatccataatcgagggaaagaggggtacattgaacggaaagccttccttgaccgagtggatcacaggcagtttgaaattgagcgagatctcaggctgagcaaaatgaaaccttgatgttacgggctaaatcaagagcagcttaatcctgtttacaatgtgagctttttgtgcgtctgtgaaatgttttacagtgtttctcatcatctgtttcccagcaaggtcttttttttttctacattgaagttctgtctatgtatcttaatcacaaatggtttcattcactttacttttaaaaatttgtccttaaatgaataaataaaataaaagttggtcctgtgagaggataatgaagatgaaa

SEQ ID NO: 287278 - DNA, 1000 bp, Homo Sapiens
ccgccgccctatgagcgtacccgcctctccccaccccgggccagctacgacgatccctacaaaaaggctgtcgccatgtcgaaaaggtatggttccgaccggcgtttagccgagctctctgattaccgccgtttatcagagtcgcagctttcgttccgccgctcgccgacaaagtcctcgctggattaccgtcgcctgcccgatgcccattccgattacgcacgctattcgggctcctataatgattacctgcgggcggctcagatgcactctggctaccagcgccgcatgtagggccatcctgggatggggcaccacagggagggagggagaaaagaggtgggtagggttacagatccaggttataactactctggcccatacctttcctggttgtggtttttcatgccctctaccatgtgggccttccccaggagatgatcctgttaagtgttcggcagtaacctactttgttccttcgcctcagcagcaaatcttgctactggctctagatctgcggtttcccctctaccctgcctcccgtctccccagaatgggaatttcttttatgtttttatttttttcctggctcccttttatttttgtgcgcgatatttaaggtcgtctggatggggaagcaacctgcagctgaggtcgccggcgcctttttctttttagatgggaaggaggccaggaaagggtcagcttaaccatttcctatgtgccaagctgtgccagcagtccagggtaccctgactgtccctctgtagactgttgagactgagttcctgttgggacagtcagttggtatgtatccaagtccctgctgaccactaatgttctagctgatggtgagcggcacagtcccacttccccatctccccaagtaggtggtgttagaaaaccttaattttttttcccttttgtatggactacaaataaaacttggggcaatttgcagtttggaaaaaaaaaaaaaaaaaaaaaaaaaaaaaaaaaa

SEQ ID NO: 287279 - DNA, 1000 bp, Homo Sapiens; identical to SEQ ID NO: 116598

SEQ ID NO: 287280 - DNA, 1000 bp, Homo Sapiens
agccattaggaggcgaggagagaggagggcgcagctcccgcccagcccagccctgcccagccctgcccggaggcagacgcgccggaaccgggacgcgataaatatgcagagcggaggcttcgcgcagcagagcccgcgcgccgcccgctccgggtgctgaatccaggcgtggggacacgagccaggcgccgccgccggagccagcggagccggggccagagccggagcgcgtccgcgtccacgcagccgccggccggccagcacccagggccctgcatgccaggtcgttggaggtggcagcgagacatgcacccggcccggaagctcctcagcctcctcttcctcatcctgatgggcactgaactcactcaagtgctgcccaccaaccctgaggagagctggcaggtgtacagctctgcccaggacagcgagggcaggtgtatctgcacagtggtcgccccacagcagaccatgtgttcacgggatgcccgcacaaaacagctgaggcagctactggagaaggtgcagaacatgtctcaatccatagaggtcttggacaggcggacccagagagacttgcagtacgtggagaagatggagaaccaaatgaaaggactggagtccaagttcaaacaggtggaggagagtcataagcaacacctggccaggcagtttaagggctaacttaaaagagttttttcaatgctgcagtgactgaagaagcagtccactcccatgtaaccatgaaagagagccagagagctttttgcaccatgcatttttactattattttccaatacttagcaccatttcactaaggaaccttgaatacaaccaggatcctcctttgcatgcgactgtagctgcatttcatgaatagtttgaacccttgtcaatgcattttttgaaaaagaaagaaaaaaaaaacttcgtgtatgtgactcaaagcatgtaaccttaagatgttgcattctaaactgacaataaagacctttcccc

SEQ ID NO: 287281 - DNA, 1000 bp, Homo Sapiens; identical to SEQ ID NO: 221851

SEQ ID NO: 287282 - DNA, 1000 bp, Homo Sapiens; identical to SEQ ID NO: 221852

SEQ ID NO: 287283 - DNA, 1000 bp, Homo Sapiens
ccaggtggctactctcaacaacaatggtgaggaagcctccactgaagggacctgctgccctgtcaactgggtggagcaccaagacagctgctactggttctctcactctgggatgtcctgggccgaggctgagaagtactgccagctgaagaacgcccacctggtggtcatcaactccagggaggagcagaattttgtccagaaatatctaggctccgcatacacctggatgggcctcagtgaccctgaaggagcctggaagtgggtggatggaacagactatgcgaccggcttccagaactggaagccaggccagccagacgactggcaggggcacgggctgggtggaggcgaggactgtgctcacttccatccagacggcaggtggaatgacgacgtctgccagaggccctaccactgggtctgcgaggctggcctgggtcagaccagccaggagagtcactgagctgcctttggtgggaccacccggccacagaaatggcggtgggaggaggactcttctcacgacctcctcgcaagaccgctctgggagagaaataagcactgggagattggaagcactgctaacattttgaatttttttctctttaattttaaaaagatggtatagtgttcttaagcttttattttttttccaacttttgaaagtcaacttcatgaaggtataatttttacataataaaaatgcactcatttaaagagtagagatgactttgacaaatatgcatgcctaggtgactaccactccgatcgcaatagataacattgccatcgcccccaccagtcccctcatgcctctgggcagtccaaccacttccctgtttccaggccagtgatctacttctttttcactatttattggccttgcctcttctagagcttctagaacttcatataagtgaaatcatacactctcgtgtatatacttcatataagtgaatatatactctcgtgagaacttaaaaaaaaaaaaaaaaaa

SEQ ID NO: 287284 - DNA, 1000 bp, Homo Sapiens; identical to SEQ ID NO: 221853

SEQ ID NO: 287285 - DNA, 1000 bp, Homo Sapiens
caaaggaaaataagatttcttgtaagaacaccgtgaccacatctttaaaatgacccatttcgtggctcccacaagatttacacctccacactgaggccggaagtggttttgcccctataaaacatggcgaaaagctttcttgtctccaaggaaacgccacgtaatgagtcaaagctgtggcgcacgcgcagaagtacaagctaccggaagtgatggcgcccctactaaagccttggggttagtacgcgtgcgcagcagtttcttccgacagttgtgttgtgccaatggtggagaagaaaacttcggttcgctcccaggaccccgggcagcggcgggtgctggaccgggctgcccggcagcgtcgcatcaaccggcagctggaggccctggagaatgacaacttccaggatgacccccacgcgggactccctcagctcggcaagagactgcctcagtttgatgacgatgcggacactggaaagaaaaagaagaaaacccgaggtgatcattttaaacttcgcttccgaaaaaactttcaggccctgttggaggagcagaacttgagtgtggccgagggccctaactacctgacggcctgtgcgggacccccatcgcggccccagcgccccttctgtgctgtctgtggcttcccatccccctacacctgtgtcagctgcggtgcccggtactgcactgtgcgctgtctggggacccaccaggagaccaggtgtctgaagtggactgtgtgagcctgggcattcccagagaggaagggccgctgtgcactgcccggccttcagaaagacagaatttcatcacccaatgcagggggagctcttcctggaccaagggaggagccgctcattcacccaacaaaactgtgtcttatctgccaggaaagaccagcctcactcctgggaactgtctggcaggtaggctgggccccccagtgctgttagaataaaaagcctcgtgccggaaaaaaaaaaaaaaaaaaaaa

SEQ ID NO: 287286 - DNA, 1000 bp, Homo Sapiens
ggattgttccaacatcacctggaagggtccagtctgcgggctggatgggaaaacctaccgcaatgaatgtgcactcctaaaggcaagatgtaaagagcagccagaactggaagtccagtaccaaggcagatgtaaaaagacttgtcgggatgttttctgtccaggcagctccacatgtgtggtggaccagaccaataatgcctactgtgtgacctgtaatcggatttgcccagagcctgcttcctctgagcaatatctctgtgggaatgatggagtcacctactccagtgcctgccacctgagaaaggctacctgcctgctgggcagatctattggattagcctatgagggaaagtgtatcaaagcaaagtcctgtgaagatatccagtgcactggtgggaaaaaatgtttatgggatttcaaggttgggagaggccggtgttccctctgtgatgagctgtgccctgacagtaagtcggatgagcctgtctgtgccagtgacaatgccacttatgccagcgagtgtgccatgaaggaagctgcctgctcctcaggtgtgctactggaagtaaagcactccggatcttgcaactgaatctgcccgtaaaacctgagccattgattcttcagaactttctgcagtttttgacttcatagattatgctttaaaaaattttttttaacttattgcataacagcagatgccaaaaacaaaaaaagcatctcactgcaagtcacataaaaatgcaacgctgtaatatggctgtatcagagggctttgaaaacatacactgagctgcttctgcgctgttgttgtccgtatttaaacaacagctcccctgtattcccccatctagccatttcggaagacaccgaggaagaggaggaagatgaagaccaggactacagctttcctatatcttctattctagagtggtaaactctctataagtgttcagtgttcacatagcctttgtgcaaaaaaaaaaaaaaaaaaaaa

SEQ ID NO: 287287 - DNA, 1000 bp, Homo Sapiens; identical to SEQ ID NO: 116603

SEQ ID NO: 287288 - DNA, 1000 bp, Homo Sapiens
acactaaagatgtggatgccctgctgaagaagtctgaggcccagcatgaacagccggaagatggatgcccctttggtgccctgacgcagcgcctcctgcaggccctggtggaggaaaatattatttcccctatggaggattctcctattcctgacatgtctgggaaagaatcaggggctgacggggcaagcacctcccctcgcaatcagaacaagcccttcagtgtgccgcatactaagtccctggagagccgcatcaaggaggagctaattgcccagggccttttggagtctgaggaccgccccgcagaggactccgaggatgaggtccttgctgagcttcgcaaacggcaggctgagctgaaggcacttagtgcccacaaccgcaccaagaagcacgacctgctgaggctggcaaaggaggaggtgagccggcaggagctgaggcagcgggtgcgcatggctgacaacgaggtcatggacgcctttcgcaagatcatggctgcccggcagaagaagcggactcccaccaagaaagaaaaggaccaggcctggaagactctgaaggagcgtgagagcatcctgaagctgctggatgggtagccctcacccctgcctcaggctgattatctggcctaggggaggggaagggaggcccacttccttctttgggcacaggaaacattggcctgtggctgtccctcaaatggcggcagtctctagagggccgtggcccttcccctgaggtcttttggcctagctctgtacaaccaggacacaggaagccctgctgggctagcctgaggcctagtctctgcttggtccccgagatggggttggaggggacttcgtttctgggtcttcctcttcccctctttaccatcccccactccctaatcccctacccctgtctccccttcaaggacttctcccttgtggttttgtaaagtgcaaacttaagaataaagtgactgctgtggtttttcaaaaaaaaaaaaaaa

SEQ ID NO: 287289 - DNA, 1000 bp, Homo Sapiens; identical to SEQ ID NO: 221854

SEQ ID NO: 287290 - DNA, 628 bp, Homo Sapiens
tgacccacttccgttacttgctgcggaggaccgtgggcagccagggtcggtgaaggatcccaaaatggctgggcgaaaacttgctctaaaaaccattgactgggtagcttttgcagagatcataccccagaaccaaaaggccattgctagttccctgaaatcctggaatgagaccctcacctccaggttggctgctttacctgagaatccaccagctatcgactgggcttactacaaggccaatgtggccaaggctggcttggtggatgactttgagaagaagtttaatgcgctgaaggttcccgtgccagaggataaatatactgcccaggtggatgccgaagaaaaagaagatgtgaaatcttgtgctgagtgggtgtctctctcaaaggccaggattgtagaatatgagaaagagatggagaagatgaagaacttaattccatttgatcagatgaccattgaggacttgaatgaagctttcccagaaaccaaattagacaagaaaaagtatccctattggcctcaccaaccaattgagaatttataaaattgagtccaggaggaagctctggcccttgtattacacattctggacattaaaaataataattatacagttaaaaaa

SEQ ID NO: 287291 - DNA, 1000 bp, Homo Sapiens; identical to SEQ ID NO: 116605

SEQ ID NO: 287292 - DNA, 1000 bp, Homo Sapiens; identical to SEQ ID NO: 116606

SEQ ID NO: 287293 - DNA, 1000 bp, Homo Sapiens
tatgcaatttacgactctggagaccgacaagggctcctggatgcctaccatgatggggcctgctgttccctgagcattcctttcattcctcagaaccctgcccgaagcagcttagccgagtatttcaaggatagcagaaatgtgaagaagcttaaagaccctaccttgcggttccggctgctgaagcacacgcgtctcaacgttgttgccttcctcaatgagttgcccaaaacccagcacgacgtcaattccttcgtggtagacataagcgcccagacaagcacattgctgtgtttttctgtcaatggagtcttcaaggaagtggacggaaagtcccgggattctttgcgagccttcacccggacattcattgctgttcctgctagcaattcagggctatgtattgtaaatgatgagctatttgtgcggaatgccagttctgaagagatccaaagagccttcgctatgcctgcacccacgccttcctccagcccggtgcccaccctctctccagagcagcaggaaatgttgcaagcattctctacccagtctggcatgaacctcgagtggtcccagaagtgccttcaggacaacaactgggactacaccagatctgcccaggccttcactcatctcaaggccaagggcgagatcccagaagtggcattcatgaagtgatcgtagtcatgcctcagaagcagtcccccctgtaaatagtccttggatattaccgtctggttgtcgtctgtcatctcctcctgtctggcccgaggccgccccgtgactgtgaccgagggagggagggctgcctgatccctctcctcgcctgccttctggaagacttcagaagattgagcctcactggtgccaggaagccaaagcttactttgtagaactgacactaaactacccgaaggacttaggtgctttgtgtacttaaccccaggacctccttactttttaatataaagagtgatgttgtaaaaaaaaaaaaaaaaaa

SEQ ID NO: 287294 - DNA, 1000 bp, Homo Sapiens; identical to SEQ ID NO: 116607

SEQ ID NO: 287295 - DNA, 1000 bp, Homo Sapiens
agacacttcctctcactaagacagaggaacaaattctgaaacgtgtgcggaggaagattcgaaataaaagatctgctcaagagagccgcaggaaaaagaaggtgtatgttgggggtttagagagcagggtcttgaaatacacagcccagaatatggagcttcagaacaaagtacagcttctggaggaacagaatttgtcccttctagatcaactgaggaaactccaggccatggtgattgagatatcaaacaaaaccagcagcagcagcacctgcatcttggtcctactagtctccttctgcctcctccttgtacctgctatgtactcctctgacacaagggggagcctgccagctgagcatggagtgttgtcccgccagcttcgtgccctccccagtgaggacccttaccagctggagctgcctgccctgcagtcagaagtgccgaaagacagcacacaccagtggttggacggctcagactgtgtactccaggcccctggcaacacttcctgcctgctgcattacatgcctcaggctcccagtgcagagcctcccctggagtggccattccctgacctcttctcagagcctctctgccgaggtcccatcctccccctgcaggcaaatctcacaaggaagggaggatggcttcctactggtagcccctctgtcattttgcaggacagatactcaggctagatatgaggatatgtggggggtctcagcaggagcctggggggctccccatctgtgtccaaataaaaagcggtgggcaagggctggccgcagctcctgtgccctgtcaggacgactgagggctcaaacacaccacacttaatggctttctgggtcttttatttgtacccatgtgtctgtcacaccatgaatgtacctggggaaatcaactgacctccctgaacatttcacgcagtcagggaacaggtgaggaaagaaataaataagtgattctaatgctgcctaaaaaaaaaaaaaaaaaa

SEQ ID NO: 287296 - DNA, 1000 bp, Homo Sapiens; identical to SEQ ID NO: 116608

SEQ ID NO: 287297 - DNA, 1000 bp, Homo Sapiens
gttggaaggggtttattatgactgctggtgaaataaacagtgaccagtttctgccaacatttatggaaataacgtttctaggttttaaatgtgagccgtaaactgaagctacttcagttaaaaaaaaaaaaatcaatacttaaactgtagggaaaaggtggattggtgccagagaaaacattatttaatagtgtcagaacatggaactgcaacacagtttgtagcaaggcactgagaaaaacccacaactaatccttcatcgcagctgtctgaactcttgatcatctgccatcccccaaacagtgacttctttttttctggtgactccaggcctgaatgacctagtgtggagagtttaaactatgtacaagggaggaaagaaaaaaaggaaaggaaccttaagtaagcctcagccaaaggttttatgcattggacttcctgtgcctgcccccaggggcaagactgatccccatgcctgtgcccatgacatctccctgaaagaggacaccatgacagcccggctttgccttgactgacccactgctaccccagaaataagaatcaagagcagctattgttatccttagagtgttttccgtctagggccggctcgtgaacagccacatatccttgcacctgacactgtccccacacaaatagctggctttcgttgcttgttgaatgaatgagtgagttggctctatatccccttggagctggccggtaagatattagtgcctcattttacaagaagagaataggaaggaattaagcaatttggccaacagatacaagatagattccagagttttatctcccactttagggtggcagccagtaggccaaactccaaagaccgttgctgatgtctttttctgcctcccctctttgggttagtgtggtatgtacaagctcactcttgttgaaaattagaaaatagttgaaaacaaaaggtttttgtttttctttttaaatcacattaaatgttttacattgctta

SEQ ID NO: 287298 - DNA, 1000 bp, Homo Sapiens
tatggttatgattaccataactatcgtggtggatatgaagatccatactatggttatgaagattttcaagttggagctagaggaaggggtggtagaggagcaaggggtgctgctccatccagaggtcgtggggctgctcctccccgcggtagagccggttattcacagagaggaggtcctggatcagcaagaggcgttcgaggtgcgagaggaggtgcccaacaacaaagaggccgcggggtacgtggtgcgaggggtggccgcggtggaaatgtaggaggaaagcgcaaagctgatgggtacaaccagccagattccaagcggcgccagaccaataatcagaactggggctcccaacccattgctcagcaaccgctccaaggtggtgatcattctggtaactatggttacaaatctgaaaaccaggagttttatcaggatacttttgggcaacagtggaagtagaaacagtagggcctctgtaaaattggagactgataggttgatcagaaactcaccctaaatctgaacgggtgccgctataatttgtgacatctggcaagatttccctttatgtatatattttaacaatccgcttggacacgaacaaagccacacttctaactgcttctggcgaactgattttatttttaatttttttcaataaagatattcttagatactgaaagaaatagttaatgagtttgcatttgtgcttgagaaaatttggctcaagtccatttggctgtagtgtcaacgatgtttccagtagtgtttagatttggtgtcttcaaaggtagttgattaaaaccaagtgtgtctttaatatcttgtatcagaataactttgtatgttaccaacttaaattgctagaataaggtaaattgatacacaactgctatttttaatttagaactttgacctaatttgggttttcaaaaccattttggctacttgtattctttatgctgttgtttatttcaataaaaaattcacacct

SEQ ID NO: 287299 - DNA, 1000 bp, Homo Sapiens
gttcccaatctcgtcctctgtccccaacttcttaagcacaattgggcttcttccatctccaggttttctgccattcttaaccaaggctgcctcttccaacagggcgggaatcagacctactcccctaggtcacaactctgggaaggatacagagcccccacccttcactgagttctctggatttgttctcagtgccttagcaacgaaaacctgtgcttgtgtgtgtgtggcggcggggagggaggatcctgtttcccacctccttctcctcccctgtactccccagtgccttccttgttctggtggagctggggtttctctcctccccagtcccacaacactgccaaaaatctgtgtatgtgccattgggtggggcagccccaagcctcctggggaggcagggcaaaaacaggtgccctcatcgtggtctgtgccatgtcccgtctctatggtggttgaggagaaaggcggggaagcttcctcagccttgcagatatgtgtggcatttactagccagagctctgaaaggcagtgctgtctgtttcttgtactgggaccaaagtaaaaatccaagcacattccccttgcagttaggggaggccctactgccttctcaaagcagagaggcagcttatcaaactcagcccaaaactctgtttacatgggtggggagatggagcagggaagtacagagtgggatggtcaggacctgggccattgcaaccaaaatggggacttcctgggtagggaggtcactccctctactcactgagctaggattagggagggttattgccccaaccattgcaatgggaggtggagggacaggctcagcctcctcattgtctaaatgaggcctaaatgtgtgaagtgcgatttctgcttttgtgtaccccaccaccccattaccacagctgcctttgtgtgtttgtgtcaataaaaagccaaaccctgggaaaaaaaaaaaaaaaaaaaaaaaaaaaaaaaaaaaaaaaaaaaa

SEQ ID NO: 287300 - DNA, 1000 bp, Homo Sapiens; identical to SEQ ID NO: 116609

SEQ ID NO: 287301 - DNA, 1000 bp, Homo Sapiens
ctccatgccacaccttatccagttagacacatacataccaatcattagaagaacaagtttagaaggtgtggaacttgtgcctggctggctgggtagtcagctgagcctgttgctgagcccggtggtctggattggagtatggccagggcaggagtacacagaatagaatttagactgtcccttgagtagaatccactgattttctgtggctccagtgagaacaaggctttgaaactgaacaagataacttctagaaatgaactgtactaatccctttccccagattgtatcatgagtagaatcaggttcacgtggtgcttcaaagccctgagaagaatatttctttggaccccaggcactaggggccacctgcctgggagtctccctgcctcactcctctaggcaggggagtgatgcttcaggacgtgacaggctgttctaacatgtgtctacctgagggctagttgaaggatccaggagtattttcttcttgggtgggccctgaacaaagccaaaaattgtagaaaccagtctagaaaaagtcctgctcatctgtggccactgccttctagccgtcctccaccttgcagaaagaatctagcctttggtctctctctctctcatcggggtcatttgctattcccctctgatattcaaccctatagaaggagcctggactctgatccctctgtacaggctggatggaaggggccctccacacttcctgggaggtcagagacaaactgtttcagagagtcagatggacttcccaagacttgttgagagatgtgacatggttcttggatttcctctgtagcagcctcctggacttcctgaggactcgacattgtccacagatgtactggccattacatgaaacaagaaaccaagcatctttgctgttgttaattattatatgtgccattgttacaggagattataggctagtctgtaataaattatcttatagcaaaaaaaaaaaaaaaaaaaaaaaaaaaaa

SEQ ID NO: 287302 - DNA, 1000 bp, Homo Sapiens
tcatttttttttagttacagaagcagatgtgttaatatttagaagaagatgtatatcttccagattttgttatatatttggcataaaatacggcttacgttgcttaagattctcagggataaacttccttttgctaaatgcattctttctgcttttagaaatgtagacataaacactccccggagcccactcaccttttttctttttctttttttttttttaactttattccttgagggaagcattgtttttggagagattttctttctgtacttcgttttacttttctttttttttaacttttactctctcgaagaagaggaccttcccacatccacgaggtgggttttgagcaagggaaggtagcctggatgagctgagtggagccaggctggcccagagctgagatgggagtgcggtacaatctggagcccacagctgtcggtcagaacctcctgtgagacagatggaaccttcacaagggcgcctttggttctctgaacatctcctttctcttcttgcttcaattgcatacccactgcctgcccagactttctatccagcctcactgagctgcccactactggaagggaactgggcctcggtggccggggccgcgagctgtgaccacagcaccctcaagcatacggcgctgttcctgccactgtcctgaagatgtgaatgggtggtacgatttcaacactggttaatttcacactccatctccccgctttgtaaatacccatcgggaagagactttttttccatggtgaagagcaataaactctggatgtttgtgcgcgtgtgtggacagtcttatcttccagcatgataggatttgaccattttggtgtaaacatttgtgttttataagatttaccttgtttttatttttctactttgaattgtatacatttggaaagtacccaaataaatgagaagcttctatccttaaaaaaaaaaaaaaaaaaaaaaaaaaaaaaaaaaaaaaaaaaaaaaa

SEQ ID NO: 287303 - DNA, 1000 bp, Homo Sapiens; identical to SEQ ID NO: 116610

SEQ ID NO: 287304 - DNA, 1000 bp, Homo Sapiens
agttgccaggaaattttttttttttttttcagacggagtttcgctcttgttgcccaggctgggagggcaatggcaccgtcttggctcactgcaacctccgcctcccgggttccagcgattctcctgcctcagccttccgagtagctgggattacaggctcctgccaccacgcctggctaggaaattttttgttgttaatatgacatttggattaatctccagcttcaacagtacttcttttgtccataaatctcaggaatgttttaggcagaaaactggttttaccctgttgataatcagaaggagtgtgctttaggatttattgcataatactattctttaattgcaatcctaggtatctatagcatgagtggccttagtgagtttgttgaagtgcacatgtttttcaagagtaaaatttaagattaaaaatatatcctatatatagatatctagaaaacttggtttgtggtgcacagttaagtgttggatcactaaataaccattgcaggtaccgtttgtgtaacattactcatttctgtatattccttttatgggaagatattttgccatggtaactaaaacttttcagttctacttttatgatgtgaatgaatgctacgttttattaaatattaccaggtcagtactatttttatactttattaagcaacaggggattttagtttaataggctcaaaataaaaagttcttaatggaacagttaaaaacaaaacactaacaatctttacgtgaaaatccccactaatagtgccacaataatttctatagaaatatctaaggtcattaaatagatttttgaagacggttcttcattgtgtcaggatgacctttcatatcattctcaccaacttgtagtgcccaccgttatttgtaactattaaaccatactaagtatgtttgtaaccagcattgtgatatattctgtacttgtattgctaaaaatgaattattgacctaataaatatagtgttcctgc

SEQ ID NO: 287305 - DNA, 905 bp, Homo Sapiens
tctcccgaattcggcacgaggcggcgtctcgaggcgagttggcggagctgtgcgcgcggcggggcgatggggggctcgggcagtcgcctgtccaaggagctgctggccgagtaccaggacttgacgttcctgacgaagcaggagatcctcctagcccacaggcggttttgtgagctgcttccccaggagcagcggaccgtggagtcgtcacttcgggcacaagtgcccttcgagcagattctcagccttccagagctcaaggccaaccccttcaaggagcgaatctgcagggtcttctccacatccccagccaaagacagccttagctttgaggacttcctggatctcctcagtgtgttcagtgacacagccacgccagacatcaagtcccattatgccttccgcatctttgactttgatgatgacggaaccttgaacagagaagacctgagccggctggtgaactgcctcacgggagagggcgaggacacacggcttagtgcgtctgagatgaagcagctcatcgacaacatcctggaggagtctgacattgacagggatggaaccatcaacctctctgagttccagcacgtcatctcccgttctccagactttgccagctcctttaagattgtcctgtgacagcagccccagcgtgtgtcctggcaccctgtccaagaacctttctactgctgagctgtggccaaggtcaagcctgtgttgccagtgcgggccaagctggcccagcctggagctggcgctgtgcagcctcaccccgggcaggggcggccctcgttgtcagggcctctcctcactgctgttgtcattgctccgtttgtgtttgtactaatcagtaataaaggtttagaagtttgaccctaaaaaaaaaaaaaaaaaaaaaaaaa

SEQ ID NO: 287306 - DNA, 1000 bp, Homo Sapiens; identical to SEQ ID NO: 116611

SEQ ID NO: 287307 - DNA, 1000 bp, Homo Sapiens
agacactgtactatgacacagaccctttcctcttctacgtcatgacagagtatgactgtaagggcttccacatcgtgggctacttctccaaggagaaagaatcaacggaagactacaatgtggcctgcatcctaaccctgcctccctaccagcgccggggctacggcaagctgctgatcgagttcagctatgaactctccaaagtggaagggaaaacagggacccctgagaagcccctctcagaccttggcctcctatcctatcgaagctactggtcccagaccatcctggagatcctgatggggctgaagtcggagagcggggagaggccacagatcaccatcaatgagattagtgaaatcaccagcatcaagaaggaggatgtcatctccactctgcagtacctcaatctcatcaactactacaagggccagtacatcctcacactgtcagaggacatcgtggatggccatgagcgggccatgctcaagcggctcctgcggatcgactccaagtgtctgcacttcactcccaaggactggagcaagagggggaagtggtgaccagacactgcccactgcagtgccaagacggcagcaggactggggctgatagcccaccccgcccccactgcagctcccacaaagcactctaagggagatggggctgaggacagctcaaaaaggagaggacaggcctggcaggggcccactggtgcccagcaccaaggcgagctccgggctcagaccaactccaaggtcagctggccacaggcccaggcctcctctgaagcagggaccagagggagccaggcagctgtgtacagtgagaagggatccggatgggggagctctgtacagagggctggtgattgtaaaaatttcttttgtaaagtagaagttgggggtggggtgggtgctggctgcaaaaatttctggcttctcttacccctattgcccccggcaataaattgtttctatatgccaaaaaaaaaaaaaaa

SEQ ID NO: 287308 - DNA, 1000 bp, Homo Sapiens
ccttcctctcccaccatgcgatgagcatcctttcaggccagtgtctgcagagcctcagttaccaggtttggtttctgagtgcctatctgtgctctttcctccctctgcgggcttctcttgctctgagcctcccttccccattcccatgcagctcctttccccctgggtttccttggcttcctgcagcaaattgggcagttctctgccccttgcctaaaagcctgtacctctggattggcggaagtaaatctggaaggattctcactcgtatttcccacccctagtggccagaggagggaggggcacagtgaagaagggagcccaccacctctccgaagaggaaagccacgtagagtggttggcatggggtgccagcatcgtgcaagctctgtcataatctgcatcttcccagcagcctggtaccccaggttcctgtaactccctgcctcctcctctcttctgctgttctgctcctcccagacagagcctttccctcaccccctgaccccctgggctgaccaaaatgtgctttctactgtgagtccctatcccaagatcctggggaaaggagagaccatggtgtgaatgtagagatgccacctccctctctctgaggcaggcctgtggatgaaggaggagggtcagggctggccttcctctgtgcatcactctgctaggttgggggcccccgacccaccatacctacgcctagggagcccgtcctccagtattccgtctgtagcaggagctagggctgctgcctcagctccaagacaagaatgaacctggctgtgtcagtcattttgtcttttcctttttttttttttgccacattggcagagatgggacctaagggtcccacccctcaccccacccccacctcttctgtatgtttgaattctttcagtagctgttgatgctggttggacaggtttgagtcaaattgtactttgctccattgttaattgagaaactgtttcaataaaatattcttttctac

SEQ ID NO: 287309 - DNA, 1000 bp, Homo Sapiens
gtgctacgtaagcacactgtctttctggatggggacttgtattttaaataacttatcattccagctatgttggactagggtccaaagcattttataatatttttttttaatctaggaaaaagacccaaacaaatctaacttcttgctttctcacctatttgaattttctcctacctaatttgtttgtgtctttattatagctcagtttgacttctcaaacttttcaagggttggggcagctgcacttttaggttgcctataggaaatattgcatatggagattacagtgtttttctgacctagttcaagaccagaacatgggtcatagggtttttattcagcaaaatgaaaacgtatcttcagaacttaacatattactggatgtgatacagattttgctttctgtggaattgaaaattcacaaaaattcacagcttaaatttcccatcagtgactggaggaatttttttcaggtgcttcctatattactatccctcatgcatattaactctttagaattttaggttaagtgatgtctatagaagtagcctggaaaaccatgagttttggagttcagtgaccccctgctttcctctgctcctcccttcccaaggcattgaagctgaatgtgccaactggcagttagaagcgaaagatggcattgggagaaattttagagagctttcaaactctttattctcatgttccacatggtctaattttaacataaataatatgccttcacactggattgtaaaaggcatgtgatttttgagattttattttgtgatgtattgtcttctgcagtattaaagggaaagagatattaatgtgcattaccctatcttgtttttgaagccagggtagttgtatgattttgttaccagcagtgctaacctgaatgtgacctggttaccttggaaatgcaggaacttatatgaatgtactataaaataaaatgcggactgattcccaggaaaaaaaaaaaaaaaaaaaaaaa

SEQ ID NO: 287310 - DNA, 1000 bp, Homo Sapiens
tattacacagtggcttaatgatgttgactgtttcttggggcttcatgacagaaagatgtgtgttctcggactctgtgctcttattgatatggaacagataccccaagttttaaatcaggtttctggacagattttgccggcttttatccttttatttaacggattgaaaagagcatatgcctgccatgcagaacatgagaatgacagtgatgatgatgatgaagctgaagatgatgatgaaaccgaggaactggggagtgatgaagatgatattgatgaagatgggcaagaatatttggagattctggctaagcaggctggtgaagatggagatgatgaagattgggaagaagatgatgctgaagagactgctctggaaggctattccacaatcattgatgatgaagataaccctgttgatgagtatcagatatttaaagctatctttcaaactattcaaaatcgtaatcctgtgtggtatcaggcactgactcacggtcttaatgaagaacaaagaaaacagttacaggacatagcaactctggctgatcaaagaagagcagcccatgaatccaaaatgattgagaagcatggaggatacaaattcagtgctccagttgtgccaagttctttcaattttggaggcccagcaccagggatgaattgagttatctctttctttcctgctgtgtgcttgtagtgaagagcttgtgttcctcctagtagtggttccagaactggttcatgttatctattctaaactaataatcaatagatggacaaaagaaacaacaaccccaggagatgggacctgatcatgcaacctggcactggaaaagaaatcagcgggattttgggggtgggggggatgggaggtaccttagagggagtattttctttattttttgaagaaagtaagatcctgactctgaagcttcaaagtgacactgtggaaatctgaaacgaggggatgtcatgaaggcagcttttctttttctga

SEQ ID NO: 287311 - DNA, 1000 bp, Homo Sapiens; identical to SEQ ID NO: 116613

SEQ ID NO: 287312 - DNA, 1000 bp, Homo Sapiens
gtgttagctgattgtattttatctctaaagatttagaactttagaaaatgccgacttcttccatctatttctgaaaggttctttgtggatttatatagagttgagctatataaacattaactttagatttgggatttaaaatgcctattgtaagatagaataattgtgaggctggattcactacacaagatgaacttcacttcataaattaattataccttagcgatttgcttctgataatctaaaagtggctagattgtggttgttttggttaaggtgatatggaggtgggagagcttttagttaagtaagaagctatgtaaactgacaaggatgctaaaataaaagtctctgaagtattccatgccttttggaccctttcctcgcaactaactgtcaactgttgatcaaaaaagtcaaggcattgtatgttgcttctgtggttattattctgtgatgcttagactacttgaacccataaacttggaagaatctttgagcaaattttctcagttgtctgtatgacttcagtatattcctgggaatgccataggattttttgtgcttgatacatggtatccagtttgcatagtatcacttctttgtaatccagttgctgttaagaatgatgtactttaaaggaaaagagaaaactgcatcacagtcccattctccagtgtccatgcaatgaattgctgagcatttaggaagcagcaccaagtctattacaggcatggtgtgaaacttgatgtttgacctgtgatcaaaattgaaccattgtacagtttggcttctgtttgcttcaaaatatgtagaattgtggttgatgattaatttgcgagactaactttgagagtgtaacagttttgaagaaaacattgaatgttttacaaatgaaggggcttcacggaatgttacaatgttactaatataatttggcttttgttatgcaaattgttaacaccagctattaaaatatattttagtagaaaaaaaaaaa

SEQ ID NO: 287313 - DNA, 661 bp, Homo Sapiens
ccggcggtgacaacggcaacatggccctgaacggagctgaagtcgacgacttctcctgggagcccccgactgaggcggagacgaaggtgctgcaggcgcgacgggagcggcaagatcgcatctcccggctcatgggcgactatctgctgcgcggttaccgcatgctgggcgagacgtgtgcggactgcgggacgatcctcctccaagacaaacagcggaaaatctactgcgtggcttgtcaggaactcgactcagacgtggataaagataatcccgctctgaatgcccaggctgccctctcccaagctcgggagcaccagctggcctcagcctcagagctccccctgggctctcgacctgcgccccagcccccagtacctcgtccggagcactgtgagggagctgcagcaggactcaaggcagcccaggggccacctgctcctgctgtgcctccaaatacagatgtcatggcctgcacacagacagccctcttgcagaagctgacctgggcctctgctgaactgggctccagcacctccctggagactagcatccagctgtgtggccttatccgcgcatgtgcggaggccctgcgcagcctgcagcagctacagcactaagagaagcccctgagaaaaaccctctagaaaaacaaaaaaaa

SEQ ID NO: 287314 - DNA, 971 bp, Homo Sapiens
gattgcttgaggagagaagtatgtgatcagaaagcattctttgtctattaactcctgcccagcaaaagtgaaagaaaattcatgggagcatgcaagaacaaagagcacagcaaagctggacaaacacagcaatccaggcaggggatttccaactcaactctggtatgtaagctgcatgcaaagtcctttttctgtctctggtttctggccccttgtctgcagagatggctcccaatgcttcctgcctctgtgtgcatgtccgttccgaggaatgggatttaatgacctttgatgccaacccatatgacagcgtgaaaaaaatcaaagaacatgtccggtctaagaccaaggttcctgtgcaggaccaggttcttttgctgggctccaagatcttaaagccacggagaagcctctcatcttacggcattgacaaagagaagaccatccaccttaccctgaaagtggtgaagcccagtgatgaggagctgcccttgtttcttgtggagtcaggtgatgaggcaaagaggcacctcctccaggtgcgaaggtccagctcagtggcacaagtgaaagcaatgatcgagactaagacgggtataatccctgagacccagattgtgacttgcaatggaaagagactggaagatgggaagatgatggcagattacggcatcagaaagggcaacttactcttcctggcatcttattgtattggagggtgaccaccctgggcatggggtgttggcaggggtcaaaaagcttatttcttttaatctcttactcaacgaacacatcttctgatgatttcccaaaattaatgagaatgagatgagtagagtaagatttgggtgggatgggtaggatgaagtatattgcccaactctatgtttctttgattctaacacaattaattaagtgacatgatttttactaatgtattactgagactagtaaataaatttttaagccaa

SEQ ID NO: 287315 - DNA, 1000 bp, Homo Sapiens; identical to SEQ ID NO: 116615

SEQ ID NO: 287316 - DNA, 1000 bp, Homo Sapiens
atctcacacatctaaacttaagtggaaataaactgaaagatatcagcaccttggaacctttgaaaaagttagaatgtctgaaaagcctggacctctttaactgtgaggttaccaacctgaatgactaccgagagagtgtcttcaagctcctgccccagcttacctacttggatggctatgaccgagaggaccaggaagcacctgactcagatgccgaggtggatggtgtggatgaagaggaggaggacgaagaaggagaagatgaggaagacgaggacgatgaggatggtgaagaagaggagtttgatgaagaagatgatgaagatgaagatgtagaaggggatgaggacgacgatgaagtcagtgaggaggaagaagaatttggacttgatgaagaagatgaagatgaggatgaggatgaagaggaggaagaaggtgggaaaggtgaaaagaggaagagagaaacagatgatgaaggagaagatgattaagaccccagatgacctgcagaaacagaactgttcagtattggttggactgctcatggattttgtagctgtttaaaaaaaaaaaaaaggtagctgtgatacaaaccccaggacacccacccacccaaagagccaaagaatagttcctgtgacattccgccttccttccatgtagtccctcttggtaatctaccaccaagcttgtggacttcaccccaacaaaattgtaagcgttgttaggtttttgtgtaagattcttgctgtagcgtggatagctgtgattggtgagtcaaccgtctgtggctaccagttacactgagattgtaacagcatttttactttctgtacaacaaaaaagctttgtaaataaaatcttaacattttgggtctgttttttcatgctttgctttttaattattattattattttttttacattaggacattttatgtgacaactgccaaaaaagtatttttaagaatttaagcgaaataaacagttactctttggc

SEQ ID NO: 287317 - DNA, 1000 bp, Homo Sapiens; identical to SEQ ID NO: 116616

SEQ ID NO: 287318 - DNA, 1000 bp, Homo Sapiens
taatgttacaacaactattttttaagaaaaacaagttttagaaatttggtttcaagtgtacatgtgtgaaaacaatattgtatactaccatagtgagccatgattttctaaaaaaaaaaataaatgttttgggggtgttctgttttctccaacttggtctttcacagtggttcgtttaccaaataggattaaacacacacaaaatgctcaaggaagggacaagacaaaaccaaaactagttcaaatgatgaagaccaaagaccaagttatcatctcaccacaccacaggttctcactagatgactgtaagtagacacgagcttaatcaacagaagtatcaagccatgtgctttagcataaaagaatatttagaaaaacatcccaagaaaatcacatcactacctagagtcaactctggccaggaactctaaggtacacactttcatttagtaattaaattttagtcagattttgcccaacctaatgctctcagggaaagcctctggcaagtagctttctccttcagaggtctaatttagtagaaaggtcatccaaagaacatctgcactcctgaacacaccctgaagaaatcctgggaattgaccttgtaatcgatttgtctgtcaaggtcctaaagtactggagtgaaataaattcagccaacatgtgactaattggaagaagagcaaagggtggtgacgtgttgatgaggcagatggagatcagaggttactagggtttaggaaacgtgaaaggctgtggcatcagggtaggggagcattctgcctaacagaaattagaattgtgtgttaatgtcttcactctatacttaatctcacattcattaatatatggaattcctctactgcccagcccctcctgatttctttggcccctggactatggtgctgtatataatgctttgcagtatctgttgcttgtcttgattaacttttttggataaaaccttttttgaacagaaaaaaaaaaaaaaaaaaaa

SEQ ID NO: 287319 - DNA, 1000 bp, Homo Sapiens
cagcaggatcatgtgacttcaaatgcagagtgttttctgcctacattaaagaagtggatgaaaagccagccagcacgccctggggcagcaagatgccttttgggcagctgatgtcagagtttggtggcagtggcactggtggctgggtccacggggtaagcttctctgccagtgggagccgcctggcctgggtcagccacgacagcaccgtgtctgttgctgatgcctcaaaaagtgtgcaggtctcgactctgaagacagagttcctgccgctcctaagtgtgtcatttgtctcagagaacagcgtcgtggctgctggccatgactgctgcccaatgctctttaactacgatgaccgcggctgcctgaccttcgtctccaagttagatattccaaaacagagcatccaacgcaacatgtctgccatggaacgcttccgcaacatggacaagagagccacaactgaggaccgcaacacggccttggagacgctgcaccagaatagcatcactcaagtctctatttatgaggtggacaagcaagattgtcgcaaattttgcactactggcatcgatggagccatgacaatttgggatttcaagaccctcgagtcttccatccagggcctccggataatgtgaagctgagtgagcctccgccatccagcatgacaaactgtggccgaccgcagctgtgccgtggcacgatggcgaggaagccagccccaaggaaacactgaaaacacatatcacgccaatgccgtgtggttttgtttgaatataaaattggtgaaagtgttggtttttttaaggcagtaatttttttgtttgtttttttgcgatttcattccattcttgaccaaagcttctctttaagtagtttattatggaaaattgtcacactaacttaaaagacagggtgagggagatatgtaaattgtccactagaaaattaaataaaagaactgaatgtggaaaaaaaaaaaaaaaaaaaaaaaaaa

SEQ ID NO: 287320 - DNA, 1000 bp, Homo Sapiens
agccatcctcccgctttggcctcctaaagtgctgggattacatgagccaccacatgcagccagatgtttgaatattttaagagcttctttcgaaagtttcttgttcatactcaaatagtagttattttgaagatattcaaacttatattgaagaagtgactttagttcctcttgttttaagcttctttcatgtattcaaatcagcatttttttctaagaaattgctatagaatttgtggaaggagagaggatacacatgtaaaattacatctggtctcttccttcactgcttcatgcctacgtaaggtctttgaaataggattccttacttttagttagaaacccctaaaacgctaatattgattttcctgatagctgtattaaaaatagcaaagcatcggactgaaccaactttggaaataatttatttttataatgggatcatgttaagtagaagtagctttttatgcaaatacatgcatttatgcaatattaatgtaagggctctaaaacaatggagtagagccagaggtataactgaataagaaatttttttaagcaagagaaagacaactgttctgcgggttggagaaaatacaattttttttttttttttttttgagacagtctcgctctgtcccccaggctggagtgcagtggctcgatctctgctcactgcaagctccgcctcctgggttcatgccattctcctgcctcagcctcctgagtagctgggactacaggcgctcgccatgtatttagcagagacggggtttcaccgtgttagccaggatggtctcaatctcctgacctcatattccacccgcctcggcctcccaaagtgctgggattacaggcgttagccactgcgcccggcccgagaaaatacagttttaaaaagagaaagctttataacctcaccaatgaatacaaatgtttaaataaaatattgattaaaaaaacattaaaagcgaaaaaaaaaaaaaaaaaaaaaaaaaaa

SEQ ID NO: 287321 - DNA, 991 bp, Homo Sapiens
aacggattcgccatcgtgagttccaggattttcaaaatggctgcagctcctcaagcaccggggcggggatctctccgtaagacgagacctctggttgtgaagacgtcgttgaacaacccatacatcatccgctggagcgctctggagagcgaggatatgcacttcatcctacagacgcttgaggacaggcttaaagctattggacttcagaagattgaagataagaagaaaaagaacaaaacaccttttctgaaaaaagaaagcagagagaaatgcagcattgctgttgatattagtgataatctgaaggagaagaaaacagatgctaagcagcaagtgtcagggtggacgcctgcacacgtcaggaagcagcttgtcattggcgttaacgaagttaccagagccctggaaaggagggaactgctgttagttctggtgtgtaaatcagtcaagcctgccatgatcacctcacacttgattcagttaagcctaagcagaagtgtccctgcctgtcaggtcccccggctcagtgagagaatcgcccccgtcattggcttaaaatgtgttctagccttggcgttcaaaaagaacaccactgactttgtggacgaagtaagagccatcatccccagagtccccagtttaagtgtaccatggcttcaagacagaattgaagattctggggaaaatttagagactgaacctctggaaagccaagacagagagcttttggacacttcatttgaagatctgtcaaaacctaagagaaagcttgctgacggtcggcaggcttctgtaacattacaaccccttaaaataaagaaactgattccaaaccctaataagataaggaaaccacccaaaagtaaaaaagctactccaaagtaatcttgcataaacttgtcatgtcatacagtttgtgaaaggacaccttgtaaagaagccttgaaactaataaaatgagttatacttacataaaaaaaaaaaaaaa

SEQ ID NO: 287322 - DNA, 1000 bp, Homo Sapiens; identical to SEQ ID NO: 221858

SEQ ID NO: 287323 - DNA, 1000 bp, Homo Sapiens
atccctagacgcttcattgatcgaattcaaatcttgccccgtgggaatggttgtccaagaaaagaaatcatagtctggaagaagaacaagtcaattgtgtgtgtggaccctcaagctgaatggatacaaagaatgatggaagtattgagaaaaagaagttcttcaactctaccagttccagtgtttaagagaaagattccctgatgctgatatttccactaagaacacctgcattcttcccttatccctgctctggattttagttttgtgcttagttaaatcttttccagggagaaagaacttccccatacaaataaggcatgaggactatgtgaaaaataaccttgcaggagctgatggggcaaactcaagcttcttcactcacagcaccctatatacacttggagtttgcattcttattcatcagggaggaaagtttctttgaaaatagttattcagttataagtaatacaggattattttgattatatacttgttgtttaatgtttaaaatttcttagaaaacaatggaatgagaatttaagcctcaaatttgaacatgtggcttgaattaagaagaaaattatggcatatattaaaagcaggcttctatgaaagactcaaaaagctgcctgggaggcagatggaacttgagcctgtcaagaggcaaaggaatccatgtagtagatatcctctgcttaaaaactcactacggaggagaattaagtcctacttttaaagaatttctttataaaatttactgtctaagattaatagcattcgaagatccccagacttcatagaatactcagggaaagcatttaaagggtgatgtacacatgtatcctttcacacatttgccttgacaaacttctttcactcacatctttttcactgactttttttgtgggggcggggccggggggactctggtatctaattctttaatgattcctataaatctaatgacattcaataaagttgagcaaacattttactt

SEQ ID NO: 287324 - DNA, 1000 bp, Homo Sapiens
tcccattcattctcaaaggccttcaactccaattacgagcagcggactgtcctgtggcgagcaggttttaagggcaagtctaaacccaatcttctaaaacaagaaaccagcagcctggcctgttgtttgaggatcctgtttcgaatgtatgttgatgagaaccgcagggattcctgggaagaaatacagcagagacttttaactgtttgcagtgaagctcttgcctatttcatcactgtgaattctgagagccatcgggaggcctggacaagtctcttgttgttacttctaactaaaaccctcaaaataaatgatgaaaagttcaaagcacatgcttcaatgtactacccctacttgtgtgaaattatgcagtttgacctgatccctgagctccgagcagttctgcggaagttcttcctacggataagtgttgtgtataagatatggataccagaagagccatcacaggtaccagcagcactgtcaccagtgtggtagccctggctgcccaggccagtgctgcagctctgcagaatgttcagcatgccatttctgactggcacatctcgtgaagtttcatagaaacaaggagttggcatcttggatctcagaatggcctggaaacggatggcctctacgctgttccatcacagtctccaactaaggcttatggtatttcattaaactgttgcatacccagttagcacagtaggtggggagtctgcttcatttctatcattccatttttctgattaaactgtcaaatctgtcattgcatatgccatcgttttctagcaaaatcccatgattggctataaacgttttgtaagaagtcactctccttgaaaatactgaacatagctgtataggtttgtgattattagagaatatgttaataaaacttcttgtaacggctaactgccacctaaaatatgctgggttttctgttgtttgagtgtgttagagaaatttgaatgtttttgtcagttacgagtcagcc

SEQ ID NO: 287325 - DNA, 1000 bp, Homo Sapiens
aaaagccccacgtttttggcaggtgtggaagtgaaacttacccaaagaactatagatgtaaagattgaacttctacaagaagtacaactcaggagagctgtattttgaaggataaaatgtttataattggggagtggggagagaagaagaaattattgttcatggtaaaagatatttagcaactatggtattcttattctgaagatttttgcacactcaggctatctgagatactggtaatcatcctgtgaaaaatgtacagagatgcaggtctgtaatataaaaatcttaaaacattatatagttcttcctgcactgttttctttattttcttattcatttgctaaatacccataatattttgtcaaatgcactaaacatttgggtggaactttcttttttattttatagggatttttagttttgccctttttggtaggtggtgattttgaggctgtaacatgcccagaagctgttgtggccgacacttcaacaatagggaaaaaaaggtagaaaatatccctactgacagtaactacctgtcacatatttctcttaggacttttaaagatgagccattaaaatagaatgatcctttatggaccaaaacttgaatcactgcaaaatgaatccagattgctgtcattttcttttcttttgggtggtggggcttgatgtagattttactctatgtacagaatttaacgttgaatatattaaaataacaaatctggcatggtttgcggaggttagatttactggaaatgtattcatactgtgaattgtgctctgatggttaaaagacaagattgtcaagcattccgtattaacagtggatgtagaaaattttttcagatggacaaaatgtatatggtacagatgtaaagttttctatgtaaaaaattctgtacaactttctgtacaatattgattcccatctggcatattctaatcaggttataggtcaataaagtttttgaattatttcatcagtgcaatc

SEQ ID NO: 287326 - DNA, 1000 bp, Homo Sapiens; identical to SEQ ID NO: 221859

SEQ ID NO: 287327 - DNA, 1000 bp, Homo Sapiens; identical to SEQ ID NO: 116620

SEQ ID NO: 287328 - DNA, 1000 bp, Homo Sapiens
gctgagcgctccattcatgatgccctatgtgttattcgttgtttagtgaagaagagggctcttattgcaggaggtggtgctccagaaatagagttggccctacgattaactgaatattcacgaacactgagtggtatggaatcctactgcgttcgtgcttttgcagatgctatggaggtcattccatctacactagctgaaaatgccggcctgaatcccatttctacagtaacagaactaagaaaccggcatgcccagggagaaaaaactgcaggcattaatgtccgaaagggtggtatttccaacattttggaggaactggttgtccagcctctgttggtatcagtcagtgctctgactcttgcaactgaaactgttcggagcattctgaaaatagatgatgtggtaaacactcgataatctggataactgactagcaccattatgatcaccagtattgtggctggaatggaagaagatcaccttggtgttccttgtttggaagattatttcctctgaatttctgggcttggtcttccagttggcatttgcctgaagttgtattgaaacaatttaatgaaaatattaaatatttggtttcaaaaggcagatttatcttctcccaacattctgttatttctgatacttttgaaaaactaataaaaactaataaaagaagcgtaaaaagtgagtttacatgttgaggaaaaaaatggcccaatatgctcatcactgataaatgctccctggccttaaaaactaccaacatataatatatatgctgtcttaaaagttaatgatccaagtggcacctctctgaacctactttggcttgggaggctgcccagttaaaacaaaaataagttaatggtacagaaagagaatgaaaaatgaaagcctccttttatcctatcatcctaattccttttcccagtaataatgactgctgtgttggattccttctgcaaataaaagtgtatacataaaaaaaaaaaaaaaa

SEQ ID NO: 287329 - DNA, 1000 bp, Homo Sapiens
ttattaacaggcaattaatttataattatcctgaacagctctttggtgctgctggtgtcatggctattgagcatgcagattttgcaggtgtggaacgcctagctcttgtcacaggtggtgaaattgcctctacctttgatcacccagaactggtgaagcttggaagttgcaaacttatcgaggaagtcatgattggagaagacaaactcattcacttttctggggttgcccttggtgaggcttgtaccattgttttgcgtggtgccactcaacaaattttagatgaagcagaaagatcattgcatgatgctctttgtgttcttgcgcaaactgtaaaggactctagaacagtttatggaggaggctgttctgagatgttgatggctcatgctgtgacacagcttgccaatagaacaccaggcaaagaagctgttgcaatggagtcttatgctaaagcactgagaatgttgccaaccatcatagctgacaatgcaggctatgacagtgcagacctggtggcacagctcagggctgctcacagtgaaggcaataccactgctggattggatatgagggaaggcaccattggagatatggctatcctgggtataacagaaagttttcaagtgaagcgacaggttcttctgagtgcagctgaagcagcagaggtgattctgcgtgtggacaacatcatcaaagcggcacccaggaaacgtgtccctgatcaccacccctgttaagcattcccacgtgctgtcgatctttggaccagtttctagcaaagttgtgtttgaaagatactctattaaagaagactgtggaatctgtttatcggtgcccattatatccttaagtttggatatttagctgaccttcgctttaacataggtctaatttatttgccgtgtcattttccatacaaatcagttgatttaaaaaagttcatttctcatactgtgcattaaaataaaaatttgaacaattacttggttaaaaaaaa

SEQ ID NO: 287330 - DNA, 921 bp, Homo Sapiens
gacaggtcgcctgactgggctcctccccgggcccgccccgacaggtttgtcttgtgaccgcgggcggccgctgcttctttcccgagcttggaacttcgttatccgcgatgcgtttcctggcagctacattcctgctcctggcgctcagcaccgctgcccaggccgaaccggtgcagttcaaggactgcggttctgtggatggagttataaaggaagtgaatgtgagcccatgccccacccaaccctgccagctgagcaaaggacagtcttacagcgtcaatgtcaccttcaccagcaatattcagtctaaaagcagcaaggccgtggtgcatggcatcctgatgggcgtcccagttccctttcccattcctgagcctgatggttgtaagagtggaattaactgccctatccaaaaagacaagacctatagctacctgaataaactaccagtgaaaagcgaatatccctctataaaactggtggtggagtggcaacttcaggatgacaaaaaccaaagtctcttctgctgggaaatcccagtacagatcgtttctcatctctaagtgcctcattgagttcggtgcatctggccaatgagtctgctgagactcttgacagcacctccagctctgctgcttcaacaacagtgacttgctctccaatggtatccagtgattcgttgaagaggaggtgctctgtagcagaaactgagctccgggtggctggttctcagtggttgtctcatgtctctttttctgtcttaggtggtttcattaaatgcagcacttggttagcagatgtttaattttttttttaacaacattaacttgtggcctctttctacacctggaaatttactcttgaataaataaaaactcgtttgtcttgtcttctgcaaaaaaaaaaaaaaaaaaaaaaaaa

SEQ ID NO: 287331 - DNA, 1000 bp, Homo Sapiens; identical to SEQ ID NO: 116622

SEQ ID NO: 287332 - DNA, 1000 bp, Homo Sapiens
ctttcgggtgttcattggcgtgaatgaccttgaaagggagggacagtacatgttcacagacaacactccactgcagaactatagcaactggaatgagggggaacccagcgacccctatggtcatgaggactgtgtggagatgctgagctctggcagatggaatgacacagagtgccatcttaccatgtactttgtctgtgagttcatcaagaagaaaaagtaacttccctcatcctacgtatttgctattttcctgtgaccgtcattacagttattgttatccatcctttttttcctgattgtactacatttgatctgagtcaacatagctagaaaatgctaaactgaggtatggagcctccatcatcatgctcttttgtgatgattttcatattttcacacatggtatgttattgacccaataactcgccaggttacatgggtcttgagagagaattttaattactaattgtgcacgagatagttggttgtctatatgtcaaatgagttgttctcttggtatttgctctaccatctctccctagagcactctgtgtctatcccagtggataatttcccagtttactggtgatgattaggaaggttgttgatggttaggctaacctgccctggcccaaagccagacatgtacaagggctttctgtgagcaatgataagatctttgaatccaagatgcccagatgttttaccagtcacaccctatggccatggctatacttggaagttctccttgttggcacagacatagaaatgctttaaccccaagcctttatatgggggacttctagctttgtgtcttgtttcagaccatgtggaatgataaatactctttttgtgcttctgatctatcgatttcactaacatataccaagtaggtgctttgaacccctttctgtaggctcacaccttaatctcaggcccctatatagtcacactttgatttaagaaaaatggagctcttgaaatcaaaagaaaaaaa

SEQ ID NO: 287333 - DNA, 1000 bp, Homo Sapiens
atgagagctatgaatgtattgacagaagctgaagagcgatgcaatgacttgatgaagaagaagagaattgtagaaaatgacaaatccaaaattcttacaactatagaagaccttgaccagaagaaaaaccaagccctaaatattgcatggcaaaaggtgaacaaggactttgggtctattttttctactcttttgcctggtgctaatgctatgcttgcaccaccagagggtcaaactgttttggatggtctggagttcaaggttgccttaggaaatacctggaaagaaaacctaactgaacttagtggtggtcagaggtctttagtggccttgtcattaatactgtccatgcttctcttcaaacctgctccaatttatatccttgatgaggtagatgcagccttggatctttctcatacccaaaacattggacagatgctgcgtactcatttcacacattctcagttcattgtggtgtcactaaaagaaggtatgttcaacaatgcaaacgttcttttcaaaaccaagtttgtggatggtgtttctacagtagccagatttactcaatgtcaaaatggaaagatttcaaaggaagcaaaatccaaggcaaaaccacccaaaggagcacatgtggaagtttaaactacaaagttatttcttcatcttgacctgtttttttaaatgtaaacttttaaggacttgagataactaatttgtttatatacaaaaattaatgttactgtgttacttaacccatgttttctctttatataatcacttatcgcttacaaatgagcatatattcctcatctcttaactagtctaattatggtccaattattgtggttgtgattttatgcatatccatcaaaatgttttttttcttatgcgggtcttttatatattagggatcctgagatacccgattctatatgtaaaagctaatatacaaaaaagcagattaaattacatgataaatgtagctgaaaaaaaaaaaaaa

SEQ ID NO: 287334 - DNA, 1000 bp, Homo Sapiens; identical to SEQ ID NO: 221861

SEQ ID NO: 287335 - DNA, 1000 bp, Homo Sapiens
cagtggtcatttctgagcatcttcctgacttgaacaccttctacagcaaactcttgcaagtccagtttcatccctgtaaggcaaatgtcttttcacgcagaaagtgccatatagacgagataaaggcagctaaaacgagggcagtagagagcacttacccgaccccaaggtgccagagatgccctgaggatggtggttaaggaaacaggagcaggaaatgtacacacagattcctgtccctttgccaactactccttccccatcaaagaaaaacacttgcacacagtaactaccagctccttctctcaaacttgtatttctcctggaaatgtatctcagaaatgacctcctctcccaaccacttcaacgattctttctttgggtttggggttcttgcagttctatcatctaaaataacctttggactgcaggtaaaatgcaattaggacaactaaccaagtagacgaaacaagttcccctaggcaggggtgtccaatattttagcttccctggaccgcattggaagaattttcttgggccacatgtaaaacacactaacactaaccatagttgatgagcttaaaaaaataaaaatagaaaattgcaaaaaaaaaaaaaaaaaaaaatctcagactgttttaagaaagtttaaaaatttgtgttggacttcatgcgggccacaggttggacaagcttgccctagggcattgtgtgctttccgtaacttctcagttgtatttcgttatccatgactctccagtgttttttctgttggaccacacccgtcacagttcacagttccaaagagaaatttcccagcctattctaaatcttgttaatgacgaagagtccaatgtatctcattatttgtagccaattttagactcttttcaatacctcccccccattttaattagtattgatcatattcagtctttcattttactcttcatctgtagcgtgacctcaaggtaaagatgaaactatttcatgaaaaggg

SEQ ID NO: 287336 - DNA, 1000 bp, Homo Sapiens
tggtgttaatttctgattaacccttgaatttaccgtcttctcatcctctgtacaaaagcctcaagtgagggtcaaattcaacattatcctgatctagacagcccccattctcaatccacccttttccaagttgattgcccaaggacttctaacaataaactctcttttgcaccacagacttctttgaaaatatacatgctgttgaccctctctgtagaaaaccgcacacataaaacttaccaacagatttcattggttcttgggttctcccgaagcctatccatggtttatagattaagaattgatgaggtagctgggcacagtggctcacacctacgatcacagcacttcgggaggctgaagcaagcagatcacttgaggtcaggagtttgagaccagcctggccaacatggtgaaaccctgtctctactaaaaatacaaaaagtagccagccgtgatgacaggcacctgtaatcccagctactcgggaggctgaggcatgagaattgcttgaacccgggaggcggaggttgcagtgagcctggatcatgccactgcactccaacctgggcagcagagcaagactctgtctcaaaaggggaaaaaaaaaattgctgatgtgacccatgaagggaactcattttcctcgtaattttggactgccacacattggtacctttagttctctgaaggcccacgtttttatcattaagacctatttgttagctagtagagctttatgttcgctgtccatgaaaccttctgtaaccacagtgactacaagtagttctttctctattgaattattaggtccagaatagaagatgtcattgtacactttatttccctcacactgtgttatgctctgatgtgctatgcttagctatctgtcagagattagtaaattataaaactcatgtgtactacttaagtttatatcttatgctagtttataagaacaattaaaaggacttagaagattaaaaaaaaaaaaaaaaaa

SEQ ID NO: 287337 - DNA, 1000 bp, Homo Sapiens
gggccctgccacagtgccagctgctgggtgtcttctcaggccaccggcgtggcctctggtgcgtccagttctctcccatggaccaggtgctggccacggcctcagctgatggcaccatcaagctctgggcactccaggacttcagctgtctcaagacatttgaggggcacgatgcttctgtgctgaaggtggcctttgtgagccgtggcacgcagctgctgtccagcggttcggatggcctcgtgaagctctggaccatcaagaacaacgagtgtgtgcggacgctggatgcccacgaggacaaggtctgggggctgcactgcagccggctggacgaccacgccctcactggggccagtgactcccgagtcatcctctggaaggatgtgaccgaggcggagcaggcagaggagcaggccaggcaagaggagcaggtggtcaggcagcaagagctggacaacctgctgcatgagaagcggtacctgcgggcgctgggcctggccatctccctggatcggccccacaccgtgctgactgtcatccaggccatccggagggaccctgaggcctgcgagaagctggaagccaccatgctccgactgcggcgcgaccagaaagaggccctgctgcgcttctgcgtcacgtggaacaccaactcgcggcactgccacgaggcccaggccgtgctgggtgtgctcttgaggcgagaggcccccgaggagctgctggcctacgaaggcgtgcgggcagcgcttgaggccctgctgccctacactgagcggcactttcagcggctcagcaggaccctccaggccgccgctttcttggacttcctgtggcacaacatgaagctccctgtgccggccgccgcccccaccccctgggaaacccataaaggcgcactgccctagccggtccggcctctctccagtccatcctgaacccctggaaaacccataaaggccgctctcctggcaaaaaaaaaaaaaaaaaaaaaaaa

SEQ ID NO: 287338 - DNA, 1000 bp, Homo Sapiens; identical to SEQ ID NO: 116625

SEQ ID NO: 287339 - DNA, 1000 bp, Homo Sapiens; identical to SEQ ID NO: 221863

SEQ ID NO: 287340 - DNA, 1000 bp, Homo Sapiens; identical to SEQ ID NO: 116626

SEQ ID NO: 287341 - DNA, 1000 bp, Homo Sapiens; identical to SEQ ID NO: 284449

SEQ ID NO: 287342 - DNA, 1000 bp, Homo Sapiens
gcatcttctcccctgagggcaagttcaagaccaagattggagctggccgcctcatgggccccaagggagtggccgtagaccggaatggacatatcattgtggtcgacaacaagtcttgctgcgtctttaccttccagcccaatggcaaactggttggccgttttgggggccgtggggccactgaccgccactttgcagggccccattttgtggctgtgaacaacaagaatgaaattgtagtaacggacttccataaccattcagtgaaggtgtacagtgccgatggagagttcctcttcaagtttggctcccatggcgagggcaatgggcagttcaatgcccccacaggagtagctgtggactccaatggaaacatcattgtggctgactggggcaacagccgcatccaggtattcgacagctctggctccttcctgtcctatatcaacacatctgcagaaccactgtatggtccacagggcctggcactgacctcggatggccatgtggtggtggctgatgctggcaaccactgctttaaagcctatcgctacctccagtagctgtacagaggccctgcctggcttgtggagggacagacattggggtgattggacaagagggtctggctgggaggtgggccagacctggcagcactgaatgtgggctgtgggcatgggtgcacccggtgccctccctctcctacccccacccccacggttgcactttatttattcggttcttgctttggtgactgggtgagcctggactgtggtcccaaggatgtgtgcagagcttcaccctacccttcttacacacctccccacccctgtcagtctgctccccatcccccagcctggggccagaacagcctaccccaggacaggagtccctctagttgtctccctaccaccctatacacactgacagagacagcaataccccaccccccatattaaataaatgtcttcaccaagaaaaaaaaaaaaaaaaaaaaaaa

SEQ ID NO: 287343 - DNA, 1000 bp, Homo Sapiens
tgctccttaagattgtttatctggagcccacatagtgtggaacaaaaagtcacctagaaagcatccttggtcatcattgtctccttcccacctggcccagagatgcttaaatccaagttgtttctccagctgtcacctcccccaggagatcaggattccactgacgtcctgggcagccagtgaatttaattttccatgagaaacaacagagttaacctgtggcattaggagacctacttcatgtggaccctttttttccttcagtttaacttttctggagcagtgtgctgcgtagttcggcctgagtttgtgcagcttgttaagacaactcttgtgtacgctatgttgaagctcaacaaaaaagtcatgggaccacttctagaaatctttcagctgtcaggcctgtcagtctcatgacagtttgttggttgtgccaaacactttatttgggaaaggaaagcccagatttgaatgggtctttcccctgggccttatcctatagaggcatttgtaatatggagaaaataatttttcatttttgctcatttaattctataaattctctttataaatgaattttgtgttctttagttctccttaaaagaacttttgaattataaaaataaaatctttacctgtcgaattgttgctgcagatgattgttgtggaaaatctggatcattgacctctgtgctttcattcctagagatgttttatagttacatgagcaaaagctgttgccccaaagtgatggccctggaggcggggctgaggaacagggaaatgccgctgtgaagtcttaaagcacttctgcttaaactccatgtgtgaggagtgtgcctccctgtgccctctcagctctgaggctggccgtctttcggggtgttccttttggcaaatatacactgtaatcttgagtctaaatttatatgttgaaatgctaccttttttaaaataagaaactaaataaaattattttactatcaaaaaaaaaaaaaaa

SEQ ID NO: 287344 - DNA, 1000 bp, Homo Sapiens
tcagtaatctcttccttccccccagtaaggctggaagaggctcttggcaaacttcttagtgcaagcaatggttagattaatttgtgaggcagctctttaagacgttcagaggtaagaaatactggatttataaagcaaatggctgtttgggggattccaaggatttacctaattgtccaattctacgtgctctctataccaaaacaaaaaaaaaaagctatccacctttccatgtgggtcaaactaaaattagaaatgtcccctcactgcagatcaaatgtaaagcttccagttaaggagctaaatgaggtcctcagctgaatgaggaaccctgtacatccccttgcacagccctattctaaatcgcttaaactatgctgatagctgcttaggttcttgagtagttctgctcttaaacgtagggaggccctgagaactaaattttgccccaaaataaaaacagaaattatgagattgcctcctgtcattttggttaacccagtccttcacctgccctgtgtcagtgtcttctgagggcaattgcgttgctcaaatcactagcacagaggttccttaatttggggccttagaaaccattgtgggccttggggtccatgaaccccatgaaattatttgtagacttgtatgtacatttttctggggagaaggttcaagagattcataagattgtcaaactccttgaaggttcagaacctctgcagggaagggggaagaaaaccctcccattaggaagcatgcttttgcagttaaatggcgatggtggaggtgatagggacttcaagagtaaaatgcaccttgtattgcataagaagcatacacaaatcaataaatcaagggagattataccagtaggactgaatcagggccttcaaagctggactgagttggtcctgttctggcacatatggtccactggagacaatgtatgattgagtttttctttggtctaaaaattatattaaacatttattttgaaata

SEQ ID NO: 287345 - DNA, 1000 bp, Homo Sapiens; identical to SEQ ID NO: 221864

SEQ ID NO: 287346 - DNA, 1000 bp, Homo Sapiens
gcatctccattgctgaaaaccgcagtgccttcagctaccattgcaagaccccagattgcaagggatggtgcttctttgaggatgatgtcaatgagttcacctgccctgtgtgtttccacgtcaactgcctgctctgcaaggccatccatgagcagatgaactgcaaggagtatcaggaggacctggccctgcgggctcagaacgatgtggctgcccggcagacgacagagatgctgaaggtgatgctgcagcagggcgaggccatgcgctgcccccagtgccagatcgtggtacagaagaaggacggctgcgactggatccgctgcaccgtctgccacaccgagatctgctgggtcaccaagggcccacgctggggccctgggggcccaggagacaccagcgggggctgccgctgcagggtaaatgggattccttgccacccaagctgtcagaactgccactgagctaaagatggtggggccacatgctgacccagccccacatccacattctgttagaatgtagctcagggagcttcgtggacggccttgcttgctgtagcgttgtaggggccctgcctgcactgcggttgtccacggtcacatctgccccagtgcctttgtccttcccttggggcttgccggccagacttctctcccctgcggctcccacctctgcctgaccccagccttaaacatagcccctggccagaggccttgctgggtggagcctctgtgtgactccatactcctcccaccacaacactcatctgtcaaacaccaagcactctcagcctccccgccttcagctgtcagctttctggggctaacttctctgcctttgtggttggaggcctgaggcctcttggaactcttgctaacctgttcagagccaggaaggagactgcacagttttgaaagcacagcccgtcaggtccggctctgcgtctccctctctgcagcctgtgtaagctattataattaaaatggttttccgggaa

SEQ ID NO: 287347 - DNA, 1000 bp, Homo Sapiens
cctcctatagtcagctaagggcttccctttctgcgcccagcttttgggtgaagggtgatttctattagacacatctgtgcttcagtcatagatgttaatagaggaagcagttttcctgctgcagattcctgaatagagttgctgaaagagtctacttctggactcaggggaagttgaaggccagtctgtgtagaaaggctgaggcaacggggaaagacctgacagctagttacatacgctctgacatagtactcccatgatggcttccagtgacacatgtgctgatagaattctaaacctctggaatttccctgctggcgacttctatggccgttgactgtacagggtaacctgatgccagatgctatgggcgtgatgagaactagagcattgcagcatggaggaaactgtgaggcaccagatcctgtgcttctgcaggccattttctgaaaacccctgttaggaaggttggatttggcgtgacttgcttgagcaagagtcctggggagagattttgaggtttaatttaacggtatatccagagctaacagtgactcaactcgtctagttctgcaagtcagatgtacacttagagtctctctgtgaagggtttgggtctgagctgtatagtatgtcaaactgccagtaagccagcccctcaccctctgatagatattcctttaatgcaccagacttcatgtttgataaatgattaatggttgaaattgtttctcttcttttgtgttttcccagttaatagatggtcactgtttccacaatgttttatactttcagctttttgtaacttaactataattacttaattttatttttttaaagcttgttgtggtctaatgagaagtatttttcagtgcataatgtttttctgagcttctgtaaatgccatcccaatgtggtttggttttgttgaacagaaaccaaaataaatttcaaaatgttaaagcaatggaaaaaaaaaaaaaaaaaaaaaaaaaaaaaa

SEQ ID NO: 287348 - DNA, 1000 bp, Homo Sapiens; identical to SEQ ID NO: 221865

SEQ ID NO: 287349 - DNA, 1000 bp, Homo Sapiens
atggacgtagacttgctgctatgaaaacatattttttttatttatgaagactaaatttatattggtaaaatagccagtagaatatgaaagaaataaggttagtagtgaaattcattcttcaataaataaaacactttgaaactccggaggaccacatctttcaagacttctgatgggtcaaggaaaaagatgccaacatacccgtatttaccaagtactatgataatggctagagtataaaaatgttctttttaaagttatttattaagttcttcattggaagtttttttttatatctggttcactaccaccattttctgtttcctactttctcagtggtttcattgaaaagaaattagaaggggttaaaggcaggaatagcaaagagtgcaaacttggggtatgactgggggagagtggaacatgccttttccgcacaatattaattcctttttgtatcagaaatgttcttttaggagattatgctaccatacttacttcaaacccaatgactactgtcaaggacatattttcagtacataaatactatcattttcattctaaagaatattttcactgttccttctttcttaaagtcttatgtttcactctttaactcaaatgtattctttgttagaatttaccctagattcttatttaatgtctgcagtagactgaatgtttgtgtgcccccagaattctaatgttgaaatctcatttccaatgtgatggtatttggaggtggggcttttggtaagtgataggtcaggagagtaacagcgctcatgaatgggattagtgcccttatataaagagacccagagagctccatcaccccttctgccatgtgaaagggagaagacaaacatccacgaaccaggaagtgggtcctcaccagaaaacaaatctgtaagcaccttgatcttggacttcccagcctccagaattgtgagaaataaatttctgttgttgataaaaaaaaaaaaaaaaaaaaaaaaaa

SEQ ID NO: 287350 - DNA, 1000 bp, Homo Sapiens
cgaggtggacgggcggcagtcaagcgccggcgttctctgccatcaccctttccttgccggccggcacttcggctgcagagttttgcccacgcttcgagacttagggagcagtgcctttcagaatttcagaatttgcccactcatctggtataactggttctgatggctgggaataaaggaagaggacgtgctgcttatacctttaatattgaggctgttggatttagcaaaggtgaaaagttacctgatgtagtgttgaaaccacccccactatttcctgatacagattataaaccagtaccactgaaaacaggagaaggtgaagaatatatgctggctttgaaacaggagttgagagaaacaatgaaaagaatgccttattttattgaaacacctgaagaaagacaagatattgaaaggtatagtaaaagatacatgaaggtataccaggaagaatggataccagattggagaagacttccaagagagatgatgccaagaaataaatgtaaaaaagcaggcccaaaacccaaaaaggcaaaagacgcaggcaaaggcacaccactcactaatactgaagatgtgttgaaaaaaatggtggaattggaaaaaagaggtgatggtgaaaaatcagatgaggaaaatgaagagaaagaaggaagcaaagagaaaagtaaagaaggtgatgatgacgatgacgatgatgccgcagaacaggaggaatatgatgaagaagagcaagaagaggaaaatgactacattaattcatactttgaagatggagatgattttggcgcagacgtgatgacaacatggatgaggcaacctattaggcatgaaatttttcaaaaaatatttttatgatgcagcttctgaacatttggacagacttgatttgtattttatttctgataaggaataagatcttgtttctgttgttttggacaaaatgttgttaccaaaatatcaaaaccactttgagtttacatacagttacctt

SEQ ID NO: 287351 - DNA, 1000 bp, Homo Sapiens
accaacacttccgtgaccaagccattgtgagcgcagttgctaacaggatggaccagacaagcagcgagattgtgcgaaccatgctccgaatgagtgagattaccacttcctctagtgctcccttcacccagccattgtcttccaatgagatcttcagatccctacctgttggctataacatctctaagcaagttcttgatcagtatctcactctgctggcagatgatccactagagtttgttggaaagtctggcgacagtggtggaggaatgtatgtcatcaacctccataaggcattagcatccctagccacagccactctggagtccgtcgtacaggagagatttgggtctcgctgtgctagaatattccgtctagttttgcagaagaaacacatagagcagaagcaagtggaagactttgcaatgattcctgcaaaggaggcaaaggatatgctatataagatgctctcagaaaatttcatgtcactccaggaaattcccaaaacaccagaccatgccccatccaggaccttctatttatatactgtgaacatcctgtcagctgcccgaatgttgttgcacaggtgctacaagagcatagccaacttgatagaaaggaggcaatttgaaaccaaagagaataagcgtctactagaaaaatctcagagggtagaagccatcattgcatctatgcaggctactggtgcagaggaagcacagttacaagaaatagaggagatgatcacagctcctgaacgtcagcagctagagaccctgaaacgtaatgtcaacaagttggatgccagtgagatccaggtggacgaaaccatcttcctgctggagtcttacattgagtgcaccatgaagagacagtgatccagaagaagcatcttcctcagaagatctggggggatggaaagcaaaataaaggaggtgcctggatgcattatttgcagtgggaaaaaaaaaaaaaaaaaaaaaaaaaaaaaaaaaaaaaa

SEQ ID NO: 287352 - DNA, 1000 bp, Homo Sapiens; identical to SEQ ID NO: 221866

SEQ ID NO: 287353 - DNA, 1000 bp, Homo Sapiens; identical to SEQ ID NO: 116628

SEQ ID NO: 287354 - DNA, 1000 bp, Homo Sapiens; identical to SEQ ID NO: 116629

SEQ ID NO: 287355 - DNA, 1000 bp, Homo Sapiens
aaaatcattgatggagtgcctgtggaaataactgaaaaagagacacgagaagaacgaatcattacaggtcctgaaataaaatacactaggatttctactggaggtggagaaacagaagaaactctgaagaaattgttacaagaagaggtcaccaaggtcaccaaattcattgaaggtggtgatggtcatttatttgaagatgaagaaattaaaagactgcttcagggagacacacccgtgaggaagttgcaagccaacaaaaaagttcaaggttctagaagacgattaagggaaggtcgttctcagtgaaaatccaaaaaccagaaaaaaatgtttatacaaccctaagtcaataacctgaccttagaaaattgtgagagccaagttgacttcaggaactgaaacatcagcacaaagaagcaatcatcaaataattctgaacacaaatttaatatttttttttctgaatgagaaacatgagggaaattgtggagttagcctcctgtggtaaaggaattgaagaaaatataacaccttacaccctttttcatcttgacattaaaagttctggctaactttggaatccattagagaaaaatccttgtcaccagattcattacaattcaaatcgaagagttgtgaactgttatcccattgaaaagaccgagccttgtatgtatgttatggatacataaaatgcacgcaagccattatctctccatgggaagctaagttataaaaataggtgcttggtgtacaaaactttttatatcaaaaggctttgcacatttctatatgagtgggtttactggtaaattatgttattttttacaactaattttgtactctcagaatgtttgtcatatgcttcttgcaatgcatattttttaatctcaaacgtttcaataaaaccatttttcagatataaagagaattacttcaaattgagtaattcagaaaaactcaagatttaagttaaaaagtggtttggacttgggaa

SEQ ID NO: 287356 - DNA, 1000 bp, Homo Sapiens
tcgaagcctcgattggccacattttggtactacgccaaggttgagctggttcctcccacccctgctgagatccctagagctattcagagcctgaaaaaaatagtcaatagtgctcagactggtagcttcaaacagctcacagttaaggaagctgtgctgaatggtttggtggccactgaggtgttgatgtggttttatgtcggagagattataggcaagcggggcatcattggctatgatgtttgaagaccaatctttaacatctgattatatttgatttattatttgagtgttgttggaccatgtgtgatcagactgctatctgaataaaataagatttgtcaaaactcagtgttttctccatcagatactccatgaaaggtcacaatttctcttgatattaagctgggttgtctttaaacaaccctaaatacacgtctgtttagcccgcaattggaaaggatatatgtggcaatattaacctggtacatgaatatatggggataacattttaatttgaaggtttggaatatatatatttaagctttatttccagaacagtgagggttaggtcttgggaaaactataacttgccaaagtagaagaaatagtagtaccatatgccaaagtgatagagatgaatcatgtcagtagttagaataacatttcaactgttttctttgctaaaatcacagaaagaccctattgacaacatctatgtctgtaaaaatgttagagtacttgtcatcttgaatatagcctccccaagagagaacagggtggtattctaagtatgtttctttgtaacatctttagcagtaggacagagccatacatgtgaaatctgatttttatgtgtgttattcgtttgtctggttttactacctttgcaaaaacaaaataccccaaagatatttaaacaaggttataatttagcatcttccctggatctaaatagtatattatatcctgaaataaatgaaatgattgctataaaaaa

SEQ ID NO: 287357 - DNA, 1000 bp, Homo Sapiens
ggtagcctgcgggtggccgttctaggcgccccgggcgtgggcaagacggccatcatccgccagttcctgttcggtgactaccccgagcgccaccggcccacggacgggccgcgcctctaccgacccgcggtgctgctcgacggcgccgtctacgacttgagcatccgcgacggcgacgtcgctggccccggctcgagccccgggggtccggaggagtggccagacgctaaggactggagcttgcaggacacggacgccttcgtgctcgtctacgacatctgcagcccggacagtttcgactacgtgaaggccctgcggcagcgcatcgcggagaccaggccggcgggcgcgcccgaagcgcccatcctcgtggtaggcaacaagcgggacaggcagcggctgcgcttcggaccgcggcgcgcgctggccgccctagtgcgcaggggctggcgctgcggctacctcgagtgctccgccaagtacaactggcacgtgctgcgtctcttccgcgagctgctgcgctgcgctctggtgcgcgcgcgccctgcacacccggccctgcgcctgcagggggcgctgcatcccgcgcgctgcagcctcatgtgacccgatcggacagtgccatccatgggccccaccttgtgactgggacaatcagggacctggattggacgggatcgcccaacttcactgggactggacagggaagtctccgccctgattggatgaggaaagctccaacccagtctcctaagcgactggcccccttttgaacctcattggacccaaccaggtcccaagctccattggagatgaccagtcctttctgggacctcaatgggtcacaatcccattggatggaaaggacttggctatgaacttgactggaaacacgcagcctgctcctggagcttcactggacatattctttatgccacacctaccacgggataataaaagggaaaataatttgaaaaaaaaaaacaaaaaaaaaaaaaaa

SEQ ID NO: 287358 - DNA, 1000 bp, Homo Sapiens; identical to SEQ ID NO: 116630

SEQ ID NO: 287359 - DNA, 1000 bp, Homo Sapiens; identical to SEQ ID NO: 116631

SEQ ID NO: 287360 - DNA, 1000 bp, Homo Sapiens
aggatatcgggtcactgtcgagtccccagaaccagctgcagatggaggttttgtttgggggctttgtggatctttctgcggtgtaataagatcctatactgtttctggagcaacagttatgggacactgatattatcagtggctgcctttcttctgtcttttttttttttttttttttttgagagacaggtctacctctgtcacccgagctggagtgcagtggtgcagtcttggctcactacagcctcgaactcctggtctcttgcggtcctcctgtcttagcctccctttgtgcttgggattacagttgtgagattgtgcccgcccttctgctttaattttcactctgggctcctcaacatggtccttgtcccaagcccagggactggcttctctttctctgagtgtagttatgtatctgggttctaaccagtaaggttataactgtggctaattcacataacttctctgagtctgaatttcctgcctacaaaatggagaaataggaccttccacacagggtgcatgtgaggatgaaaggagtgaatgtataaagacacctttcccgataacccatactaccctcattatgactcttaacattagagagggctaaacaagggcagtgagaagactggcaggcagcagaaatcattttctttttgatctcacacaccagggcattccccgtaagaggcagtgagatgtagcctggccctggaactagaaacagaggtggctgctgtgctgtgcctagatgcacgatgctggggtcaaagacttgtgtccccgcctcaggctgccaggatggcggtgtgccgtgacagggctcccgagtcatcgactcaggcagacagcaggctggagcccagcattcaggggtggcttctgtctgtagagccgcatggcactcttcccacctcagtgcccacagccaaggtagggtcactaaccaagccagaaacgtaactgtgtgcagaataccgaaaaaaaaaaaaaa

SEQ ID NO: 287361 - DNA, 1000 bp, Homo Sapiens; identical to SEQ ID NO: 221868

SEQ ID NO: 287362 - DNA, 1000 bp, Homo Sapiens; identical to SEQ ID NO: 286536

SEQ ID NO: 287363 - DNA, 1000 bp, Homo Sapiens
agcagcccctgtagccaggagtgtgccaacgtctacggctcctaccagtgttactgccggcgaggctaccagctcagcgatgtggatggagtcacctgtgaagacatcgacgagtgcgccctgcccaccgggggccacatctgctcctaccgctgcatcaacatccctggaagcttccagtgcagctgcccctcgtctggctacaggctggcccccaatggccgcaactgccaagacattgatgagtgtgtgactggcatccacaactgctccatcaacgagacctgcttcaacatccagggcggcttccgctgcctggccttcgagtgccctgagaactaccgccgctccgcagccacatgatcgtagggaactctgcatgaggccatcggtgcaggctggagaagagaaggcaagttggcaggagtggagaccacgggcatttgagccacttcctcatgtaacttaacttgtgccttcaggacctgctcaagcccgatcacgtatataccacttccatttgatgatggaatgctgctgttcatgaccaactttatggctagatgggtcagaaagcacccagttcatgataggcagttcaggtcatatggtgacttgatgacccagagtcaaacattcagtttccaccaaagcccagtaacaggccaagagctgtctctcaaaaggagagtagttatctgcagaagatggcagggccttgctccgaaagcctagagaccgccactgtgattcacctatgggggcctgccaaaggctgcagccagcatccttatctgccactgacacctcaagcaacattggatctgctgggtcatatggcccaagtggcagagcaacttgcacaacagcctggacctgtcatagagctttctcctgttctggaccccactcaaaactggcagcctttcaggtcactcgataaatgtgctggagtaacactcaaacgaggaatgtgttgcctccaaaatccaataggccc

SEQ ID NO: 287364 - DNA, 1000 bp, Homo Sapiens
gtgtgagagcaggtgccggctcctcacacaccatggagactaccattgcggctgcatcgccttctcccctccatccagcctggcgtccaggttgccctgttcaggggacagatgcaagctgtggggaggactctgcctgtgtcctgtgttccccacagggagaggctctggggggatggctgggggatgcagagcctcagagcaaataaatcttcctcagagccagcttctcctctcaatgtctgaactgctctggctgggcattcctgaggctctgactcttcgatcctccctctttgtgtccattccccaaattaacctctccgcccaggcccagaggaggggctgcctgggctagagcagcgagaagtgccctgggcttgccaccagctctgccctggctggggaggacactcggtgccccacacccagtgaacctgccaaagaaaccgtgagagctcttcggggccctgcgttgtgcagactctattcccacagctcagaagctgggagtccacaccgctgagctgaactgacaggccagtggggggcaggggtgcgcctcctctgccctgcccaccagcctgtgatttgatggggtcttcattgtccagaaatacctcctcccgctgactgccccagagcctgaaagtctcacccttggagcccaccttggaattaagggcgtgcctcagccacaaatgtgacccaggatacagagtgttgctgtcctcagggaggtccgatctggaacacatattggaattggggccaactccaatatagggtgggtaaggccttataatgtaaagagcatataatgtaaagggctttagagtgagacagacctggattcaaatctgccatttaattagctgcatatcaccttagggtacagcacttaacgcaatctgcctcaatttcttcatctgtcaaatggaaccaattctgcttggctacagaattattgtgaggataaaaatcatatataaaaaaaaaa

SEQ ID NO: 287365 - DNA, 1000 bp, Homo Sapiens
gtgttaacacatatttctggctgagattttggaactagctagtaactggcttgtgttctttaagcatactaacatcactaaatcttaggatttaggattgctgtaaagatgtaagttgtgtatgtttggcaggtcacattgaatggcagtgataatgattaatcaaagaacaaatgtcatccttgatcttgcctaatgtagtttatgtgccaaactttccagggttttgtagtcacctagattttaagctgatagcatagtgcttcagcggttcttctaaccggggtatgcaggaacatggctgcagacacgtttgggtaaacaggcaccttctgacttcttcattgtttcctgtagttctccctcttcccacaaagctgtcagcgcagtggaagaggttgcacttctccgagagaggacaggtttctgttaagatcaccaagtagctgtgctttaattagagccagacaagctttcaaggtcctttaagtatttgatgatcaactgaacacgtttctattcaaggagaaaacaccattcagtaagaagatggagtagatatcagataaaacaattcacgtttaatatgtaaatgtaccaattatgtgattcagtttcaactttcaagtacttcctgagaggttagtacattattattgagctctcacagaaagcttaatcatagatataattaacctgatccaaatgagtaaagtggaccttagaaaggctaagtgatctttctctggctatccagctagtagtaatgaagtcaggtcttgaaccccggttctgctgactgaattggatgcactatagtacaggcttttagcaccgaagtgtggtcctcagaccagtgcctgccaaccagatgttactggtctgtgaggaaataagtacagatactgacaggaagcttttataaacaatttattggagtgtttttgtttctgttgggtctaattaaaaaaattggagcttgtaaaaaaaaaaaaaaaaa

SEQ ID NO: 287366 - DNA, 1000 bp, Homo Sapiens; identical to SEQ ID NO: 221869

SEQ ID NO: 287367 - DNA, 1000 bp, Homo Sapiens; identical to SEQ ID NO: 221870

SEQ ID NO: 287368 - DNA, 1000 bp, Homo Sapiens
ctccttccccagtgatcactgtcataaccagtgctctaccgtatcccatcactgaggactgatgttgactgacatcattttctttatcgtaataaacatgtggctctattagctgcaagctttaccaagtaattggcatgacatctgagcacagaaattaaggcaaaaaaccaaagcaaaacaaatacatggtgctgaaattaacttgatgccaagcccaaggcagctgatttctgtgtatttgaacttagggcaaatcagagtctacacagacgcctacagaaagtttcaggaagaggcaagatgcattcaatttgaaagatatttatgggcaacaaagtaaggtcaggattagacttcaggcattcataaggcaggcactatcagaaagtgtacgccaactaagggacccacaaagcaggcagaggtaatgcagaaatctgttttgttcccatgaaatcaccaatcaaggcctccgttcttctaaagattagtccatcatcattagcaactgagatcaaagcactcttccactttacgtgattaaaatcaaacctgtatcagcaagttaaatggttccatttctgtgatttttctattatttgaggggagttggcagaagttccatgtatatgggatctttacaggtcagatcttgttacaggaaatttcaaaggtttgggagtggggagggaaaaaagctcagtcagtgaggatcattttatcacattagactggggcagaactctgccaggatttaggaatattttcagaacagattttagatattatttctatccatatattgaaaagaataccattgtcaatcttatttttttaaaagtactcagtgtagaaatcgctagcccttaattcttttccagcttttcatattaatgtatgcagagtctcaccaagctcaaagacactggttgggggtggagggtgccacagggaaagctgtagaaggcaagaagactcgagaatcccccagagttat

SEQ ID NO: 287369 - DNA, 1000 bp, Homo Sapiens
tggtttcctgccccaaaggctggcttccaccatccaggtgcaccactgaagtgaggacacaccggagccaggcgcctgctcatgttgaagtgcgctgttcacacccgctccggagagcaccccagcagcatccagaagcagctgcagtgttgctgccaccaccctcctgtctgcctcttcaaagtctcctgtgacattttttctttggtcagaagccaggaactggtgtcattccttaaaagatacgtgccggggccaggtgtggtggctcacgcctgtaatcccagcactttgggaggccgaggcgggcggatcacaaagtcaggacgagaccatcctggctaacacggtgaaaccctgtctctactaaaaatacaaaaaaaaattagctaggcgtagtggttggcacctatagtcccagctactcggaaggctgaagcaggagaatggtatgaatccaggaggtggagcttgcagtgagccgagaccgtgccactgcactccagcctgggcaacacagcgagactccgtctcgaggaaaaaaaaagaaaagatacgtgcctgcggtgaggaagctgggcgctgttttcgagttcaggtgaattagcctcaatcccccgtgttcacttggctcccatagccctcttgatggatcacgtaaaactgaaaggcagcggggagcagacaaagatgaggtctacactgtccttcatggggattaaagctatggttatattagcaccaaacttctacaaaccaagctcagggccccaaccctagaagggcccaaatgagagaatggtacttagggatggaaaacgggcctggctagagcttcgggtgtgtgtgtctgtctgtgtgtatgcatacatatgtgtgtatatatggttttgtcaggtgtgtaaatttgcaaattgtttcctttatatatgtatgtatatatatatatgaaaatatatatatatatgaaaaataaagcttaattgtcccagaaatcata

SEQ ID NO: 287370 - DNA, 1000 bp, Homo Sapiens
ctgagaaagggaattatgaaatttttaatacaaaaaataatccatttaggtgctgagttacggtcccatctcttcacaggcatggattctaatcccactgctgacagagatgtaaaaattcatcctaccagagtttttaatctttagcatttagggaggcagtgtcataaagtaaaaagtgtgtgggccttggagtctaagagacgtggttgcaaacttagctctggttattgcaatgagggccttgaacaagtcattttcttcacattctcatctgtaaaatggagataataccttacagattattgcagattaataacaatgtattcaaattatgtaactcggccgggtacaatggctcacgcctgtaatcctaacactttgggaggccgaggcagacagatcacctgaggtcaggagtttgagaccagcctggccaacatggcaaaaccatctctactaaaaatagaaaaattagccaggcacgttccaggcacctgtgatcccagctacttggaggctgaggcagaagaattgctttaaccttggaggcggaggttgcattgagctgagatcatgctagtgcgctccagcctgggcaacagagcgagacttcatctcagaaaataaaaaataggggccaggcacagtggctcatacctgtaatgccagcactttgggaggccaaggcgggcagatcacgaggtcaggagtttcagaccaatatggtgaaaccccatctctactaaaattacaaaaaaaattatccaggcgtggtggtgcacgcctgtgatcccagctactcgggaggctaaggcaggagaatcacttgaacccaggaggcagaggttggggtgagctgagattgcgccaccgcactccagcctgggcaacagagcgagactccatctcaaacaaaaacaagaacaaaaacaaacataaagttggcacagaaaagggaccaagtttaaaaaagggttttaaatgtaatgagacttgc

SEQ ID NO: 287371 - DNA, 1000 bp, Homo Sapiens; identical to SEQ ID NO: 221871

SEQ ID NO: 287372 - DNA, 1000 bp, Homo Sapiens; identical to SEQ ID NO: 116632

SEQ ID NO: 287373 - DNA, 1000 bp, Homo Sapiens; identical to SEQ ID NO: 221872

SEQ ID NO: 287374 - DNA, 1000 bp, Homo Sapiens; identical to SEQ ID NO: 221873

SEQ ID NO: 287375 - DNA, 1000 bp, Homo Sapiens
cagctgggtatccttaccatgttccacgcccttgcagtgggagacaggatgtccatgttctctaccatccttttccttcccatgcagattgtgaaatgtaatgagatgtatcaagacatcctagaaataaaaaccagatgtccacctccagtgtttcatactttctggttttacacatcgctggagggataaagagtatggataatctttggatttggagagccgttcaagatacttccagcttcttggctcagcctggcttcctctggttcagccccacataatgattatggctatttgctgtcatttctgggctagggctcctttctaacaacctagactggaataaggccctgtcagcatggctccctttatcccagttttccgtctgggaacagtacctctgcccctgattcccaatgtgccatagttttattaactccattaaagaagcctgtatgtgttttggttagttacagttattttacaataatggtgggtaatggccccacctctgttatgagataatgttctaatcaatgtctctgcctttgtatcttttctgagggctttgtctgttctcttcattctaatgaaaggtgtattctagtgctgggtgcatatcatccaggataatattctgcccaactccatcctctgttactagatcccttaccagtcacatttgtggactggtggccagtcgtataccatccctggaaggattctgggacaatattccagggattcattgacttcttggctccttttctccatttcctttgggggaagggggaattgaccatgcttaagtgcatcctatcaaggggcagctccgtccccatggccattggatcatgagacactcgaagtcagaaggctggggcagatcacttcaagcaagcccccatgatggttctcagtcctgcttctctgtgggtacgtgcccctctgtttaaaaataaactgaatatggatgtttaaaaaaaaaaaaaaaaaa

SEQ ID NO: 287376 - DNA, 1000 bp, Homo Sapiens
cttgatggaagtagaaacatcaaaatgtaacccttcatctgaaattttgaatgattccatttccactcaggatttacagcccccagaaactaatgttgaaatacctggaacaaataaagaatatggccattactcctctccaagtctctgtggcagttgtcagccttctgtggagtcagcagaagaatcttgcccgtctataacggcagccttgaaagaacttcatgaacttttggttgttagcagtaaaccagcttcagaaaatacatctgaagaagtaatctgtcaatcagaaaccatagctgagggccaaaccagtattaaagacctttctgaaagatggacccaaaatgagcatcttacccagaatgaacagtgtccacaagtctcctttcatcaggccatatctgtatcagtggagacagaaaaattaacaggtacttcatctgacactggaagagaagctgtagaaaatgtaaacttcaggagtctaggtgatggcctgtcaaccgataaggaaggtgtccccaaatctagggaatccataaataagaaccgttctgtcactgtaacctcagctaaaacatccaatcagttacactgcaccttaggtgtagaaatttcacccaaacttttagcaggtgaggaggatgcactcaatcagacttctgagcaaactaagtctttgtcatccaatttcatattggttaaagacttaggtcagggcatacagaattcagtaacagacaggcctgaaaccagagaaaatgtctgtcctgatgcttcgaggccattacttgaatatgaaccacctaccagccatccatcatcaagtcctgccattcttccaccattgatttttcctgccacagatattgaccgcattctccgtgctggctttactttgcaggaagctcttggagctttgcatcgagttggtgggaatgcagaccttgcacttcttgttttgctcgcaaaaaacatcgtagttcctacatga

SEQ ID NO: 287377 - DNA, 614 bp, Homo Sapiens
tatagctccacggccagaagataccagcagctctgcctttactgaaatttcagctggagaaaggtccacagcacaatgaggcttttcacaggcattgttttctgctccttggtcatgggagtcaccagtgaaagctggcgttcgtttttcaaggaggctctccaaggggttggggacatgggcagagcctattgggacataatgatatccaatcaccaaaattcaaacagatatctctatgctcggggaaactatgatgctgcccaaagaggacctgggggtgtctgggctgctaaactcatcagccgttccagggtctatcttcagggattaatagactactatttatttggaaacagcagcactgtattggaggactcgaagtccaacgagaaagctgaggaatggggccggagtggcaaagaccccgaccgcttcagacctgacggcctgcctaagaaatactgagcttcctgctcctctgctctcagggaaactgggctgtgagccacacacttctccccccagacagggacacagggtcactgagctttgtgtccccaggaactggtatagggcacctagaggtgttcaataaatgtttgtcaaattga

SEQ ID NO: 287378 - DNA, 1000 bp, Homo Sapiens; identical to SEQ ID NO: 221874

SEQ ID NO: 287379 - DNA, 1000 bp, Homo Sapiens
gctcaaatctattcagacaagcaacaggttttataatttttttattactgattttgttatttttatatcagcctgagtctcctgtgcccacatcccaggcttcaccctgaatggttccatgcctgagggtggagactaagccctgtcgagacacttgccttcttcacccagctaatctgtagggctggacctatgtcctaaggacacactaatcgaactatgaactacaaagcttctatcccaggaggtggctatggccacccgttctgctggcctggatctccccactctaggggtcaggctccattaggatttgccccttcccatctcttcctacccaaccactcaaattaatctttctttacctgagaccagttgggagcactggagtgcagggaggagaggggaagggccagtctgggctgccgggttctagtctcctttgcactgagggccacactattaccatgagaagagggcctgtgggagcctgcaaactcactgctcaagaagacatggagactcctgccctgttgtgtatagatgcaagatatttatatatatttttggttgtcaatattaaatacagacactaagttatagtatatctggacaagccaacttgtaaatacaccacctcactcctgttacttacctaaacagatataaatggctggtttttagaaacatggttttgaaatgcttgtggattgagggtaggaggtttggatgggagtgagacagaagtaagtggggttgcaaccactgcaacggcttagacttcgactcaggatccagtcccttacacgtacctctcatcagtgtcctcttgctcaaaaatctgtttgatccctgttacccagagaatatatacattctttatcttgacattcaaggcatttctatcacatatttgatagttggtgttcaaaaaaacactagttttgtgccagccgtgatgctcaggcttgaaatcgcattattttgaatgtgaagggaa

SEQ ID NO: 287380 - DNA, 1000 bp, Homo Sapiens; identical to SEQ ID NO: 221875

SEQ ID NO: 287381 - DNA, 1000 bp, Homo Sapiens
atgcctattatgggcatatgtctctgctaagcaccatagttgtcaatgtgctgtgcaaatgctaagttccttttagcaattgttcagttggaagacgtattaatatttggggaaggaaaagaaagtagttgttttacaagggaggaaaaaagtgaatctggttacacatatggaagtaagcaaaatgaaaagcacttattgctttctgacagaattatagatgtaattttaagagttgctcctagcaagttaaaagtgcatataaaatatgcaactcttagttaaaggccttattatcagtcttacctatacaagtagtaaattttgtcattgctttagttacaaccatctgtaaataacttaaaagacttattatgtggggttcaaattgagtggaataaagtatagattaaaagtatacaatccttagcacgttatctcagggcttatgaaatgtaattaaatttattaagaaaatagatgaaaaattagggtacacagctggccaccaaatgcgaagtcaatctgctacttaaccctgaaaacaaaatcagttttgcatattaccactaacactaatacatatagagagcggaaccataactcattgaattttggagaggaataagcttagcgttaatattgacaatattaaggcaatattcttgtaggaatactatgtgcatgtttgatattttgccaaataacaataattaataattgttcaatgtttaagaataatattaacaaaataaaggagtttaatgcagtgatctttgtttttggcacatcaaaaattctcagtcattattcatgtttcttttatgctgctggcttttgtgccctggaagatcataatagtgaccaaaatatacatgcagacttgttttttattattgttgtttaagcataatttaagaaaaaaaatttttacctggtgaacttgctatctgctctgtttctagttaaaatataataaatattatcttcctgtgctgta

SEQ ID NO: 287382 - DNA, 1000 bp, Homo Sapiens; identical to SEQ ID NO: 116633

SEQ ID NO: 287383 - DNA, 1000 bp, Homo Sapiens; identical to SEQ ID NO: 116635

SEQ ID NO: 287384 - DNA, 1000 bp, Homo Sapiens; identical to SEQ ID NO: 116636

SEQ ID NO: 287385 - DNA, 1000 bp, Homo Sapiens; identical to SEQ ID NO: 221878

SEQ ID NO: 287386 - DNA, 1000 bp, Homo Sapiens
atatatatgaattaatggaaaatcccagtcaagctattgaatggctaatgcaggtggtcagtgttattccaaccgatcctcaagttttatctaagctaggagaattatatgatcgtgaaggagataaatctcaagcatttcaatattactatgagtcatataggtattttccttgtaatattgaagtcattgagtggcttggagcctattacattgacacccaattttgggaaaaagctattcagtactttgaaagagcttctcttatacagcctacacaagtgaaatggcagctgatggtagctagttgtttcagaagaagtggtaactaccaaaaagcattagatacttacaaagatactcacagaaaatttccagaaaatgtcgaatgtctgcgtttcttagttcgtctctgcacagatcttggattaaaagatgctcaagaatatgccagaaaactgaagaggttggaaaaaatgaaagaaataagggaacagcgcataaagtcaggcagagatggcagtgggggctcccgtggcaaaagagaaggaagtgctagcggtgatagtggccagaactatagtgccagtagtaaaggtgaacgactaagtgccagactcagagctttacctgggacaaatgaaccttatgaaagtagcagtaacaaagaaatagatgcctcctatgtggacccacttggccctcaaatagaacgaccaaaaactgcagccaagaaaaggatcgatgaggatgattttgctgatgaagaattaggagatgatttgcttccagaataatattcactttaatatttattaaaggaaagaaattgccttatgagatcatcctcatgttaaaccttggattaaatatctaacctgtaattattttttttcactgtcaaaacttaagtaagtgtattctattctgtatgtatgcatttaagttgtttttttcttttaaggaataaaaacaggtaaaactaaaaaaaaaaaaaaaa

SEQ ID NO: 287387 - DNA, 1000 bp, Homo Sapiens; identical to SEQ ID NO: 221879

SEQ ID NO: 287388 - DNA, 1000 bp, Homo Sapiens
tattataagtttttatattttctacttgttcatttggtgcaaactcaagatttcttttaataggtgcagtctttgagataatttgtttttacctgtattgccctttatcttttttaggtaattctttgtactcctgctgtctacctctcctcacaccccagcaccccccattttttcaaaccttggtatctgttgggtgaacagtataatcttttcatctgcttttagaatgtgggatatttccagtacctactttttttttttttttttgctgaatccaaagatatataaataaaatatatatattttataaagatcagaatgatataaaggagatacatgtttcttcctttaaaaaataaacggaagttacattgttaatgttcatattatgatgccacttttctaaactgcatctggattgaaaggtgtaaatatcaataacagtgctacttagttatcagtatttaatatctgaggtgagttgggggtatctatattaggggtagggtattacagaagataattggcttgatgtcctagaagttctttgatccagaggtgggtgcagctgaaagtaaacagaatggattgccagttacatgtatgcctgcccagttccctttttatttgcagaagctgtgagttttgttcacaattaggttcctaggagcaaaacctcaaggattgatttattgttttcaactccaaggcacactgttaataaacgagcagggtgttttctctcttcctttctaatatatggagtttcgaagaataaaatatgagagcaatatttaaattctcaggaattgacttatactcttgagaatgaattcagtttcaatcaagtttacattatgttgcttaaaaaaatagaaattattctttatcttgcaaagaattgaaaccacatgaaatgacttatgggggatggtgagctgtgactgctttgctgaccattttggatgtcattgtaaataaaggtttctatttaaaa

SEQ ID NO: 287389 - DNA, 1000 bp, Homo Sapiens; identical to SEQ ID NO: 116638

SEQ ID NO: 287390 - DNA, 1000 bp, Homo Sapiens
tggagctcatcttgttccctgatgtgtctcgagcccattggtagggtcatacaaagcccacggttacaagcagtggtaggattgcagccgtgggcctgctggacacacacatacaccaaagatgtatttggatctgggcaccccctcccaggatccctgtactcacgtgccagtctcctgactagagcactttactctgtttcctcagccctgcagcccctgggagcacacactgggtgcagccctgggccaggcacgggaggccctgccctgtgctgcccaggggctgtgtgcaccacatgagcacatttccctctggcctggcggcctccaggctggctgtggaaacagttcctgaggaaattagagattctatgaattgtaggagtattaaagaccaggctgttggcaccagaacttaaagcgatgactggatgtctctgtactgtatgtatctggttatcaagatgcctctgtgcagaaagtatgcctcccgtgggtatacgtttttaccttttttaaaaaacatttttgtagaaaaaataattaaatcccctttttggaaacttactgcaggttttgtgccttgacaacctctccctatgtgaggtttgtaaaaagtgtcctgtgacttaacacagaaacgcaataaacacacacaaaatagtttcatgagtgattcttcagatgcccttcccaactggttagttgatcaagaattttgggggtgggggttgcggagaaatcaagtttaaaattccttctgattaaaaaaatatagtggaatacaattgtctgccgtttccccttcttaatgtatatattgtgagtatttattagattcgtaggtcatattacttatcaactgagccaaatgtctgtgtgcaattgtgtttcctttaccttgtaaaattttgtacagcataaataagtaaaaaaatcactgtttttctcaactttttcaaaaaaaaaaaaaaaaaaaaaaaaaaaaaaaaaaaaa

SEQ ID NO: 287391 - DNA, 1000 bp, Homo Sapiens; identical to SEQ ID NO: 116639

SEQ ID NO: 287392 - DNA, 968 bp, Homo Sapiens; identical to SEQ ID NO: 29734

SEQ ID NO: 287393 - DNA, 1000 bp, Homo Sapiens; identical to SEQ ID NO: 221882

SEQ ID NO: 287394 - DNA, 1000 bp, Homo Sapiens
tgcccaggccaagacctgcgccctcgagcccattgttaaaaagctggctggctatctgaccacactagagctagagagcagcttcgtgtccatggaggagagcaagcagaagttggtgcccatcatgaccatcttgctggaggagctaaatgcctcaggccggtgcactctgcccattgatgagtccaacaccatccacttgaaggtgattgagcagcggccagaccctccggtggcccaggagtatgatgtacctgtctttaccaaagacaaggaggatttcttcaactcacagtgggacctcactacacaacaaatcctgccctacattgatgggttccgccacatccagaagatttcagcagaggcagatgtggagctcaacctggtgcgcattgctatccagaacctgctgtactacggcgttgtgacactggtgtccatcctccagtactccaatgtatactgcccaacgcccaaggtccaggacctggtagatgacaagtccctgcaagaggcatgtctatcctacgtgaccaagcaagggcacaagagggccagtctccgggatgtgttccagctatactgcagcctgagccctggcactaccgtgcgagacctcattggccgccacccccagcagctgcagcatgttgatgaacggaagctgatccagttcgggcttatgaagaacctcatcaggcgactacagaagtatcctgtgcgggtgactcgggaagagcagagccaccctgcccggctttatacaggctgccacagctatgacgagatctgctgcaagacaggcatgagctaccatgagctggatgagcggcttgaaaatgaccccaacatcatcatctgctggaagtgaggctggtagtgactggatggacacattgctgtgggtagtccctcctactaggaggcttgtcatactgtctagaggttgactcttagttctgtaaataaagacatccatttcaaacagcaaaaaaaa

SEQ ID NO: 287395 - DNA, 1000 bp, Homo Sapiens; identical to SEQ ID NO: 221883

SEQ ID NO: 287396 - DNA, 1000 bp, Homo Sapiens; identical to SEQ ID NO: 116640

SEQ ID NO: 287397 - DNA, 1000 bp, Homo Sapiens; identical to SEQ ID NO: 221884

SEQ ID NO: 287398 - DNA, 1000 bp, Homo Sapiens
ctgctgttcagcggcaagaggaaatccgggaaggacttcgtgaccgaggcgctgcagagcagacttggagctgatgtctgtgctgtcctccggctctctggtccactcaaggaacagtatgctcaggagcatggcttgaacttccagagactcctggacaccagcacctacaaggaggcctttcggaaggacatgatccgctggggagaggagaaacgccaggctgacccaggcttcttttgcaggaagattgtggagggcatctcccagcccatctggctggtgagtgacacacggagagtgtctgacatccagtggtttcgggaggcctatggggccgtgacgcagacggtccgcgttgtagcgttggagcagagccgacagcagcggggctgggtgttcacgccaggggtggacgatgctgagtcagaatgtggcctggacaacttcggggactttgactgggtcatcgagaaccatggagttgaacagcgcctggaggagcagttggagaacctgatagaatttatccgctccagactttagtcactaggttctaggagtgagctggggcctgctgaggtgggggtggggctgactctgcaaaatgggggtgtcccccgatcctggccgaggtgaggaacagacagggggggtctagattctgagggggttggtggatattgggcaaggcaggaaacctctggagacctcattttctccatggggaagacagccatgctcttcaggaggagactccaagggcaaaggagggtgtcttggctgtgcttgaaggcgaaaccctgccatatccccagtgccagtcccctcagcctgtggtggccttgcatcctgactggatgttctcagccccttgttctgggcaagaacccagagctccccagtgtggatactaataaacctcttggagcacactctcaaaacaaaaaaaaaaaaaaaaaaaaaaaaaaaaaaaaaaaaaaaaaaaaaaaacctcggg

SEQ ID NO: 287399 - DNA, 1000 bp, Homo Sapiens
tttttctttgttgtttaaatataaacagaagtgtaccttttataataaaaaaaagaagttgagtaaaaaaaaaaaacacacaaacctgttagtttcaaaaatgacattgcttgcttaaaggttctgaagtaaaggcttgttaagtttctcttagttttgatttgaggcatcccgtaaagttgtagttgcagaatcccaaactaggctacatttcaaaattcagggctgtttaagatttaaaatcacaaacattaacggcagtaggcaccaccatgtaaaagtgagctcagacgtctctaaaaaatgtttcctttataaaagcacatggcggttgaatcttaaggttaaattttaatatgaaagatcctcatgaattaaatagttgatgcaatttttaacgttaattgatataaaaaaaaaaacaacaaaattaggcttgtaaaactgactttttcattacgtgggttttgaaatctagccccagacatactgtgttgagagatacttagagggagggagtaggttttgaagaggttgatggtggtggggagggaaggcctcctgaattgagtttgatgcagagctttttagccatgaagaatctttcagtcatagtactaataattaaattttcagtatttaaaaagacaaagtattttgtccatttgagattctgcactccatgaaaagttcacttggacgctggggccaaaagctgttgattttcttaagttgacggttgtcaatatatcgaactgttcccaagttagtcaagtatgtctcaacactagcatgatataaaaagggacactgcagctgaatgaaaaaggaatcaaaatccactttgtacataagttaaagtcctaattggatttgtaccgtcctcccattttgttctcggaagattaaatgctacatgtgtaagtctgcctaaataggtagcttaaacttatgtcaaaatgtctgcagcagtttgtcaataaagtttagtcctttttta

SEQ ID NO: 287400 - DNA, 1000 bp, Homo Sapiens
ttaaatggtggcctgggcagcagtggcctttccaatggcaccgggagcaccatggaggccctcactcaggcctactcgggtatccagcaatatgctgctgctgcgctccccactctgtacaaccagaatcttctgacacagcagagtattggtgctgctggaagccagaaggaaggtccagagggagccaacctgttcatctaccacctgccccaggagtttggtgatcaggacctgctgcagatgtttatgccctttgggaatgtcgtgtctgccaaggttttcatagacaagcagacaaacctgagcaagtgttttggttttgtaagttacgacaatcctgtttcggcccaagctgccatccagtccatgaacggctttcagattggcatgaagcggcttaaagtgcagctcaaacgttcgaagaatgacagcaagccctactgagcgtgctcccctctgagactggagtgagagggtcttctgattcctgccgtttgttcatcgttgtgcctaaagcatgtcgatgtggcgtcaagtacatcgtccaaatccctgtctcttcagcttctctgatgcttgaactctcacctttgaccttgtgttgacctttgatgctgatgtgtatttttattatgtttgtttctttcttcgtttttttttctttttttctttcctttttttttccttttgtgctgccaaattggttttgctagaacgactgctgaaggggaaatatttaaacttgcatttgaatataaaaaaaatctatttttctagaacttcataagataaccacttgattttgtgattccaattctttgtaattgtcttcagagcagccctactagcacataccgcgtggtgtttgtatttctgtgaacacacagccagtccgtttctaggctttgtttctctgtgtgcttagttttaaagacaactttgaagtaaacaatgaaataaaagatgtcactaaaacctctgaaaaaaaaaaaaaaaa

SEQ ID NO: 287401 - DNA, 1000 bp, Homo Sapiens; identical to SEQ ID NO: 116642

SEQ ID NO: 287402 - DNA, 1000 bp, Homo Sapiens
gggctttcagtgcctgcggcgtcgggcgccccctacgggctactgtccgggtaccccgcgatgtacccggcgcctcagtaccaagggcacttccagctcttccgcgggctccagggacccgcgcccggtcccgccacgtccccctccttcctgagttgtttgggacccgggacggtgggcactggactcggggggactgcagaggatccaggtgtgatagccgagaccgcgccatccaagcgaggccgacgttcgtgggcgcgcaagaggcaggcagcgcacacgtgcgcgcacccgggttgcggcaagagctacaccaagagctcccacctgaaggcgcatctgcgcacgcacacaggggagaagccatacgcctgcacgtgggaaggctgcggctggagattcgcgcgctcggacgagctgacccgccactaccggaaacacacggggcagcgccccttccgctgccagctctgcccacgtgctttttcgcgctctgaccacctggccttgcacatgaagcgccacctttgagccctgccctggcacttggactctcctagtgactggggatgggacaagaagcctgtttggtggtctcttcacacggacgcgcgtgacacaatgctgggtggttttcccacgaatggaccctctcctggactcgcgttcccaaagatccacccaaatatcaaacacggacccatagacagccctgggggagcctcttacggaaaatccgacaagccttcagccacagggagccacacagagatgtccaaactgtcgtgcaaacccagtgagacagaccgccaaataaacggactcagtggacactcagaccagctcccagatggccctggacagcaggagagggtgtgggatgaggcttcccagagaccctgggtctagaaagcggctcctgaaggtcccttattgtggctgatattaactgtcaatggttatgggtcctataaaaatgcccctcccagataaaaaa

SEQ ID NO: 287403 - DNA, 1000 bp, Homo Sapiens; identical to SEQ ID NO: 221887

SEQ ID NO: 287404 - DNA, 1000 bp, Homo Sapiens; identical to SEQ ID NO: 116644

SEQ ID NO: 287405 - DNA, 1000 bp, Homo Sapiens
gagcctgggggccaggcagaggctgatggagatgttccagggcccagaggggaagctgagggccaggcagaggctaaaggagatgcccctgggcccagaggggaagctgggggccaggcagaggctgaaggagatgcccccgggcccagaggggaagctgggggccaggcagaggccagggagaatggagaggaggccaaggaacttccaggggaaacactggagtctaagaacacccaaaatgactttgaggtgcacattgttcaagtggagaatgatgagatctagatcttgaagatacaggtaccccacgaagtctcagtgccagaacataagccctgaagtgggcaggggaaatgtacgctgggacaaggaccatctctgtgccccctgtctggtcccagtaggtatcaggtctttctgtgcagctcagggagaccctaagttaaggggcagattaccaataaagaactgaatgaattcatccccccgggccacctctctacccgtccagcctgcccagaccctctcagaggaacggggttggggaccgaaaggacagggatgccgcctgcccagtgtttctgggcctcacggtgctccggcagcagagcgcatggtgctagccatggccggctgcagaggacccagtgaggaaagctcagtctatccctgggccccaaaccctcaccggttccccctcacctggtgttcagacaccccatgctctcctgcagctcagggcaggtgaccccatccccagtaatattaatcatcactagaactttttgagagccttgtacacatcaggcatcatgctgggcattttatatatgattttatcctcacaataattctgtagccaagcagaattggttccatttgacagatgaagaaattgaggcagattgcgttaagtgctgtaccctaaggtgatatgcagctaattaaatggcagatttgaaaaaaaaaaaaaaaaaaaaaaaaaaaaaaaaaaaaa

SEQ ID NO: 287406 - DNA, 1000 bp, Homo Sapiens
cctggtgcacaaaatggatctggttcaggaggatcagcgtgacctgatttttaaagagcgagaggaagacctgaggcgtctgtctcgcccgctggagtgtgcttgttttcgaacgtccatctgggatgagacgctctacaaagcctggtccagcatcgtctaccagctgattcccaacgttcagcagctggagatgaacctcaggaattttgcccaaatcattgaggccgatgaagttctgctgttcgaaagagctacattcttggttatttcccactaccagtgcaaagagcagcgcgacgtccaccggtttgagaagatcagcaacatcatcaaacagttcaagctgagctgcagtaaattggccgcttccttccagagcatggaagttaggaattccaacttcgctgctttcatcgacatcttcacctcaaatacgtacgtgatggtggtcatgtcagatccgtcgatcccttctgcggccactctgatcaacattcgcaatgcccggaaacactttgagaagctggagagagtggatggccccaagcacagtctccttatgcgttgaatattgccaaatgctctttctgaaaatgctgaattgccttttttgtttgcatcctttatttttaatattcataatgtcgtgtgcttaaaagtgggctttgaagtgtgtgctgcttactcctttcatctttctccccgcttccccagtctttaaacattggacgctatttactcagctacccagtagagcttgaagctgacctttctgagaagttggtatggtgtaacactaaagtaggtggttcgtgtgtgttctcattacctggttatgatagatatgcacatcaaagcctttaccagtatcttcctgtattccgtatcagattgcaaagacggaatgttactattttatcagcaaggtattaaaatgcatttataaattcttcttggcttcattcatgaataaacgtgttagcaatttaaaaaaaaa

SEQ ID NO: 287407 - DNA, 1000 bp, Homo Sapiens; identical to SEQ ID NO: 116645

SEQ ID NO: 287408 - DNA, 1000 bp, Homo Sapiens
ccctcttctataatattcctacttcccataataatgactgatttatttgttattcaggtatttataaacctattggctacaaagactttgttaaactttatccagtggttttcgtgaaatggaattatgtttatttttatgggatttgggtaaattttaaattgtctagaaaactgaaatttcagttgtcagttgtggaattcagtttttcaattgtggaaatttcctgccaccccaacagtatttttgtgtgttaattaattttgcaaaatgagaatcatggtgtgacactcatctaatttatcttgttgtgatgttatggtcataataaggagaaagagggtttaatttttcttgtatttggtttcctggtggtatcatagtgtaattttagtatttgaaaatcagtgtgattccttaatggccaactgaagattgaattgccgctaacaaccatatcgtgttagtgaattttcaatatggaccaggaaggcatatgtattttgaacttgagtgaaaaggttgaagttacagacttttgcatagatggtttgtcagtttaaaattccagaatttgttattgccatattttcacatgctgcttatacaagattattattgagtagtaactgcttccctgtctatgtagaagtgcctgtgtttttatttattgttcagatcaaagaccaaaacattttcttaaatatattttatgtaatattttatttgtatacagtgttgttgatgaaatatttaactagagcatgatattttaaatgttaaggtgtaacatatgttaaataaaactgttatttttgaattttaaaatttgttttttgggggtatgaactactagagtttaaaattctgccaaactattacttatatgtactattgtgtaacatactttcttgagatatttttgtttatagaattgaaggttcttatcagatgggatactggggactataaacaatggaaataaagccactgtattttt

SEQ ID NO: 287409 - DNA, 1000 bp, Homo Sapiens; identical to SEQ ID NO: 221890

SEQ ID NO: 287410 - DNA, 1000 bp, Homo Sapiens
ctctggtttcttttataagactgcagaagagaaagagaaattggtaaaagctgaaagaaaatttattgaagatagagtacaaaaaataatagacctgaaggacaaagtctgtgctcagtcaaataaaggatttgtcgtcattaatcaaaagggaattgatccattttccttagattctcttgcaaaacatggaatagtagctcttcgcagagcaaaaagaagaaatatggaaagactctctcttgcttgtggtggaatggccgtgaattcttttgaagatctcactgtagattgcttgggacatgctggtcttgtgtatgagtatacattaggtgaagaaaagttcacttttattgaggagtgtgttaacccttgctctgttaccttgttggttaaaggaccaaataagcatactctcacacaagtcaaggatgccataagagatggacttcgtgctatcaaaaatgccattgaagatggttgtatggttcctggagctggtgcaattgaagtggcaatggctgaagctcttgttacatataagaacagtataaaaggaagagctcgtcttggagtccaagcttttgctgatgccttactcattattcccaaggttcttgctcagaatgctggttatgacccacaggaaacattagtaaaagttcaggctgagcatgtcgagtcaaaacaacttgtgggcgtagatttgaatacaggtgagccaatggtagcagcagatgcaggagtttgggataattattgtgtaaaaaaacaacttcttcactcttgcacagtgattgccaccaacattctcctggttgatgaaattatgcgagctgggatgtcttctctcaaatgatgattgaattcaaaatcaacccttctagaagatgaaatttagtacactttacatctgactactattgtgtagcctgagccattctgaatttctacacaataaatgcagtttatgtcttttgggtcttaaaaaaaaaaaaaa

SEQ ID NO: 287411 - DNA, 1000 bp, Homo Sapiens; identical to SEQ ID NO: 116648

SEQ ID NO: 287412 - DNA, 1000 bp, Homo Sapiens
tccgcctagcccgctgcccttcccccaagttgctacgtgcccggtcagccgagaaacggcgccctgtgcccaccttccaaaaagttcccctgccctcgggccctgcacctgcccactccctgggggacctaaagggcagctggccaggtcggggcctggtcactcgtttcctccagatatccaggaaagccccagaccccagtgggactggagctcatggacataagcaggtgccccggagcctgtggggccggcctggccgagagagcctccaccttcgcagctgcggagatctgagctctagctcttccctgcggcgtctcctgtctggccgcaggctggagcgtggtacccgcccccacagcctcagcctcaacgggggcagccgggagactgggctctgacctaggcttcttgtcacactgaacacatccagccacaggcaccagctggttgggaccagcagcccccagcatcctcttgcactggctggcacaaaaagaaacctgctgtataccccccaaagtgtccctttccctcctacctctggggtctcttgctgcttgcctctgctgctctggactgggagagcttctgtcctgtgctgcatgggtatttagactgtgggggagatgccccttcttatagcactggaggaggaaaacaaattcttgtccccctcagaatgagagtggctctttctgatttgcaagggcactatggtcagggcaaaggcatggcccaggtgtttaagtacagggtgacgtgtgcctatgcaatggggtggtaaggcaggcacgaagagtccaaaaaatctaggtggcctctcagctctgccacctctagctgcatgaccttgggcaagctatgtaaccccaattgcctgctccattaaagactgtgaaggtagaatgtttgtaaagctcttaacagtatgtaagccttcaataaatttcagttttccccttgttttcttgatcaaaaaaaaaaaaaaaaaaaa

SEQ ID NO: 287413 - DNA, 1000 bp, Homo Sapiens; identical to SEQ ID NO: 116649

SEQ ID NO: 287414 - DNA, 1000 bp, Homo Sapiens; identical to SEQ ID NO: 116650

SEQ ID NO: 287415 - DNA, 1000 bp, Homo Sapiens; identical to SEQ ID NO: 116652

SEQ ID NO: 287416 - DNA, 1000 bp, Homo Sapiens
ctacccagaaaaagtgacttgataacatggtaccaataagtaagggatgctctctcggtttgcttttgccactttcaagattttaacttctcaggttattaatcaaaattattgtataagttagccaatagaatttttaggttaaaacaacagatggggggtttgtggagtgtttaatgtcatgggcatttttagtagcatagaccctttgttctgcatttgaatgtttcgtatatttttgtttcacagttaatcttccctccccaagtttgctattcaaatcaactgcctgaatgacatttctagtagtctgatgtatttttctgaggaatagtttgtgattccaatgcaggtgtcttcattaccattacctctacactgcagaagaagcaaaactcctttattagaattactgcacatgtgtatggggaaaatagttctgaaaggctagaatgatacaagtgagcaaaagttggtcagcttggctatggagtggtggcaataatctctaaacattccaaaagaccatgagctgaacctaaactcccttggaatctgaacaaaggaatataaaattgccatttgaaaactgaccagctaatctggacctcagagatagatcagccagtggcccaaagccatttcaagtacagaaattatagagactacagctaaataaatttgaacattaaatataattttaccactttttgtctttataagcatatttgtaaactcagaactgagcagaagtgactttactttctcaagtttgatactgagttgactgttcccttatccctcacccttccccttccctttcctaaggcaatagtgcacaacttaggttatttttgcttccgaatttgaatgaaaaacttaatgccatggatttttttcttttgcaagacacctgtttatcatcttgtttaaatgtaaatgtccccttatgcttttgaaataaatttccttttgtaattttaaaaaaaaaaaaaaaaaa

SEQ ID NO: 287417 - DNA, 1000 bp, Homo Sapiens; identical to SEQ ID NO: 116655

SEQ ID NO: 287418 - DNA, 1000 bp, Homo Sapiens; identical to SEQ ID NO: 221892

SEQ ID NO: 287419 - DNA, 1000 bp, Homo Sapiens; identical to SEQ ID NO: 221893

SEQ ID NO: 287420 - DNA, 1000 bp, Homo Sapiens; identical to SEQ ID NO: 221894

SEQ ID NO: 287421 - DNA, 1000 bp, Homo Sapiens
agctgctcatgccgtctatgagcaaaaacatgatgcatccgccctggacattcgaatgggcaccctgaaaagactatcacctcattatacacaagcctggtctgaagctgtttttatacatgaaggttatactcatgatgctggctttgacaatgacatagcactgattaaattgaataacaaagttgtaatcaatagcaacatcacgcctatttgtctgccaagaaaagaagctgaatcctttatgaggacagatgacattggaactgcatctggatggggattaacccaaaggggttttcttgctagaaatctaatgtatgtcgacataccgattgttgaccatcaaaaatgtactgctgcatatgaaaagccaccctatccaaggggaagtgtaactgctaacatgctttgtgctggcttagaaagtgggggcaaggacagctgcagaggtgacagcggaggggcactggtgtttctagatagtgaaacagagaggtggtttgtgggaggaatagtgtcctggggttccatgaattgtggggaagcaggtcagtatggagtctacacaaaagttattaactatattccctggatcgagaacataattagtgatttttaacttgcgtgtctgcagtcaaggattcttcatttttagaaatgcctgtgaagaccttggcagcgacgtggctcgagaagcattcatcattactgtggacatggcagttgttgctccacccaaaaaaacagactccaggtgaggctgctgtcatttctccacttgccagtttaattccagccttacccattgactcaaggggacataaaccacgagagtgacagtcatctttgcccacccagtgtaatgtcactgctcaaattacatttcattaccttaaaaagccagtctcttttcatactggctgttggcatttctgtaaactgcctgtccatgctctttgtttttaaacttgttcttattgaaaaaaaaaaaaaaaaa

SEQ ID NO: 287422 - DNA, 1000 bp, Homo Sapiens
actcttgggatcctctgtttacttcttctgatgatagtcacagtgttggtgacaaatatctttcagtgtattcaagaaaaacatcaacggcaggaaattctaagaaactgtagtgaaaagtacatcatgcaaaatgacaactacttaaaagagcagattttgacaaataagactttaaaatatgacgttctcaaaaatagctttcagcagaaaaaggaactggattcacgccttatacaaaagaacagatgtcatagagaaaatgagatcgtttttaaagttttgcaaaatacaggcaaattctctgaagaccacgggtcctgttgtggagtaaactgttattattttaccatgcagaagaaagactggaagggatgtaaacagacttgtcaacattgtagatcatcccttttgaagatagatgacaaagatgaactcgtattttacattcacttttattctcttggactctgtttctcaatgttggacctaagatattgaagacaggctggagtccagagccttcattcaatctcagatttatgaaaataattactggatcggattatcatatgatgaaagggaaagtaagtggaaatggattgataatggcacatctcctggaattaattctacaataatgcgtttttcttctgggagaggagaatgtgcatttttgacctcaacaagaatggcaactattgattgcattcaaacgtacaattgtatctgtgggaagagaatagactctattttctctgattcggtgtgcgccaagaagaaaaggtgaaaatggaatgttttctttttttgtttcccataataatttctgattataaatcattgcttttaactgtgggacttagttaattcttcaaaagataaagatgaacaggaagaaaaagaaaattattttggactatgactttaaagatcagatgccatctttcttcctggagaagaggagattttctcttttgagagtggttgttccttcctt

SEQ ID NO: 287423 - DNA, 1000 bp, Homo Sapiens
cggggggctgcgcaggcccccagcccgctttgtgccccctcacgactgcaagctacgcttccccttcaagagcaacccccagcaccgggagtcttggccagggatggggagcggggaggctccaactccgctccaaccccctgaggaggtcactccccatccagccacccctgcccgccggcctccgagtccccgaaggtcccaccatccccgcaggaactccctggatggagggggccgatcccggggagcgggttctgcacagcctgaaccccagcacttccagcccaaaaagcacaactcttatccccagccaccccaaccctacccagcccagcggcccccagggccccgctaccccccatacactactcccccacgaatgagacggcagcgttctgcccctgacctcaaggagagtggggcagctgtgtgagtcccacatcctgggcagagggcctggtggggccccttgctaggagaagggaagacgcccgagacgctgcttccccagaagtgctggggcagggaggcccaggagatgagagagaaggtccgagtaggtgatagaagacaagggggagaccgagccggaggctgaggaaaggaagagggcacggagttgccaggagcaaaccaaagtgaagagagagataggaagctgcctcggggccaccccttgcaaagggggtgtgtcccacaaacgctgctatgggtggggtggggggctggggtgctgcgtagccagtgtttgactttcttttcaagtgggggaaagtgggagaggactgagagtgaggcaagttctccccagcccctgtccgtctgtctgtctgtctgtggtggtttctgtttcttgggaggcatggtaggatcataagtcattcccctccccttccaggcctcctgctatatttgggggacctgactggtttggctggagtcccatgaggatgtgggccctttaataaaggatagcaaacaggaaaaaaaaaaaaaa

SEQ ID NO: 287424 - DNA, 1000 bp, Homo Sapiens; identical to SEQ ID NO: 116656

SEQ ID NO: 287425 - DNA, 1000 bp, Homo Sapiens
gatgtacagaacacaaatgtctagtttctagtgtcactgatgaactagtgatgtagaaaagagacttctctgtaagtaattgccacagctgtattttggctttctccctgtcccttcctttctcccctattttttggtagcttgtatcaaatgttacagtttatattgtggaataaatccttcgtcctaacataacactaaatgctgattatttagagccattagagcacagcttcttctgcccctctactgttgcacagccagaaggggctgcttgcttttgcctctgcccaaccaggttgcagtagcagtggatgttagcctgcaaacaacattaggggattcttcttttgtgtcctgctctgtttggtgggccatatgcctacagccctcactaacaaagaacccctctgtcttcaaggactagaacctatctttaaagccgtgctcttttaaaataagctttctcagaatgttggcaaatcacttcaatcctcaaatcagtcttccttgtggaatgctgcctttattatatttgaattgacaggggaacttggtttagggttaagacgttggaaggaaatctaaggaaaattaatcctcacagaggtccgggtttagtatatgtcttgagaggagacttgtgaattcccagactctgcctcctggtttcctttctcatttctttctaactgtagctatcattactggctgtggatagcccatagctattttccttgcttttcttttttaaaggggtctgttctgcagtggagaagacattctggtgaccagacttttgcttaccttttcctattctgttgccaatttttgttttccccacattctatagccataaacctgaagatgagtaaaactggtgggtctttaataaaacaacaacaaaaacagcagtttgtgatatagcagaggtttaaatgtaccctccccttttatgcacttcaaataattaaatctctttaagaatgaaaaaaaaaaa

SEQ ID NO: 287426 - DNA, 1000 bp, Homo Sapiens; identical to SEQ ID NO: 221897

SEQ ID NO: 287427 - DNA, 1000 bp, Homo Sapiens; identical to SEQ ID NO: 116660

SEQ ID NO: 287428 - DNA, 1000 bp, Homo Sapiens
aatccctaaatatgaataggtttatattgattcatgggtaacaggtccataataaattattggaaactaggatgtctgaatatcaaggaagacagccatagtctcttacagtgcctctgttggtctgtctcaaactgaattgggtgggaaaaggtatggtccaatataaaagttccatttttgccattattggcaaatcttgcctttgtttattttggtgccagtgttttctgcttaatcatttgctttgttggcatctgtgtttatttacttgtacaccacatgcagtttacatctgtcttaactactccttcccaggtaaattccaattatatttgacatccagctaagagggcccatctcttctcacctctttcctagtcagtatattcagcaaatatttattgagcccttactgtgggcaaatcattgtactggataattgagaaaaatagataattcccttattcagtaaatgtctactgagcacaatctagtgaatcattacagtatggcctcattgttttgtttgaggtgtgttattcataacaatattttacaccattcgtatcaatgtaattatagaacacaatatacgatcaaggataagtaattgtgtggttatctgccatttaaaagtatccagtatttgatcacattattataaataatgaaaaaatgatttaatctgtaataaactggtttattgtgcagtgactgtaatatactagagttataataaattgtttactctgcctcaccaaacacatgctaggatataacccccaaaataagtatttaactttgcattaggtataaaggagactgggtgctataattagattattttgaggcagacagagagctgttatcctaactgatttagtatgttctgtaattgagaaaatgttcaccaaattatactttttagtgatttacatgtacattttataggggacatgttctgtgtatagcgaataaataacttttatagtatcac

SEQ ID NO: 287429 - DNA, 1000 bp, Homo Sapiens; identical to SEQ ID NO: 221898

SEQ ID NO: 287430 - DNA, 1000 bp, Homo Sapiens; identical to SEQ ID NO: 116662

SEQ ID NO: 287431 - DNA, 1000 bp, Homo Sapiens; identical to SEQ ID NO: 221899

SEQ ID NO: 287432 - DNA, 1000 bp, Homo Sapiens; identical to SEQ ID NO: 221901

SEQ ID NO: 287433 - DNA, 1000 bp, Homo Sapiens; identical to SEQ ID NO: 221902

SEQ ID NO: 287434 - DNA, 1000 bp, Homo Sapiens
ccaagtgaccagggaagtgtgtgtgtgtccatgtgtatgcgtgtccgtctgtctgtctagtgtctgggtttggcccaagactgggctgtagttacattaatgcccagccagccacccctgccactcacccctcctggcccaggccttgctgactctctgagctggggaggtgggaggccaggcgagcctgactctgttgatctacccgtgcctgggcccctcccctcagagcccatggtaacgaacccctagaaaggagagaacgggcgtcaggggtgcacagtccacagctgaagagcaaggtttcgtggcagcacggcccggcccctcaccctctgtccccacgaggggacccatgggggctgtctttgcagggcacagatgaccaaagtcccttcctgcttcctgttacctgtcttgctcctggggagaaagaggggcctgatgagactccactcaggtgcacacatcaccaggtgcatctgcaggcaccgggctggctgcttgcagccaggagaaggtcagcgagaaggagtgtatgagtgtgagtgtgtgtgcatggaagttggggcactgggcgtctgactccctccccacccaagagaggaaggacccctcaccacccccactggcgagacagtttactttgccgacttgccatgtttttgccaaaaccaagattttgaaggaaatgagtggccagcgccagggcccaggccatgtggcctgcccagcctcaatgtcacttggcggcggggtggggtgggggtgggcagcagcatcccagccttgagatgcttcactttccttctctgtaaccagactttgaaaaattgttcgtttcatcaggctctgttcctcaatggccttttgctacgtgcctcccgagaaatttgtctttttgtataaatgacaaagtgttgaaaatgtatttcctgaaataaatgtttcaaatgcagaaacccaaaaaaaaaaaaaaaaaaaaaaaaaaaaaaaaaaa

SEQ ID NO: 287435 - DNA, 1000 bp, Homo Sapiens; identical to SEQ ID NO: 221903

SEQ ID NO: 287436 - DNA, 1000 bp, Homo Sapiens
agtgcacaggcttccatcaagcaactggtttccggagctgagacactgaatcttgttgccgaaatccttaaatctatagacagaatttctgaaattaaagacgaggaggaagactcttgaggacccctgggtgttctcagcatgaagctccgtgtataccctgaggtcaccaccgctcgatctaaatgtgcagttgtgtccttaaatatgcagtcttcacccagagtaaagtgttgatcgcaagagtccagtgtcgtgccctcagccagttcttggccaccacaatgggagcagccctggccgagttgtctctgtggtttctatgcagcccttcttggcgaaattcctgcgatcttatagattctaatgagctcttggaagacattgtcataaaagccagtgattttaagaaaaagagtggttctggaatcagtgttttccagtcccatcccagaacatcagttgtaagataagtacaattggttgtccttgatttcataagtagaacaaacactaaatgtgcctctgagatggccaccccgggcagggacctgtgccttccaccgatgctcagggctccctctggctcccgggtcactcttgtggccccagtgggtggtccctgcagtcatggcctgagtgcgcaggggccaccgcgtggctgccgctgtcctcctccgggacccacggggaccaaggtcacacgttccgtgctgtgaagctgtccagatgtgcctctttggctgggggttctggtggacgtttcaagtggcattttgtacaatgcaggttagaattcaggaatttcaagtatgtgcccgggtctgtcaggtcccagttgcctttctgacggcccccctcagagggacggcgatgagcactaaatgcttttttgactattttcctatagattttttttaaaacttttttttcctcctgttccaattgatagctttcttatttaataaattctgtagttcaccaaaaaaaaaaaaaaaaa

SEQ ID NO: 287437 - DNA, 1000 bp, Homo Sapiens; identical to SEQ ID NO: 116664

SEQ ID NO: 287438 - DNA, 1000 bp, Homo Sapiens
gagcctccgcggaggacccaggagagccggactaggaccagggccctgggcctccccacactccccatggagaagctggcggcctctacagagccccaagggcctcggccggtcctgggccgtgagagtgtccaggtgcccgatgaccaagactttcgcagcttccggtcagagtgtgaggctgaggtgggctggaacctgacctatagcagggctggggtgtctgtctgggtgcaggctgtggagatggatcggacgctgcacaagatcaagtgccggatggagtgctgtgatgtgccagccgagacactctacgacgtcctacacgacattgagtaccgcaagaaatgggacagcaacgtcattgagacttttgacatcgcccgcttgacagtcaacgctgacgtgggctattactcctggaggtgtcccaagcccctgaagaaccgtgatgtcatcaccctccgctcctggctccccatgggcgctgattacatcattatgaactactcagtcaaacatcccaaatacccacctcggaaagacttggtccgagctgtgtccatccagacgggctacctcatccagagcacagggcccaagagctgcgtcatcacctacctggcccaggtggaccccaaaggctccttacccaagtgggtggtgaataaatcttctcagttcctggctcccaaggccatgaagaagatgtacaaggcgtgcctcaagtaccccgagtggaaacagaagcacctgcctcacttcaagccgtggctgcacccggagcagagcccgttgccgagcctggcgctgtcggagctgtcggtgcagcatgcggactcactggagaacatcgacgagagcgcggtggccgagagcagagaggagcggatgggcggcgcgggcggcgagggcagcgacgacgacacctcgctcacctgagcgacgcaccgcttcagggacggagacaggaccggcggagccctggggcggcggccgc

SEQ ID NO: 287439 - DNA, 1000 bp, Homo Sapiens; identical to SEQ ID NO: 221905

SEQ ID NO: 287440 - DNA, 1000 bp, Homo Sapiens; identical to SEQ ID NO: 221906

SEQ ID NO: 287441 - DNA, 1000 bp, Homo Sapiens
tcctggaggaggagcagcggatcaggctggtggtgagccggctgggcctggactccctgtgccccttcagccctaaggagcggatcatcgagtacctggtccctgagcgcgggcctgagcgaggcctgggcagcaagtccctgcgcgccttcgtgggggaggtgggtgcccgctctgcggcccccgggggcggctcggtggcggcggccgctgcggccatgggtgcggcgctgggctccatggtgggcctcatgacctacgggcggcgccaattccagtccctggacacgacgatgcggcgcctgatcccgcccttccgcgaggcttcggccaagctaaccacgctggtggatgccgacgccgaggccttcaccgcctacctggaagcaatgaggctccccaagaacacacctgaggaaaaggacaggcgcacggcggccctacaggagggtctgaggcgggcagtctctgtgccgctgacgctggcggagacggtggcctcgctgtggccggccctgcaggaactggcccggtgtgggaacctggcctgccggtcagacctccaggtggcggccaaagccctggagatgggcgtgtttggcgcatatttcaacgtgctcatcaacctgagggacatcacagacgaggcatttaaggaccagatccaccatcgtgtttccagcctcctgcaggaagccaagacccaggctgcactggtgctggactgcttggagacccggcaggagtgacgaaaccccagggacagcaggaccttcgacgctggaaggatagcctcgcttcccaggtgcagctcccggcaggtctggacagttccacagagcacggtactggccctgtcctcagttcccgtccacccttcaaccagtggctcctgggagacttttcctccctgcctcagctccctgcccagccagcctcctgtctccagagaagttctccattaaaaaataatttagcaaatcaaaaaaaaaaaaaaaaa

SEQ ID NO: 287442 - DNA, 1000 bp, Homo Sapiens
acagaatcatcagcaggaggaaaaatgaaaagtatcttggatttggaacaccatctaatctgggaaaaggcagaagggctgcagctgctgcagaccttgctaatcgaagtggggaatcgaatactcaccaagacattgaagaaaaagatcggttattgcgtcatgtggaagccagagatctgattgagtttggcatgattcctgagtttgtgggacggttgcctgtggtggttccattgcatagcctagatgagaaaacacttgtacaaatattaactgagccacgaaatgctgttattcctcagtaccaggccttattcagcatggataagtgtgaactgaatgttactgaggatgctttgaaagctatagccagattggcactagaacgaaaaacaggtgcacgaggccttcggtccataatggaaaagctgttactagaaccaatgtttgaagtccctaattctgatatcgtatgtgtggaggttgacaaagaagtagtagaaggaaaaaaggaaccaggatacatccgggctccaacaaaagaatcctctgaagaggagtatgactctggagttgaagaagaaggatggccccgccaagcagatgctgcaaacagctaaactgtcatattgctgtcttgtatatacagcttttccttcttttgtttaggatcataattgtctctacagtctgatattaaaggcattggatctatcttggatatcatacatggtcagagaagcctttaggagaagaatcagatcatgtatataattgtaacatcacattgattttacggaagatgttatatggactttaatgacacaatgtttagagataaaatgtacattattttggttcagttttttaaaaaaaatatgctttaacaaaattcttaggaattcttttaagcaatgcaggtattgcgataactgtagattttacaataatgttactctacaaatgggaaaataaattctttaaaattgaatattga

SEQ ID NO: 287443 - DNA, 1000 bp, Homo Sapiens; identical to SEQ ID NO: 116667

SEQ ID NO: 287444 - DNA, 1000 bp, Homo Sapiens
ctctgccatctttagcgctggcttcattctcagactctggtagcatgatggctgtagctgtttcatgggccccttcaaacctcatagcaaccagaggaagaaaatgagccattttttgagtctccttcatagacttgaataactctttttcagagcttctcacagcaaacctctcctcatgtctcctcatgtcttattgttcagaaatgggtaatgtggccatttcaccagtcactgccaacaacaacgaggttcctataattgtctctgagtaaccctttggaatggagagggtgttggtcagtctacaaactgaacactgcagttctgcgctttttaccagtgaaaaaatgtaattattttcccctcttaaggattaatattcttcaaatgtatgcctgttatggatatagtatctttaaaattttttattttaatagctttaggggtacacactttttgcttacaggggtgaattgtgtagtggtgaagactcggcttttaatgtacttgtcacctgagtgatgtacattgtacccaataggtaatttttcatccattaccctccttccgccctcttcccttctgagtctccaacatcccttataccactgtgtatgttcttgtgtacctacagctaagcttccacttataagtgagaacatgcagtatttggttttccattcctgagttacttcccttaggataacagcccccagttccgtccaagttgctgcaaaatacattattcttctttatggctgagtaatagtccatggtacatatataccacattttctttatccacttatcagttgatggacacttaggttaattccattcaatttcattcaatttaagtatatttgtaaggagctaaagctgaaaattaaattttagatctttcaatactcttaaattttatatgtaagtggtttttatattttcacatttgaaataaagtaatttttataaccttgaaaaaaaaaaaaaaaaaaaa

SEQ ID NO: 287445 - DNA, 1000 bp, Homo Sapiens
gcaaactgaccctcaagaccacagagatggagaccatctacgacctgggcaccaagatgattgagtccctgaccaaggacaaggtccaggccggggacgtgatcaccatcgacaaggcgacgggcaagatctccaagctgggccgctccttcacacgcgcccgcgactacgacgctatgggctcccagaccaagttcgtgcagtgcccagatggggagctccagaaacgcaaggaggtggtgcacaccgtgtccctgcacgagatcgacgtcatcaactctcgcacccagggcttcctggcgctcttctcaggtgacacaggggagatcaagtcagaagtccgtgagcagatcaatgccaaggtggctgagtggcgcgaggagggcaaggcggagatcatccctggagtgctgttcatcgacgaggtccacatgctggacatcgagagcttctccttcctcaaccgggccctggagagtgacatggcgcctgtcctgatcatggccaccaaccgtggcatcacgcgaatccggggcaccagctaccagagccctcacggcatccccatagacctgctggaccggctgcttatcgtctccaccaccccctacagcgagaaagacacgaagcagatcctccgcatccggtgcgaggaagaagatgtggagatgagtgaggacgcctacacggtgctgacccgcatcgggctggagacgtcactgcgctacgccatccagctcatcacagctgccagcttggtgtgccggaaacgcaagggtacagaagtgcaggtggatgacatcaagcgggtctactcactcttcctggacgagtcccgctccacgcagtacatgaaggagtaccaggacgccttcctcttcaacgaactcaaaggcgagaccatggacacctcctgagttggatgtcatcccccgaccccaccctgttttccaccagagttctgacactgtgactctgtataaaatggttgggaagctgc

SEQ ID NO: 287446 - DNA, 1000 bp, Homo Sapiens
actcggagcccacacgatgaagacccccaggcagtgacgtatgccgaggtgaaacactccagacctaggagagaaatggcctctcctccttccccactgtctggggaattcctggacacaaaggacagacaggcggaagaggacaggcagatggacactgaggctgctgcatctgaagccccccaggatgtgacctacgcccagctgcacagcttgacccttagacggaaggcaactgagcctcctccatcccaggaagggccctctccagctgtgcccagcatctacgccactctggccatccactagcccagggggggacgcagaccccacactccatggagtctggaatgcatgggagctgcccccccagtggacaccattggaccccacccagcctggatctaccccaggagactctgggaacttttaggggtcactcaattctgcagtataaataactaatgtctctacaattttgaaataaagcaacagacttctcaataatcaatgaagtagctgagaaaactaagtcagaaagtgcattaaactgaatcacaatgtaaatattacacatcaagcgatgaaactggaaaactacaagccacgaatgaatgaattaggaaagaaaaaaagtaggaaatgaatgatcttggctttcctataagaaatttagggcagggcacggtggctcacgcctgtaattccagcactttgggaggccgaggcgggcagatcacgagttcaggagatcgagaccatcttggccaacatggtgaaaccctgtctctcctaaaaatacaaaaattagctggatgtggtggcagtgcctgtaatcccagctatttgggaggctgaggcaggagaatcgcttgaaccagggagtcagaggtttcagtgagccaagatcgcaccactgctctccagcctggcgacagagggagactccatctcaaattaaaaaaaaaaaaaaaaaagaaagaaaaaaaaaaaaaaaaaa

SEQ ID NO: 287447 - DNA, 1000 bp, Homo Sapiens
tggctgtgtgaagagtgtagccgaggcctccgagctcaccctgggccccacctgcccccaccacgtccccgttcaagtggagcgggatgaggagctgcccgctgcgagtctgaaccactgcaccatccagatcagcgagctggagaccaatgtctgagcctgcggagctgcaggggcaggcgaggcctccaggggcagggtcctgaggcaggaactcgactctccaaccctcctgagcagccggcaggggccaggatcacacattcttctcacccttgagaggctggaattaaccccgcttgacggaaaatgtatctcagagaagggaaaggctgcatgggggagccccatccagggagtgatgggcccggcattgcctgaggccccgctgtgacagtttccccggtgtgagcccggtgagggcggcaggcaggggttatccggccccactttctggatgacagacttgaggctctgagagctgaaaacacttgtccaaggtctcacgttaaggtcaagacactaactcaaatctttcaagccccgcctctcctcttggaggacagggcagcctgcagctgtgtccaggcccaggccccaccccataacaggtggcctcagccacacagttctccccaaggggagcagcccagggccaagccccgctgccttccccaggccacagtgcgtccagtctcctgtcctgccacgtgtcttttgcaaagctccttggatgtggagacagatgtctttactagagctgaaaggcccccttgacacatccaggccaacctcccatggaataggtaggcaagccaggactccgggaaggaggtgcagccaggatgctctggtggagctgccgatggggccctggtgtcagaactccccaaaggcctgtgcgtccaagtggagtcaggttttctattcctttctgtgtttgcaaattcagtgttaactaaataaaggtattttgtttttcaaaaaaaaaaaaaaaaaa

SEQ ID NO: 287448 - DNA, 1000 bp, Homo Sapiens
gatggagtgtggctgtcactgcccaagcttacttatggggggatcgccctgctggctgccggcaccgccctcctgctgccagagacgaggcaggcacagctgccagagaccatccaggacgtggagagaaagagtgccccaaccagtcttcaggaggaagagatgcccatgaagcaggtccagaactaagtgggagtggaggcaggccctccacagaagctctgcagcaggggctgggagagcagaagggcaggccctgcaactcaggctgggagtatcgaaccctctgcctagggccggagttgctgccagtacccgctccctctgctcatccatccttgattatttggcttctaggaacagttgacttcccagaatgcagtgggctgctgggcacccctctcacggttggggaggattctgtaaataaaggtgccccttgggttggggcagtggtgacgagctgtgggaagagccctggataggaagccactgagtctgccctgggctctgataaaaccttcaccattaacttgctgtgtgaccttgggcatgtggctttccctctctgggcctcagtctgttcatctcccaaatggataatgaagcctcttgggaggccctaccataggatctgttgccatgctcaaatgagttactgaataaggtgcttctgcttcttctagagatggtgctaaagaaaggactagcatatgagacttctggtaccaatggggctggtgggcatgctgtccactgtgtggtgctaggactgccaatgccaggcccaagggacaaaaagaacagagctttttgttctcatggctggccctgctacctccgaggcaccctgcagggcaatgcatgtcatcccaacccccacactccccatcctccaacccactggtctcatgcccaaagaagagttgaaggcatgggagccaacattttattgaagaagccacagaggctgaaattcaataaacacaagttttatgag

SEQ ID NO: 287449 - DNA, 1000 bp, Homo Sapiens; identical to SEQ ID NO: 116671

SEQ ID NO: 287450 - DNA, 1000 bp, Homo Sapiens; identical to SEQ ID NO: 221909

SEQ ID NO: 287451 - DNA, 1000 bp, Homo Sapiens; identical to SEQ ID NO: 221910

SEQ ID NO: 287452 - DNA, 1000 bp, Homo Sapiens; identical to SEQ ID NO: 221911

SEQ ID NO: 287453 - DNA, 1000 bp, Homo Sapiens; identical to SEQ ID NO: 116672

SEQ ID NO: 287454 - DNA, 1000 bp, Homo Sapiens
ctccggccttccctgccctgacctggaacctctgggagggctgcagagtaagtgccgcctctgcgctccgacggaggcacgaggcctgtggagtaggtccctctgttccgacaggtgcgacacttggcgctccatgcttgcgggtgccgggaggcctggcctcccccagggccgccacctctgctggttgctctgtgctttcaccttaaagctctgccaagcagaggctcccgtgcaggaagagaagctgtcagcaagcacctcaaatttgccatgctggctggtggaagagtttgtggtagcagaagagtgctctccatgctctaatttccgggctaaaactacccctgagtgtggtcccacaggatatgtagagaaaatcacatgcagctcatctaagagaaatgagttcaaaagctgccgctcagctttgatggaacaacgcttattttggaagttcgaaggggctgtcgtgtgtgtggccctgatcttcgcttgtcttgtcatcattcgtcagcgacaattggacagaaaggctctggaaaaggtccggaagcaaatcgagtccatatagctacattccacccttgtatcctgggtcttagagaccctatctcagacagtgaaagtgaaatggactgatttgcactcttggttctttggagccttgtggtggaatccccttttccccatcttcttctttcagatcattaatgagcagaataaaaagagtaaaatggtttccttcccttctgtaacttggagcaggaagtcatgggggcagagagggaaaggaggtggttacttaaggccccaatctaccaagtcttccccaccacttctcccttgttttccccctcttctactacttatttcaaacttctgggatacaatttcagctaaaacgtttatttctcactcaaaacttatttcccctcaaccctatacccaaagaagaaataaaatcacagatacataacagaaaaaaaaaaaaaaaaaa

SEQ ID NO: 287455 - DNA, 1000 bp, Homo Sapiens; identical to SEQ ID NO: 116673

SEQ ID NO: 287456 - DNA, 1000 bp, Homo Sapiens
tgaacctcctgtgagcgagagtgatgatggcttcagcatacacaatgctacactgcagtcacacacactggcagactccatccccagcagccctgcttcttcacagttctctgtctgtagtgaggatcaggaagctattcaggcacagaaaatttggaagaaagccatcatgcttgtatggagagctgcagctaatcataggtatgccaatgtcttcctgcagcctgttacagatgacatagcacctggctaccacagcattgtgcagaggcctatggatttgtcaactattaagaaaaacatagaaaatggactgatccgaagcacagctgaatttcagcgtgacattatgctgatgtttcagaatgctgtaatgtacaatagctcagaccatgatgtctatcacatggcagtggagatgcagcgagatgtcttggaacagatccagcaattcttggccacgcagttgattatgcaaacatccgagtctgggatcagtgctaaaagtcttcgagggagagattctacccgcaaacaggatgcttcagagaaggacagtgtcccaatgggctctcctgccttccttctctctctctttgatggaggaaccaggggacgccgctgtgccattgaagcagatatgaagatgaaaaagtgaagcctcagagttaccctctttgagccgaacctaaaataaaagtaaacaagatagagcttgggcttgcgggcccagttccagaggtggaagttacagaagaggaggtacctgggccacacgacatgagctggaaaatctctcttagagagttggagtagcacaattgcctgttttagggcagaaaccatgggctatgttaatgtcctaatgtgtagctagcagatcgtagctagtttgtattgtcttgtcaattgtacagactttttaaaaaaaacaaccaccagtgaaatgtgtgtgtatacaataaactgaaaaaaaaaactaaaaaaaaaaaaaaaaaaa

SEQ ID NO: 287457 - DNA, 1000 bp, Homo Sapiens; identical to SEQ ID NO: 116674

SEQ ID NO: 287458 - DNA, 1000 bp, Homo Sapiens
gaatttgaagagattgctgacgcccgagagcctcgctttttcatccttctttccttgttcagcaggctagacagaaacatgtcttgactgttagttgtccacaaatcttcagtattttctccacttcatttttaagaaaggaagcaacagatagatgttgctctttcacctgggtgtctgggctcaagctttcccgcccagcctcacttcctttgcccttcctcctgcctttctcaactgtcccaaggagggggcctcattgtgtctcccgtgcatgctctgcagcattgaagtatggtgtgttcacgtagttctagcagtccccagctgagtgagtgggagagtacctgtgtgtttcgtaacggccttgatccccttgatagatgtttggatattttttggtgtgccctgtgtgtgtgtgtgtacaaatacatgtgtatattccttttaaagaagctttatcgaacgtggtctgattttgaggtttagcaatagctagctatatatggtaggtgccgctacagtttttatttagcatggggattgcagagtgaccagcacactggactccgaggtggttcagacaagacagaggggagcagtggccatcatcctcccgccaggagcttcttcgttcctgcgcatatagactgtacattatgaagaatacccaggaagactttgtgactgtcacttgctgctttttctgcgcttcagtaacaagtgttggcaaacgagactttctcctggcccctgcctgctggagatcagcatgcctgtcctttcagtctgatccatccatctctctcttgcctgaggggaaagagagatgggccaggcagagaacagaactggaggcagtccatctagggaatgggactgtgaggccatacttgtgaaacgtctggactgctattctagagcttttatttggtgtgttcgttgcacagctgtttgaaatgtttaataaagctttataaactttaaaaaaaaaaaaaaa

SEQ ID NO: 287459 - DNA, 1000 bp, Homo Sapiens; identical to SEQ ID NO: 116675

SEQ ID NO: 287460 - DNA, 1000 bp, Homo Sapiens; identical to SEQ ID NO: 116677

SEQ ID NO: 287461 - DNA, 1000 bp, Homo Sapiens
tgtggataactagctgctggttgatcgcactatgactctggaagaagtccgcggccaggacacagttccggaaagcacagccaggatgcagggtgccgggaaagcgctgcatgagttgctgctgtcggcgcagcgtcagggctgcctcactgccggcgtctacgagtcagccaaagtcttgaacgtggaccccgacaatgtgaccttctgtgtgctggctgcgggtgaggaggacgagggcgacatcgcgctgcagatccattttacgctgatccaggctttctgctgcgagaacgacatcgacatagtgcgcgtgggcgatgtgcagcggctggcggctatcgtgggcgccggcgaggaggcgggtgcgccgggcgacctgcactgcatcctcatttcgaaccccaacgaggacgcctggaaggatcccgccttggagaagctcagcctgttttgcgaggagagccgcagcgttaacgactgggtgcccagcatcaccctccccgagtgacagcccggcggggaccttggtctgatcgacgtggtgacgccccggggcgcctagagcgcggctggctctgtggaggggccctccgagggtgcccgagtgcggcgtggagactggcaggcggggggggcgcctggagagcgaggaggcgcggcctcccgaggaggggcccggtggcggcagggccaggctggtccgagctgaggactctgcaagtgtctggagcggctgctcgcccaggaaggcctaggctaggacgttggcctcagggccaggaaggacagactggccgggcaggcgtgactcagcagcctgcgctcggcaggaaggagcggcgccctggacttggtacagtttcaggagcgtgaaggacttaaccgactgccgctgctttttcaaaacggatccgggcaatgcttcgttttctaaaggatgctgctgttgaagctttgaattttacaataaactttttgaaacaaaaaaaaaaaaaaa

SEQ ID NO: 287462 - DNA, 1000 bp, Homo Sapiens
aaacggtatctagtactggactgtgtgccagaggagaggcgtaaactgattgtggcatatgttgatgacctggatcgccggggtccacccccacctcccacagcatcggagcccacgagacgatcaacaaaataattctaaatactcttccataggggcatctattcaaaatgcttgcatgagccaattttcaggtttttacatatatgtgcattagtcaacctattgcgaaaccatctgacaaacagaaggagaagcatttgtgaacagtttctgaacagaacactttggaaatatttatgcttttctttgtgtggcatgactgacatacatactcaaatataggctgtctctagtaaatcttaaaatcttgaagctaaaattcatccttttatgaggtgtggaagtcagtgacttggtgacgttcttcctagcagtgttaatacatgcaagaagtaagagcatttgtggcttgaacttgccagatgcaaataccacagactccaagaaaacccgagttggggtttgttttgttttgattttttttttttaaagcgggtaaaagagaaaacactgaaaattgaattcttatcttccagaggctacaattattataatggacaatacttttacctttgtctctaaagatcagattagttttatttgttcacttacgtgctttgattatcccctctgaattatagaccgagtcttgttgtttagcctaagagaagatttatgtagtaatttcttctcaggtatggaaccacggtcataactaacatgttggccagaatagaaccactggttaaacatattttattcaccattaagtgatctttatcaatattctggattagacaacaaattacctttctgggtgtttcttgtaaactatactcctgtttgaatgttaaactttgttgctaaagtttaattttaagatgtttgaatgttcagtttatgtatttgaactacaataaaccaaccctttttatat

SEQ ID NO: 287463 - DNA, 1000 bp, Homo Sapiens
ttttgttgtagttatcttctggggtttcaattcctcagaaacaacttttttcacaacggaaaggaaagaacactagtgttctttcagtaaagtacaaagtgtttattttacaaaagagtaggtactcttgagagcaattcaaatcatgctgacaaggatactgatagaaaaagtgatttcttcttattataaagtacatttaaagttcaaggactaaccttatttatttgggaaaggggaggaggaaggaaatgatatggtacccagacactgggctaggctgcaactttatctcatttaatactcccagctgtcatgtgagaaagaaagcaggctaggcatgtgaaatcactttcatggattattaatggatttaagagggcatcaatcagctcaactcaagatttcataatcatttttagtatttagattgtgcctcaaagttgtagtacctcacaatacctccactggtttcctgttgtaaaaaccttcagtgagtttgaccattgtgctcttggctcttgggctggagtaccgtggtgagggagtaaacactagaagtctttagtacaaaactgctctagggacacctggtgattcctacacaagtgatgtttatatttctcataaagagtcttccctatcccaaggtcttcatgatgccagtagccatatatgataaattatgttcagtgataacttagttatcagaaatcagctcagtggtcttccccgccatgattcacatttgatgagtttttaaaaatcaaagtgattttgaaaatctctaatggctcagaaaataaaaacatccagtttgtggatgactatatttagatttctctagactctagtggaagacctttggaaaggccatgccaaccgtgcttgtactgctagaagcactttatgtttcctttttgggtgaaatggatttatgtgagtgctttaaacaaatagcaatacttatagactgaaataaaatgaaacttcaaataag

SEQ ID NO: 287464 - DNA, 1000 bp, Homo Sapiens
gataaaatacatatagaatataagatatactatatacattttgtccataaacgttatgctgaatagttgttgaaacagttctcattttgtagtatttaataatctggatggagcctgtcagtattacagttagttttctagtgactcataaaataagatttcctgtttcatgtagaatagtgtttgtcaactgtcttttctctgtcccagcacatgccgtactcttatatgtaccattggttgataattataatgattcatttggacttgaagaaagattgtccccaggcacagtatctgaatcactggggattatgattcaccctctttggagaacatgctctcttttcaccccccacctcctgagagccactaatgtaagatacagaaacatagctgaggaacaaatagaccatttccatactaaaccagtttgttaactttagattttttccaatagtgtgagtatatccattgctggcagtggagggcttgccatgaaaatgcaacttatttaagacatttatgagacatattaacttgtgctgtcgccttttagaaggagaaacttaagtgtggaatgcattatatgggcaaagaagctatgaagatacatgatacactttgtacaactatcctgcagcccattggttgcttatatttatcgcttggctcaagttctgccctttggagaaatactgagcaagtctttcattctctgtgtgacagccctctgaatatttgaagttgtttgttgtaacttaaggttataacagcccttagttcatttactctgcatttgttcaataaatatttaactgaattcttcaattatttcatctaagatagtttctggaaatttcactctcgatctttctgtggacacaatctattttgtcattgtgtctatatgaatctcttaagtagaaatgagttgtatggtgaatctgtgtagtgataattatataatttatttattttgaaaaaaaaaaaaaaaaaa

SEQ ID NO: 287465 - DNA, 1000 bp, Homo Sapiens; identical to SEQ ID NO: 116680

SEQ ID NO: 287466 - DNA, 1000 bp, Homo Sapiens; identical to SEQ ID NO: 116681

SEQ ID NO: 287467 - DNA, 1000 bp, Homo Sapiens; identical to SEQ ID NO: 116682

SEQ ID NO: 287468 - DNA, 1000 bp, Homo Sapiens; identical to SEQ ID NO: 221915

SEQ ID NO: 287469 - DNA, 1000 bp, Homo Sapiens
tctgaatgtaacttaaatttgctcaaagaagcaaaatattttttaaagttattaataattgctatttttgtagtctttgcttgacttttttgggggggattagcaaagcagaaaactggctgctgggttctgtagttttaaaaaatctatatttttagtcataatgagaagtctattttcaccaattatggaaacatacagtggagcaagtaaaccacttattccagctataatattatgaagaacatttcccatgcatctacaagcttgagaaataggattttcacagtggggaagtgggttacaatattggaataggaaaatttgatgctgtaatttgggtcctgtatttttccaaacaactgtgcttcttcagcactaatatttctgggatttaaatagtaatgtttaaattatggtaaatgtaatttaaaacatctcaattaagtctgtctatcaatattgttcttcaagcatgttttagacctagaaaagtatggtttgggggaggctattttattgtgtggttagcacaaggaatctaatttatagcaagtgtgaaatagttaccattttttcctgatctgtcatcttcatagcacaacaaaacgaaatgatggaaatgctcttgagctcacaacatttgtttttcttttaaagtaaatgcaagtaccaaagctcactactgcggtttgcctgtgcctggacaatgaggcggagccactgttgttggggcacccccttccctccccgggtttgcaaatagaggctaccgggtgctgtattcagcaacacctgttttactatttgttattaaactatcatctccaccttccttttgattagcaatttgtactaagaaacgaaacaatgttatttggtggtgtataattctacttttctagtagattactgtgtggaattctgtgaaaaatatttgagaaaaggcctgtattgcataaataaattctttgtatgttgtgaaaaaaaaaaaaaaaaa

SEQ ID NO: 287470 - DNA, 1000 bp, Homo Sapiens; identical to SEQ ID NO: 221918

SEQ ID NO: 287471 - DNA, 1000 bp, Homo Sapiens; identical to SEQ ID NO: 116684

SEQ ID NO: 287472 - DNA, 1000 bp, Homo Sapiens; identical to SEQ ID NO: 221920

SEQ ID NO: 287473 - DNA, 1000 bp, Homo Sapiens; identical to SEQ ID NO: 116685

SEQ ID NO: 287474 - DNA, 1000 bp, Homo Sapiens; identical to SEQ ID NO: 116686

SEQ ID NO: 287475 - DNA, 1000 bp, Homo Sapiens; identical to SEQ ID NO: 221921

SEQ ID NO: 287476 - DNA, 1000 bp, Homo Sapiens; identical to SEQ ID NO: 116687

SEQ ID NO: 287477 - DNA, 1000 bp, Homo Sapiens; identical to SEQ ID NO: 116688

SEQ ID NO: 287478 - DNA, 1000 bp, Homo Sapiens; identical to SEQ ID NO: 116690

SEQ ID NO: 287479 - DNA, 1000 bp, Homo Sapiens; identical to SEQ ID NO: 116692

SEQ ID NO: 287480 - DNA, 1000 bp, Homo Sapiens
ccagatcctgtgcaggatgaggtccagggggtgaccctgctgcccaccacaaagcagctgctgcacctgtgcctgcaagatggtggcagtcctccagggcctggggatctggccgaggagaggactgagttcctgcacagccagaactcgctgtcaccacgcagctctctgtcggatgaggccccagtcctgcccaacaccaccccggacctcctcctggccaccacagccaagccatcagtacccagtgctgacagtgagacacccctgacccaggacaggccaggcagtcccagtggctctgaggacaagggcaacccggcgccggagctgagggcctcctttctgccacgtaccttgtctctgcggaactccatcagcaggatcatgtcggaggcgggcagtgggaccctggaggacgagtggcaggccatctcggagattgcctctacttgcaacaccattctggagtcgctgtcccgagagggacagcccatcccagagagtggagaccctaagggaactccaaaatctgatgctgagccagagcctgggaacctctcagagaaggtctctcacttggagtccatgctcaggaagctgcaggaggacctgcagaaggagaaggcggacagggcggccctggaggaggaggtgcggagcctgagacacaacaaccggcggctgcaggcggagtctgagagtgcagccacacgcctcctcctggcctccaagcagctgggctcacccaccgccgacctggcctgagccgtctggaaccacctgggcccctgagggcactgtggtcacactgggccctcctcaggaactctccctgcgcagaggcgtgtcttagcactgcccccctccctagccccttatttggtggcggaagtggcctccaccccttccctgtttgtaaatattctgtggagaaaagaggacttcagggagtaaaaaagccactgatgaaaaaaaaaaaaaaaaaaaaaaaaaaaaa

SEQ ID NO: 287481 - DNA, 1000 bp, Homo Sapiens; identical to SEQ ID NO: 116693

SEQ ID NO: 287482 - DNA, 1000 bp, Homo Sapiens
ctaaactatcaaaaactctagcagtttgaaaagcctaatatttatttgtatgtcaatatttttcatttgattccctattagaattaattttaaaacttgaagacttccagacttatccaacttataaataacatatttcttcagactaacatcttaaaacactgacctctatgaggtatttactgtgcaataactgattcatttttttcagagcttgaagcatccaatgatttttccctccactgctgttaattaatgtcacttccaagaagaaaaactgttctgttgtaaaaaatataattgctcttaattcttggggaggttactaatagcagtaggatagaattttatgaggttacctacaactacttaacgtacttacactgtaagccttgttgctttacccaagacaaatgtaattttatcattgcttatgtagtatttttcttttggaaatgtgccttatgttaaacactatgtacttttactttttgcattgtccagacttctttattagatggagatgtttctttttctgtcttctagactaaatagagtatcatccaaataatggggcctatgacttgaatgaatagaaatgaataagctggtgtttgttttttcaaaatggaagtaatttagatttgttctcctcatacataaaatgattttagttcagttttaaccagtgaaaactttgtttttatgaaaaaaaaggaaaatggtttcccatttggttttatatgtgttaaataaatgtgtaaagtaaccaccaaatgttattagaatttttcttctagcatttataattttttcaactcctattgtgtttctttgtgtgtgatattttaatcaaaagtggttgagttgttaacagtgttctttgaaagaatctctaaaaggcttataaatgtttgaaatatcacacaaaggctgatttctaaaatatatatatattaaaacaataaagtatttattttgcccaaaaaaaaaaaaaaaa

SEQ ID NO: 287483 - DNA, 1000 bp, Homo Sapiens
gcgtcatccttgaacgcaggatccgggaccttcagacccagggaaagggtgagggagactggggcctggtctgctttcccgggcctgaaagcttccccgaggtttgcagggtcagggaggaggaacggtgggggtgggcagtcactgcctgttccccactgcctgtgttcgcaggagccacgggacagaagacggtggcctctgctgccgggccacgttagtccgcagctcacccgaacagaggacaaccctgaggtgtggcatatgggcacctggcactgggagtcgggggagcacgtccaggcgtggtgcatcctggggcagaacgccatggctcctccccgctctcttggcttctgcctgttggggtctcattcctttctgttccccagtgccccggggcggcattttactgctcagaatttggagggagggagcagtaccttcccggagtccacgcatgtgagttgggtcaagtgcattggacctagggaaagagaaagaaagaataaaagctggagagagagtgaagtgaatgcaagatacaaagtgggatggaagaattaaatccagagttccaggcaatcaaaatgagtgcaggttgaaagaaaacaggtgaattttagtggcatatggatgataaagctgtaaataaaattcttttgatgaaactctccggttatgagacaaagactgtaactgaacaggagctggtgtgactgttaccagacagaggcaactgatgaaaaagccctgtgaaagataggatgtgaggtgagcatgagcttgagctgagagacagacacaacagtatctgaaaagaatacatactctttccatgcatatatggaacatggatggaaactgaccacctactttgtccagaaaagaagtcttaagatatttcaaggaatcagtgtcgttatctgaccgtatcccaatgtcattaaaaaaaatttgagctaaaaaaaaaaaaaaaaaaaaaaaaaaaaaaaaaaaa

SEQ ID NO: 287484 - DNA, 1000 bp, Homo Sapiens; identical to SEQ ID NO: 116694

SEQ ID NO: 287485 - DNA, 1000 bp, Homo Sapiens; identical to SEQ ID NO: 116696

SEQ ID NO: 287486 - DNA, 1000 bp, Homo Sapiens
catttcctacttcattccagcaggaggcacttaggggagactcggatggggacatggagaacaacccaagctccttaaacttattattattgttaatattattattattattattaataaagtgaggcaggaaaatgcttctccttttaaaatcccctccactcctcacacacacacacctcttgaaacccttccccaagaatgtttctttatagacggacttcattgaaatctttgttgttcttgaatcaagtgtaatataatttttttcttcttttttaaaatattcccactcagcactcagagacacaaaaatactgtaagtctcaattaacagcagaatctcagagaaaagctgtttgcaatccaaatccagcctttggaggaatagagatggtcaattaacaatcaaaaagaggagattaacctcttgtttttttaccacctggtgaatcagccataacgcacacacacgccacccagcctcttgtttctagtatgtactttgaaatgctaactgagggtcttgatgcttgagcctttgactgataaaactcaaatagcagtccccagtgatttgcctcttaggttctttcttaaattgttggtggatgactgtacattttagtgatttgaaaaataactgacaaaccattgaaacagtttattttatgttggaagagatggcgcagatgtgtgtcagaagggagatcacggtgtgagtttcgtagctatttaagtgatacatacctctagtttttgtatgtcttttgagatcctgagttcatcccctgtgaatcagagtgcacaagcacctctcctgtgagtggctaatgagaagagggacagaccgaccaccagcacagtagggcagatctggacagcagaatgttataacgcaagttcatgtgttgctcccaactccattctcttttctctcgtgcaaccagtttgcccattctcttcctattacttgctccagggataggtaaaaaaaaaa

SEQ ID NO: 287487 - DNA, 1000 bp, Homo Sapiens; identical to SEQ ID NO: 221926

SEQ ID NO: 287488 - DNA, 1000 bp, Homo Sapiens; identical to SEQ ID NO: 221927

SEQ ID NO: 287489 - DNA, 1000 bp, Homo Sapiens
ctacctgccggaatcgcctggtcccgggagatcggtttcactacatcaatggcagtttattttgtgaacatgatagacctacagctctcatcaatggccatttgaattcacttcagagcaatccactactgccagaccagaaggtctgctaaaaggtcagagtaatgcagaatgcgtgccttcatctcagatttgttcatcacaggtggatcccatgtgtcttcagtagacaagtcacctttgtagctagcaccagtgccagctccatgccattgcaccttctttagtcttgattgcccttcccgcatttattggtgtattaaaatgactgaatatgaacattaaggactccatgaacctgggctaatgggagactgtagagaaaatgaaaaaagatccaccagaggacatcttggggagggggagggagctgggggggagggaaatgactaatgaagctaattaaaagaagcattcaaatctgctttctaccctcattaacaattagcagggcactggccagagtttgtaccctgtgttttaccttaacaacattctatttgctctttgtatatttaagtgttgtaaggaaacgtgtttcaatcaaaactgaccatgagataaaggaaagagatgtggcttttgtgatattctatcacaaacacttattgtatctctgtaaaatacaatgtatgtatgcatgtaagtgtttttgtcctaatgttgctactcccatggcaaagaaaaaaaaaagaatgaaaaaaagaaaaaaaatttggaaaaaaaaatcaggctcatagcagctactgtgtagaaaattccccctacttctaatttgctgaatgaagaaaaaaaaaaatcttttatttgtgatattttcagagacatttgctctagtatggtgtatttaaataataaaaacttaaaagaaaaaataaaaaaaaaaaaaaaaaaaaaaaaaaaaaaaaaaaaaaaaaaaaaaaaaaaaaaaaaaaaaaaa

SEQ ID NO: 287490 - DNA, 1000 bp, Homo Sapiens; identical to SEQ ID NO: 116697

SEQ ID NO: 287491 - DNA, 1000 bp, Homo Sapiens; identical to SEQ ID NO: 116698

SEQ ID NO: 287492 - DNA, 1000 bp, Homo Sapiens
tgatggctggggggtaggaagaggatggaattgagatgtttgagcctcatttacatcaatagaggtgtaatgtactgcatttcttcatttggtaacataacaaagactttcatacaaagaacgatgatgctcctcattaagatttgtttaattcaaggtggtttggatttggtaagcctttgcactctgtagagtacttagaagacaagggcaacttacttggagttagagccaagctgtcagacggtgcccagcacacattaatgttagcttctttctgagaaaaaaatacctcttccaggccctgaaacaaaaaatacatttgctgtgaagattgaaaatgaacaaagttagaaaaaaaaacagcaaaatcagtgatttagtcagatgagtttttcgttgtaggagcacttgatttctagtgtgttttgtacagtatataactacaagatagtacattttgtagcagttcaaagccaaagttgctagcatcattttgctgttgtgccagttaatcataggatcccattaaataagtgtgctaacatcgaatatagagaaaactggtaaagaacattccagtaggaaaagaaaagaacaatcttccatttctgggcttggccaccatcaccctggtcggacctgtcctggacttccaaccttgactgctgagctcctggcttagcttcttgggttcctaattcctggtgtttaataattctctccacgatcatgtttttctgattttttttttcagaaataatgttttttaaaagacaaaaacaaagggaagaatatttaattactgagcagaagtaaatactgttggcattttgtacataatctaatttttatatgcatgttcatgctttttaatttttttatcaaaaattaagtcatctacctactacttgtaaccagcttgtttcataacatgttattttcctgtgtcattaaataattacttcaatgttgaaaaaaaaaaaaaaaaaaaaaaaaa

SEQ ID NO: 287493 - DNA, 1000 bp, Homo Sapiens; identical to SEQ ID NO: 116699

SEQ ID NO: 287494 - DNA, 1000 bp, Homo Sapiens; identical to SEQ ID NO: 116700

SEQ ID NO: 287495 - DNA, 1000 bp, Homo Sapiens
gactcaactgctaggtcaattagtttgtcataataaaacttggcagattctacaagtctattatgacaaaccaggaactaattctataatggaaaactatccattctgaataataggtatgtaattatttgctgctgctgctgtgctctgtaaattctgaatatgacatttaaactctgtgcctactaaaggtatcttctggagtttttgggaggagagaaactggaaaattaaattgtatttttgccagaagactcttacttgcatgtgtctcagggtcttcagtttttctataagtttccatatccaaagttcagaattcatgtgaaatacttctttggggcaaaagtccttcattcctggtatttattggattggaaatctgtagcaagatgctgtttaaaattaccatattgtttttttatcttatacttagctctctggctattgaacttccttttcttgtttgaagttagcttcaaatttgctcctatgctaaattacctgtaaatattctggataggaactacttgaaatagtaatttgttaaaagatatgacaaaatgaaaatgcttaaactacagaaatttaaaaatgccataacaatcttgcgagactaactttaaaatatactttaaatgattattatgattttggtggtaacgatcccccacacacaaccactatgaagaaataatgccgcatttttcccccattgtaccaaaaagataaaaaaatggtaaacactgatcaaggtattttgtattgtcaaggcatgcatattctaaagaattaaatgctaacttaacagcactggctttctggctggtcaactatatgaaaccttgttcattcctccgagtactgtaatgttcacacttgtacaatcttccctgtcatgactttaagttctacttttcattaaccatggcctgatattagttcttagagcttcttgtggcaaaaataaaatgatttaattctaaaaaaaaaaaaaaaa

SEQ ID NO: 287496 - DNA, 1000 bp, Homo Sapiens
ctcacatttctctagaccctcagacttcccaccccaagctcctcttgtccgaggaccaccagcgagctcagttctcctcaaaatggcagaactcaccagacaacccccagcgttttgaccgggccacctgtgttctggcccacactggcatcacaggggggagacacacgtgggtggtgagtatagacctggcccatggggcgagctgcaccgtgggcgtggtgagcgaggatgtgcagcggaagggggagcttcggctgcggccagaggagggggtgtgggctgtgaggctggcttggggcttcgtctcggctctgggctccttccccacacggctgaccctgaaggagcagccccggcaggtgagggtgtctcttgactatgaggtgggctgggtgaccttcaccaacgctgtcacccgagagcccatctacaccttcactgcctccttcactaggaaggtcattcccttctttgggctctggggccgagggtccagtttctccctgagctcctgagaaggagcagttacctactctcctctaagtacaggactcattcaacccagtaccatgtggcttgatccctggctgaatcacctggatgactcgggatagaaatgactgctttagaagatgggatggggtcgggtggtaagggatagaagagaggactctcaatctactgatcaagtcctttccccaatgcccagtggatggccagggtacctggggactcaggctgctgccagttctgctcaccaccatccgtgcttggcacagaagtagctgcatagaaagagcactggatttgaagtcagaagacctggttcttgaaccagcctgtcaaccagttgtatgactttaaacaaggcatctcacctcttttcatcttgttttcttccaataatgttagagttcatgtaatcacattctctagaaccatttagtttgtgttaactatgaaccaagcagtgtggtgggccactggtggacttgga

SEQ ID NO: 287497 - DNA, 1000 bp, Homo Sapiens
cgtggacctggggccttccatcctggatgatgtcctgcagatcatggatcaggacctggacagcatgcagatccccacataggacacgaggctgcctaggctggggtcccaggtggggcccagccaggaggtggggtgtggacccggccctggcggcggagtcagggtcccaagatcccacctgtatggtcgctggccagtgattctccttctgagccgtgtttcccctctccctccctctccacgtgggcagggcaggccccatcgctttcctctgataaccacatggacacatcctgaagtcagcccaggcgccctgagcatcttggggcacctggaccccatcacaatactccttcttccttcaggtccctgggtgaaggctttgctgaaaccgaccccccttttcacgtcccttctgcctctgccccgttggatgccctgactgggggcaggggaagagacagggcacagctggccacagggctcagccactgagcaggctgttccgggcctttggctttgcatcctggacggggagtgtcctgtcagggaccagatgtgtcctgcctcatccctagctccaatcccttccccacgtgaccggggattctggttgcaataaaacatgctgctgctggtggcggagctccctgtccctttgccccaggtttcctcccggaggcagacagtctcccagagctgagggcttgcctctggagaccccagccccagagggctttgtggaggacaggccttgccctcaagaacgtcgtacctgacgctgagcctgtcatgagaatgcaacaggagcaaaccaagtgttgctgtgacattgattcagatgtttggcaagaggtggctgagcactggggtgggcttggcactgtgccaagcctggggccaatccctgcccagtcagctggggtctggtgggggacacccaagaataaaagaataaccacaaagtgtgcaagggaaaaaaaaaaaaaaaaaaaaa

SEQ ID NO: 287498 - DNA, 1000 bp, Homo Sapiens
agcccaagtaacgaagagtgggttggttgtactgaaaggacaggaagcccaggtagagaagagtgagatgggtgtgccaagaagacaggaatcccaagtaaagaagagtcagtctggtgtctcaaagggacaggaagcccaggtaaagaagagggagtcagttgtactgaaaggacaggaagcccaggtagagaagagtgagttgaaggtaccaaaaggacaagaaggccaagtagagaagactgaggcagatgtgccaaaggaacaagaggtccaagaaaagaagagtgaggcaggtgtactgaaaggaccagaatcccaagtaaagaacactgaggtgagtgtaccagaaacactggaatcccaagtaaagaagagtgagtcaggtgtactaaaaggacaggaagcccaagaaaagaaggagagttttgaggataaaggaaataatgataaagaaaaggagagagatgcagagaaagatccaaataaaaaagaaaaaggtgacaaaaacacaaaaggtgacaaaggaaaggacaaagttaaaggaaagagagaatcagaaatcaatggtgaaaaatcaaaaggctcgaaaagggcgaaggcaaatacaggaaggaagtacaacaaaaaagtggaagagtaaggataaattttttaaaggcccataagacaagtgattattatgattcccatactccagatacaaaccatatcccagccattgcctaaacagattacaattataaaatccctttcatcttcatatcacagtttctgctcttcagaagtttcaccctttttaatctctcagccacaaacctcagtttccaaatatttgtttcataagttaagacgtatatgattccgtcaagaaagactggatactttctgaagtaaaacattttaattaaaaaaaaaaaaaaaaaaaaaaaaaaaaaaaaaaaaaaaaaaaaaaaaaaaaaaaaaaaaaaaaaaaaaaaaaaaaaaaaaaaaaaaaaaa

SEQ ID NO: 287499 - DNA, 1000 bp, Homo Sapiens
agagaagaccgtgtttaccatttttatgatttctgcgtctgtgatttgcatgctgcttaacgtggcagagttgtgctacctgctgctgaaagtgtgttttaggagatcaaagagagcacagacgcaaaaaaatcaccccaatcatgccctaaaggagagtaagcagaatgaaatgaatgagctgatttcagatagtggtcaaaatgcaatcacaggtttcccaagctaaacatttcaaggtaaaatgtagctgcgtcataaggagacttctgtcttctccagaaggcaataccaacctgaaagttccttctgtagcctgaagagtttgtaaatgactttcataataaatagacacttgagttaactttttgtaggatacttgctccattcatacacaacgtaatcaaatatgtggtccatctctgaaaacaagagactgcttgacaaaggagcattgcagtcactttgacaggttccttttaagtggactctctgacaaagtgggtactttctgaaaatttatataactgttgttgataaggaacatttatccaggaattgatacttttattaggaaaagatatttttataggcttggatgtttttagttctgactttgaatttatataaagtatttttataatgactggtcttccttacctggaaaaacatgcgatgttagttttagaattacaccacaagtatctaaatttggaacttacaaagggtctatcttgtaaatattgttttgcattgtctgttggcaaatttgtgaactgtcatgatacgcttaaggtggaaagtgttcattgcacaatatatttttactgctttctgaatgtagacggaacagtgtggaagcagaaggcttttttaactcatccgtttgccaatcattgcaaacaactgaaatgtggatgtgattgcctcaataaagctcgtccccattgcttaagccttcaaaaaaaaaaaaaaaaaaaaaaaaaaaaaaaaaaaaaaa

SEQ ID NO: 287500 - DNA, 1000 bp, Homo Sapiens; identical to SEQ ID NO: 221931

SEQ ID NO: 287501 - DNA, 1000 bp, Homo Sapiens; identical to SEQ ID NO: 116701

SEQ ID NO: 287502 - DNA, 1000 bp, Homo Sapiens
ttgtcacaggagaacggctgcctgccaacttctttaaattccagttccggaatgtggagtacagttccgggaggaacaagaccttcctctgctatgtggttgaagcacagggcaaggggggccaagtgcaggcatctcggggatacctagaggatgagcatgcggctgcccatgcagaggaagctttcttcaacaccatcctgccagccttcgacccagccctgcggtacaatgtcacctggtatgtgtcctccagcccctgtgcagcgtgtgctgaccgcattatcaaaacccttagcaagaccaagaacctgcgtctgctcattctggtgggtcgactcttcatgtgggaggagccggagatccaggctgctctgaagaagctgaaggaggctggctgtaaactgcgcatcatgaagccccaggacttcgaatatgtctggcagaattttgtggagcaagaagagggtgaatccaaggcctttcagccctgggaggacattcaggagaacttcctatactacgaggagaagttggcagacatcctgaagtagggcaactgggctttgcctcacgtattcctgctgccaccaagagacagcaatgacatgtacagccatctgggacatgcctgtcttcctaataccatttggagctggacaacatttgacaccaaccaatcatactggacaaggcccttagaggacttgaaatatacttctcatgctgtagtttatttaggctgtgactctctctctaatgctgctctcgggaaggacgaaagtgacctgcaaggagagaaatgcaaccatacatgggctccagtcaactatgggactgaaggtcctaattgctcacccaagggggctgcttaacacaaacagcctcagacccgaggtttagatttctgaaatatgcattttatgttaagttgggtatttttttaaaaaaagaaaaacagcaacattaataaaagaagtggtgtgtttttaaaaaaaaa

SEQ ID NO: 287503 - DNA, 1000 bp, Homo Sapiens
aagaatacttcaacgtaatgttgggtacccagctactctataaatttgagagaccacagtatgctgaaattcttgcagatcatcccgatgcacccatgtcccaggtgtatggagcgccacatctcctgagattatttgtacgaattggagcaatgttggcttatacacctctggatgagaagagccttgctttattactcaattatcttcacgatttcctaaagtacctggcaaagaattctgcaactttgttcagtgccagcgattatgaagtggctcctcctgagtaccatcggaaagctgtgtgagaggcactctcactcacttatgtttggatctccgtaaacacatttttgttcttagtctatctcttgtacaaacgatgtgctttgaagatgttagtgtataacaattgatgtttgttttctgtttgattttaaacagagaaaaaataaaagggggtaatagctccttttttcttctttctttttttttttcatttcaaaattgctgccagtgttttcaatgatggacaacagagggatatgctgtagagtgttttattgcctagttgacaaagctgcttttgaatgctggtggttctattcctttgacactacgcacttttataatacatgttaatgctatatgacaaaatgctctgattcctagtgccaaaggttcaattcagtgtatataactgaacacactcatccatttgtgcttttgtttttttttatggtgcttaaagtaaagagcccatcctttgcaagtcatccatgttgttacttaggcattttatcttggctcaaattgttgaagaatggtggcttgtttcatggtttttgtatttgtgtctaatgcacgttttaacatgatagacgcaatgcattgtgtagctagttttctggaaaagtcaatcttttaggaattgtttttcagatcttcaataaattttttctttaaatttcaaaaaaaaaaaaaaaaaaaaaaaaaaaaa

SEQ ID NO: 287504 - DNA, 1000 bp, Homo Sapiens; identical to SEQ ID NO: 116702

SEQ ID NO: 287505 - DNA, 1000 bp, Homo Sapiens
caaagagcagctcttggataggatgtgtatgactttaggtggtcgagcctctgaagaaatcttctttggaagaattacaactggtgctcaagatgacttgagaaaagtaactcagagtgcatatgcccaaattgttcagtttggcatgaatgaaaaggttgggcaaatctcctttgacctcccacgtcagggggacatggtattggagaaaccttacagtgaagccactgcaagattgatagatgatgaagtacgaatacttattaatgatgcttataaaagaacagtagctcttctcacagaaaagaaagctgacgtggagaaggttgctcttctgttgttagaaaaagaagtattagataagaatgatatggttgaacttttgggccccagaccatttgcggaaaaatctacctatgaagaatttgtggaaggcactggcagcttggatgaggacacctcacttccagaaggccttaaggactggaacaaggagcgggaaaaggagaaagaggagcccccgggtgagaaagttgccaactagaggcccagagggaggccatctcagtctctccactgtggtttcagctggtgcattatttcagctgtggctttcagaagaatgggaatgctgcgctgattttagccagccactggcccagctgaaatgatggggaaaggagtccttagtcctttcagcctcagaggtcacagtgggtggcaggtgactttccggaggccttgagggaaatgcacactgtcccatagcctcattgggctcccagacgtgctggaaaggttgagcccagagtggccgaggctggaccctgtggcaccaagtggggtcggctgaccgtgtggcagggatcgttgcactggactcttggcgtgtgggaagggatgctttctctttgtcgcccactcttcattcctgtttctcctcagttcccctgtgcagatgggctgtgaaattaaattggagtcttgataagaacatttt

SEQ ID NO: 287506 - DNA, 1000 bp, Homo Sapiens
gtcagtggccatcttgccgcagctgttcatggtgagcaagaccggcgaggcggagaccatcaccagccactacttgtttgcgctaggcgtttaccgcacgctctatctcttcaactggatctggcgctaccatttcgagggcttcttcgacctcatcgccattgtggcaggcctggtccagacagtcctctactgcgatttcttctacctctatatcaccaaagtcctaaaggggaagaagttgagtttgccggcatagccccggtcctctccatctctctcctcggcagcagcgggaggcagaggaaggcggcagaagatgaagagctttcccatccaggggtgacttttttaagaacccacctcttgtgctccccatcccgcctcctgccgggtttcagggggacagtggaggatccaggtcttggggagctcaggacttgggctgtttgtagttttttgccttttagacaagaaaaaaaaatctttccactctttagtttttgattctgatgactcgtttttcttctactctgtggccccaatttttataaagtgtttttgagtgtcctatgggccggggcagggtccaagatcttttcccttccccaggcccctcggctccctcccagatcccacccccagccccactggttgccaaacactaaatctgccgacacccatctgccccacctcctgccatggccatgaaccgcgacccccactaaatttctagattggggatagggagaaagggaggcccaggaaggtctcccctgattttttttcatagtaatttttttccccagagtttgaattttttggtcttctcctggttttttggcaaattaggggggcccggggctcaagtgcgggaagggggctggcccgaggatcccatggctctcacaccatgtttttgtacagaactgatggttgaatctttgttctcttgaaataaacagaagaaaatgaaacctttaaaaaaaaaaaaaaaaaa

SEQ ID NO: 287507 - DNA, 1000 bp, Homo Sapiens; identical to SEQ ID NO: 116703

SEQ ID NO: 287508 - DNA, 1000 bp, Homo Sapiens; identical to SEQ ID NO: 221935

SEQ ID NO: 287509 - DNA, 1000 bp, Homo Sapiens
gccagatcctgcagcgagtggaagacaacaccctcatctcctatgacgtgtctgcaggggctgcgggcggcgtggtctccccaagggacttcgtgaatgtccggcgcattgagcggcgcagggaccgatacttgtcatcagggatcgccacctcacacagtgccaagcccccgacgcacaaatatgtccggggagagaatggccctgggggcttcatcgtgctcaagtcggccagtaacccccgtgtttgcacctttgtctggattcttaatacagatctcaagggccgcctgccccggtacctcatccaccagagcctcgcggccaccatgtttgaatttgcctttcacctgcgacagcgcatcagcgagctgggggcccgggcgtgactgtgccccctcccaccctgcgggccagggtcctgtcgccaccacttccagagccagaaagggtgccagttgggctcgcactgcccacatgggacctggccccaggctgtcaccctccaccgagccacgcagtgcctggagttgactgactgagcaggctgtggggtggagcactggactccggggccccactggctggaggaagtggggtctggcctgttgatgtttacatggcgccctgcctcctggaggaccagattgctctgccccaccttgccagggcagggtctgggctgggcacctgacttggctggggaggaccagggccctgggcagggcagggcagcctgtcacccgtgtgaagatgaaggggctcttcatctgcctgcgctctcgtcggtttttttaggattattgaaagagtctgggacccttgttggggagtgggtggcaggtgggggtgggctgctggccatgaatctctgcctctcccaggctgtccccctcctcccagggcctcctgggggacctttgtattaagccaattaaaaacatgaatttaaaaaaaaaaaaaaaaaaaaaaaaaaaaaaaaaaaaaaaaaaaaaaaaaa

SEQ ID NO: 287510 - DNA, 1000 bp, Homo Sapiens
taagcgaattgtttatcatcttgacatggttggtcatttctatgacaatttacttcaaactgtgtactgtgtagttctatatagtttgtgttaagcatgtcattcatataaactgtttaaaatttttcagatggcctagtttcatccctcttactggtttgtctgtaatgaatggttaaaaataagggttatattttaccctcaaatgcgtttttgtactttcagagcaggtttaaacgttttttttttttttttcctatatccgaactgttggcctcatggaaatccctttcccgatctttgtagcaccatctactggcagaatggcagagtagctgcgaaacaatttgtttaaaaacttgcttaagacaattgcatcagatttggaagttttgccatcaaaattctttgcagaattggaagttaacacatttgcttgtaactgagatgggcttcacaggaatgtagttgccagttcatatcacaatagccctttctatatgaggtttgaaaatgtaaactgctatgcatagcttgggcaatagccctaaattgctatgacaactaatgaaccagctacgtatactggtattttaggtgcaagttgtaaagcaaaatatctgtgtattctgcttggttaacaaatgtatatttgtagccctttcctgcaatagcattcaagttgttgtttataagagaagaacaaaagtgataataggtgaaaattgcctttctggatagaaatagagaatagcaacgtttatggatatcacaaataaagaattcaattctttacatgattgagtgagagtatgtataacctggtgggtgggttcagagtaccttttaatctagtatgcttaacttgatgttaatatttaacttaaatatttgacttacatgttgacgttgaaggctcaaagctatactaagaagctttctgaaagattgggctttaaaataaaataatattttaatattgaaaaaaaaaaaaaaaaaa

SEQ ID NO: 287511 - DNA, 1000 bp, Homo Sapiens; identical to SEQ ID NO: 116704

SEQ ID NO: 287512 - DNA, 1000 bp, Homo Sapiens
gtacacttaaaaaccctcctcaaagttcaaacttagatttcagatttcagtatgtgtgtaaaacataatttttcccatatccctggactcttgagaaaattggtacagaaatggaaatttgccttgttgcaacatacaattgcaaaagatgagtttaaaaaattacatacaaacagcttgtattatattttatattttgtaaatactgtataccatgtattatgtgtatattgttcatacttgagaggtatattatagttttgttatgaaagtatgtattttgccctgcccacattgcaggtgttttgtatatatacaatggataaattttaagtgtgtgctaaggcacatggaagaccgattttatttgcacaaggtactgagatttttttcaagaaacagctgtcaaatctcaaggtgaagatctaaatgtgaacagtttactaatgcactactgaagtttaaatctgtggcacaatcaatgtaagcatggggtttgtttctctaaattgatttgtaatctgaaattactgaacaactcctattcccatttttgctaaactcaatttctggttttggtatatatccattccagcttaatgcctctaattttaatgccaacaaaattggttgtaatcaaattttaaaataataataatttggcccccccttttaaaatagtcttgactctttgtgtgtgactgtttctcatgtttgaatgtgtgactaggagatgattttgtgtggttggatttttttgacttctactttactggctgagtgtgagccgccatgcctggccataatctacattttcttaccaggagcagcattgaggtttttgagcatagtacttgactactctagaggctgagacgggagcatctcttgagcctgagaagtggagattgcaattgagctaggatcaggccactgcactccagcctgggtaacagacgctgtctcaaaaaaaaggccaagagaaagtaagggagacaga

SEQ ID NO: 287513 - DNA, 1000 bp, Homo Sapiens; identical to SEQ ID NO: 116706

SEQ ID NO: 287514 - DNA, 1000 bp, Homo Sapiens
tccttatgagaaacagcagtatgaatcttgacggtttctgcccgtcctaatggcagagctctctgacttgggtgtatgctgccaggctgggtactttcatactttgttttcttgttttgctttaaaactacgactcagcatacattttcccacatacatttttacattgtaccttaggactcagtcatctccacttaaattgatgacacaagcagctaataaccatttctgggtttctgcctaaccccctaattgtctgttaaagccaattctctgggtgtcccagtgagtggtggctttttttctttccacattggcacattcacttctcccactcttggcatgtaagaaataagcatttacataattggaaaaatctggatttctgatgccaaagggttaaagcttcttggatttcatttcattgatatacagccactattttatttttgatcagtggcctttgggccactgttcagggtactgaccatcagtgtcagcattagggttttggtttttgtttcttttgggtatttcttttttggcacatgtgaatcttgttttgtgtaaaatgaaattactttctcttgttctctgatgatgggtttaaaattaaaagagcatccggttttggtatggggatgatccaggattatgttgtgactgatacatattagttacttgtgctttttttttttttttttggatctttgcaagggcaaaactacaagtaacgagttttatataattaatttaaatttgttacaggttttcatgttcaggataaaccatacttccaccttgggtgagaacacttgcaacagtttattaatgaggtgactttcaccttaggacaactgttgcatgccaagttttttgtgtgtgtgaaacacttcaaaactgatttaaaagatgtaaatttaaaattggttgtatctaatatgccccaggttcggtaaataaacaattctttttaaaaaaaaaaaaaaaaaaaaaaaaa

SEQ ID NO: 287515 - DNA, 1000 bp, Homo Sapiens; identical to SEQ ID NO: 116707

SEQ ID NO: 287516 - DNA, 1000 bp, Homo Sapiens
ggctggcctacataaaccccgacctggctttggaggagaagaacaaaggcaacgagtgttttcagaaaggggactatccccaggccatgaagcattatacagaagccatcaaaaggaacccgaaagatgccaaattatacagcaatcgagctgcctgctacaccaaactcctggagttccagctggcactcaaggactgtgaggaatgtatccagctggagccgaccttcatcaagggttatacacggaaagccgctgcgctggaagcgatgaaggactacaccaaagccatggatgtgtaccagaaggcgctagacctggactccagctgtaaggaggcggcagacggctaccagcgctgtatgatggcgcagtacaaccggcacgacagccccgaagatgtgaagcgacgagccatggccgaccctgaggtgcagcagatcatgagtgacccagccatgcgccttatcctggaacagatgcagaaggacccccaggcactcagcgaacacttaaagaatcctgtaatagcacagaagatccagaagctgatggatgtgggtctgattgcaattcggtgatgacttgttcatccccccttcccttcgccctcatgtggaaagaggagctgggaccgcggcgagcagcacggagcggaagggagagcaggggagagaaggcctcatctctctatatttatacataaccccggggaagacacagagactcgtacctgcgctgtttgtgccgccgctgcctctgggccctcccagcacacgcatggtctcttcaccgctgccctcgagttccatgtctctttcccctgcccctagttgctgtctcggctgctctcccatagttggttttttttttatttggggcagtgggcatgttatggggaggggagggggttcttccagcctcaggtcccagctgtctcacgttgtttattctgcgtccccttctccaataaaacaagccagttgggcgtggttataac

SEQ ID NO: 287517 - DNA, 1000 bp, Homo Sapiens
tgaaggacaggattcactgtgtggcttatgtcttagacatcaactctattgacaatctctactctaaaatgttggcaaaagtgaagcaagttcacaaagaagtattaaactgtggtatagcatatgtggccttgcttactaaagtggatgattgcagtgaggttcttcaagacaactttttaaacatgagtagatctatgacttctcaaagccgggtcatgaatgtccataaaatgctaggcattcctatttccaatattttgatggttggaaattatgcttcagatttggaactggaccccatgaaggatattctcatcctctctgcactgaggcagatgctgcgggctgcagatgattttttagaagatttgcctcttgaggaaactggtgcaattgagagagcgttacagccctgcatttgagataagttgccttgattctgacatttggcccagcctgtactggtgtgccgcaatgagagtcaatctctattgacagcctgcttcagattttgcttttgttcgttttgccttctgtccttggaacagtcatatctcaagttcaaaggccaaaacctgagaagcggtgggctaagataggtcctactgcaaaccacccctccatatttccgtaccatttacaattcagtttctgtgacatctttttaaaccactggaggaaaaatgagatattctctaatttattcttctataacactctatatagagctatgtgagtactaatcacattgaataatagttataaaattattgtatagacatctgcttcttaaacagattgtgagttctttgagaaacagcgtggattttacttatctgtgtattcacagagcttagcacagtgcctggtaatgagcaagcatacttgccattacttttccttcccactctctccaacatcacattcactttaaatttttctgtatatagaaaggaaaactagcctgggcaacatgatgaaaccccatctccactgc

SEQ ID NO: 287518 - DNA, 1000 bp, Homo Sapiens; identical to SEQ ID NO: 116711

SEQ ID NO: 287519 - DNA, 1000 bp, Homo Sapiens
tccacaagggaaagccagagagctgtgcagttactcctcgatttcccaaatcaaaagacgaaggatggtttttgatattaggagaagtggataagagagaacttattgctttgaaaagagtaggatatattcgaaatcatcatgttgcttccctttctttttatacccctgaaatacctggaaggtatatctacacattatatttcatgagtgactgctaccttggcctggaccagcagtatgacatctatctcaacgttacacaagcgagtctttctgcacaggtcaacaccaaggtctctgattccctgactgacctggcattaaagtaacttgacctgaacaatccatttgaaaggagtggctaagaattctctctgttcagtcatctagacaaatcgaattacttgatgtttgccttgaaagaatcaacttctaacctcaaccatccaggaaattgacagtggctgcagtattgactccagtgacataaagttaaccacagtggccttttaacaaatgttgccttttataatgttatctttatgagtttcttgatatgtaagatgaaaaagcatttagaataatcttttaatttgtgtatatttgggatgatatttaggagctatcaatcaaattttacatctcacaatgtactgtttacatggatattggctgctttttttaaggaaaaccacattgagatgtgacaagtgttaggacttgtcacagatttctaactctgccgcataaactataaatctgtaaggtggtacacagcgtgtcttgttagcaaaatttatactttgatatgatcacatgtagaagtagcttcaagaatttcttgtagtcataaatgtttaataatatatgatgtaaaattatattatggagcctaatgatgataacaaagaaaacaatatactgatcttagaaaatgtagacatggttaactgggaaataaaatatagagtggcacttcaaaaaaaaaaaaaaaaag

SEQ ID NO: 287520 - DNA, 1000 bp, Homo Sapiens; identical to SEQ ID NO: 116713

SEQ ID NO: 287521 - DNA, 1000 bp, Homo Sapiens; identical to SEQ ID NO: 116714

SEQ ID NO: 287522 - DNA, 1000 bp, Homo Sapiens; identical to SEQ ID NO: 116716

SEQ ID NO: 287523 - DNA, 1000 bp, Homo Sapiens
tccagcgacatcaggctggtggctgagaagatgatctggtgggcaaataaggacccactgcctcccctggacccccaggccatcaagcccatcctgaaggctcttcttgacaacaccaaggataagaacaccgtggtcagggcctacagcgaccaggcaattgtcaacctcctcaagatgcggcagggtgaagaggtgtttcagtccctctccaagatcctggatgtggccagtttggaggtgctgaacgaggttaaccgaaggtccctgaagaagctggccagccaggccgactccacggagcaggtggacgacaccatcctgacatgagaggcctgggccagcagcagcattgccgctccacatctttgctcaatgttttcatttttgaaaatacatttgttccaatggggagcttggaagatggcgttcccagaaagtattttaatatcaatagaccacagccaaagccttaaatcaaacccacacacaactgaaaattgcctcctccatctctcaccttttcctgtggagaagagaaggaaaagcacacgcatgcgcctcagcaaatggcagcccaggagctgtttgtccagtttagcatggctaggtctggaactataatagcagggtcagactgtgggttcctcttctcctgtgcttgagctctggtttgagagctggcgctaccaacctttttcctatatcccgagtggggcacagacggtggatctctgcccagtgtggtgtgtctggcttggcttttcaatattgtgaggtctgaatggatctgacccctgtcagatgaaaatgattcacagctctggcagttcccaagtctggggaggggtataggtttgaaaggctgtttgaaagaggaatgtttaataaaggctttgatttaatcttgatataaacagatttttaaaaatctccacccattaaacatgaagcttcctgcatcaggaaaaaaaaaaaaaaaaaaaaaaaaaaaaaaaaa

SEQ ID NO: 287524 - DNA, 1000 bp, Homo Sapiens
gaattgatgttcgtctgtgtgatgttggtgaggccatccaagaagttatggagtcctatgaagttgaaatagatgggaagacatatcaagtgaaaccaatccgtaatctaaatggacattcaattgggcaatatagaatacatgctggaaaaacagtgccgattgtgaaaggaggggaggcaacaagaatggaggaaggagaagtatatgcaattgaaacctttggtagtacaggaaaaggtgttgttcatgatgatatggaatgttcacattacatgaaaaattttgatgttggacatgtgccaataaggcttccaagaacaaaacacttgttaaatgtcatcaatgaaaactttggaacccttgccttctgccgcagatggctggatcgcttgggagaaagtaaatacttgatggctctgaagaatctgtgtgacttgggcattgtagatccatatccaccattatgtgacattaaaggatcatatacagcgcaatttgaacataccatcctgttgcgtccaacatgtaaagaagttgtcagcagaggagatgactattaaacttagtccaaagccacctcaacacctttattttctgagctttgttggaaaacatgataccagaattaatttgccacatgttgtctgttttaacagtggacccatgtaatacttttatccatgtttaaaaagaaggaatttggacaaaggcaaaccgtctaatgtaattaaccaacgaaaaagctttccggacttttaaatgctaactgtttttccccttcctgtctaggaaaatgctataaagctcaaattagttaggaatgacttatacgttttgttttgaatacctaagagatactttttggatatttatattgccatattcttacttgaatgctttgaatgactacatccagttctgcacctataccctctggtgttgctttttaaccttcctggaatccatttctaaaaaataaagacattttcagatctga

SEQ ID NO: 287525 - DNA, 1000 bp, Homo Sapiens
agatagacactttctttttgaccaaggagggggcagcccatcccccgctgtgtctaaagtcaaagtaccagtcttatagacaccaggctgaattctccatgagtcctgtgacctcagcccagggtggaacctaccgatgctacagcgcaatcaggtcctacccctacctgctgtccagccctagttacccccaggagctcgtggtctcaggaccctctggggatcccagcctctcacctacaggctccacccccacacctggccctgaggaccagcccctcacccccacggggttggatccccagagtggtctgggaaggcacctgggggttgtgactggggtctcagtggccttcgtcctgctgctgttcctcctcctcttcctcctcctccgacatcggcatcagagcaaacacaggacatcggcccatttctaccgtcctgcaggggctgcggggccagagcccaaggaccagggcctgcagaagagggccagcccagttgctgacatccaggaggaaattctcaatgctgccgtgaaggacacacagcccaaggacggggtggagatggatgctcgggctgctgcatctgaagccccccaggatgtgacctacgcccagctacacagcttgaccctcagacgggaggcaactgagcctcctccatcccaggaaagggaacctccagctgaacccagcatctacgcccccctggccatccactagcccacgggggacccagatctcatactcaacagaaggagactcagagactccagaaggcacaggagctgcccccagtggacaccaatgaaccccagccagcctggacccctaacaaagaccaccaggacatcctgggaactctgggactcactagattctgcagtcaaagatgactaatatccttgcatttttgaaatgaagccacagacttctcaataaatcaatgagctgagaaaactgaaacaaaaaaaaaaaaaaaaaaaaaaaaaaaa

SEQ ID NO: 287526 - DNA, 1000 bp, Homo Sapiens
ggcttcttgctgatgaccatgagcttgagcttcatcatcattgactgggcctcagggaccagccggcatggaggaaaccactagggtgaccctcatcctgttctgtctactcaccctagcagccctgcccagactcttcagcccctgctcccatccagtggccagtcgggggaggagaaagacgcgattaacactgtggcattcagccaggccccatgtcctctctgtggaaggtttttgttcaagagccaggaccaaggcccttgggccactaccctgctaggctctggagctgtagaggcttcctgaactgggagcagggtagggctgtcgccttagatcccgcccaagcccctcattccctccttgcacagatgcatacactggggcccagcagctgcctcctgaggtgacacagcctgtaggaacatacacagctgggatcagcctgcagccatcccccgaccctgctgctaggccacggtctgcgccctggggcctcatctcccccagcccacttgttttccccccttttattccctaggcccttttcagactcctgggcccttggatactcttctcccatctcccttcacaggatgacaccctcccataccccatagctggggccagcaggttctgctgagggtggggctggtgtagggacccccaagagacccctgtcctgtcccttcaccagtcctggggaggctgggactccccctgccacaagcctgggccacagctcacattccactgctgggagaagaaacaggccgaggcccagagtggcctgcccccgggagccaaagaccccagtggccacactgggatagggtggggaggctggcagccctcttttataaatattatacataaaaaaaaaaaaaaaaaaaaaaaaaaaaaaaaaaaaaaaaaaaaaaaaaaaaaaaaaaaaaaaaaaaaaaaaaaaaaaaaaaaaaaaaaaaaaaaaaaaaaaaaaaaaaaaaaaaaaaaaaaa

SEQ ID NO: 287527 - DNA, 1000 bp, Homo Sapiens; identical to SEQ ID NO: 116718

SEQ ID NO: 287528 - DNA, 1000 bp, Homo Sapiens; identical to SEQ ID NO: 116719

SEQ ID NO: 287529 - DNA, 1000 bp, Homo Sapiens
acagtgggcccagtggagagcagttgattcaaatggaaacagaagagatggaagcctgctctaacggggcgctgattccaggcaatttatccaaggaagaggaggaactgtcttcccagatgtccagctttaacgaagccatgactcagatcagggagctggaggagaaggctatggaagagctcaaggagatcatacagcaaggaccagactggcttgagctctctgagatgaccgagcagccagactatgacctggagacctttgtgaacaaagcggaatctgctctggcccagcaagccaagcatttctcagccctgcgagatgtcatcaaggccttacgcctggccatgcagctggaagagcaggctagcagacaaataagcagcaagaaacggccccagtgacgactgcaaataaaaatctgtttggtttgacacccagcctcttccctggccctccccagagaactttgggtacctggtgggtctaggcagggtctgagctgggacaggttctggtaaatgccaagtatgggggcatctgggcccagggcagctggggagggggtcagagtgacatgggacactccttttctgttcctcagttgtcgccctcacgagaggaaggagctcttagttacccttttgtgttgcccttctttccatcaaggggaatgttctcagcatagagctttctccgcagcatcctgcctgcgtggactggctgctaatggagagctccctggggttgtcctggctctggggagagagacggagcctttagtacagctatctgctggctctaaaccttctacgcctttgggccgagcactgaatgtcttgtactttaaaaaaatgtttctgagacctctttctactttactgtctccctagagtcctagaggatccctactgttttctgttttatgtgtttatacattgtatgtaacaataaagagaaaaaataaaaaaaaaaaaaaaaaaaaaaaaaaaaaaaa

SEQ ID NO: 287530 - DNA, 1000 bp, Homo Sapiens; identical to SEQ ID NO: 221939

SEQ ID NO: 287531 - DNA, 1000 bp, Homo Sapiens; identical to SEQ ID NO: 116720

SEQ ID NO: 287532 - DNA, 1000 bp, Homo Sapiens; identical to SEQ ID NO: 221942

SEQ ID NO: 287533 - DNA, 1000 bp, Homo Sapiens
gagcctcatagatcatcccccagggtggggtttctgatgcatccacagccaaaggcctttccagatggtccgaacaatcacccctgccccatgcacgtgtatctgtctcttttaacactaacccttggcacttctaggtttggggtttctcagttccctctcttcccactaagccgtggctgttacctttttgttccttaccagcatgccacttcctgccagatagagggaggctagatttgatgacatattacccgctgacccagccccagccaccccatggactcaggactcaggtctcccatagctgcttatttacccgtttcctttttcctcttccttaattctagttaaaacattcacttacggagaatgtaaggttacctttgatgtatgaagtagcagtattttccagtttttccataagctttattccttctctctacctgccaccaaaaagaaagaaaccctcaagagttctaattctttttcatctatttgcacagctatttgggtacctcattttgtcccttgactttagtgtagtggtggggtctttcccaccaccccactaagccttggcaacctcattttgtggccttattattaaagattgcttggtagtgaaaagggaagggcccagaatctgactggctgattctgtctcctcccctccctccttctttagtttaaccatcagggcagacaggaacaaagtatttcaaagcttgttccatcaagttagggattaatcgattcctttatgttttataagagtttaccggccaaagcatattgtcatctttggtcatttttctgctcctgcttctctctcttcattggggtatcaacattaccgcccctgtctctcttcattcccctatcaacattaccgcccctgtctcttctgtaactacttcagactcagccctcctggaggctgtcatgtaggggactctcgaggttcctttgttctaccccatctctcccccccgaattc

SEQ ID NO: 287534 - DNA, 1000 bp, Homo Sapiens
agtacaggcagtacatgaatcgaaaaggtggattcaacagacctttggatttcattgcatgagaattgaagtgttgaaggatgattttttttcccctcatcttggtcagagagtggattttgtattttgtatttaacttgcattcaaaaaacaggatctcagttctcctttcttgtaaagtaagaaaatcttatttatgatatatgcagttaacttaccttgcctcaacagaagaaaggttaaatattacatttttttcttttaggaaatatcatttgtggcaggcgtcaaccccattttatttgtccttattcctgtggaagcagtatatgttttcttcctgaatgctcattaggacttcttaaaaaacatgaaagtaatttggaagtaagtttatccaataaagcagtatttctacccttttagatttgataaatatttttattactaaagaatctccccagacattttcttttttttttcacacatagatttaagtatcttgattgttagtagtctaaaaatgggaagaatgaaaaagcataactagatttttctatcttctgtggtcgcccgccccccccaaaaaaaataccatttatggttctctccgcaagtataaaagcgttacatgcaaaaaaaagatctcagagaaaacaaaagtaaaagaaaagcagaaaatcacctgttatctactcccagaaataatcaatttcaacattttggtatatgtttttccaggcttctttgggttgatcccacctatgagatcagaatatgtatgcagttctttctttaacccttttttctcctatgtactgtgaacatttaaaaagtacttttaaatattctttggaaacttagcttttagtaactacttggttgtatcataatttattaactaatgttttattggtaaacattggcttgcctcccatgacttgccattataattaaaactgtgactactaaaaaaaaaaaaaaaaaaaaaaaaaaaaaa

SEQ ID NO: 287535 - DNA, 1000 bp, Homo Sapiens
aaaaagttgctctgtcaggattagatgtgtatgcacataatgtagaaacagtcccggaattacagagtaaggttcgtgatcctcgggccaattttgatcagtccctacgtgtactgaaacatgccaagaaggttcagcctgatgttatttctaaaacatctataatgttgggtttaggcgagaatgatgagcaagtatatgcaacaatgaaagcacttcgtgaggcagatgtagactgcttgactttaggacaatatatgcagccaacaaggcgtcaccttaaggttgaagaatatattactcctgaaaaattcaaatactgggaaaaagtaggaaatgaacttggatttcattatactgcaagtggccctttggtgcgttcttcatataaagcaggtgaatttttcctgaaaaatctagtggctaaaagaaaaacaaaagacctctaaaacttcaacaagaccttcaagatcacagaaatttttaaaatttgattccagttaataacagaggtggtgccagaatgcctggactgcagtggatgtgccccacctctttgcttaaaaaaaaaaatgtcaatagccaggcatagtggctcacgcctgtaatcccagcactttaggaggccaaggcgggtggatcacctgaggtcaggagttcgagaccagcctggccaacatggtgaaatcctgtctccactaaaaacacaaaaattagtcaggcgtggtagtgggtgcctgtaatcccagctactcgggaggctaaggcaggagaatcacttgaacctgggagggggaggttgcagtgagccaagatcgctccattgccctccagcctgggtgacaagagcaaaactccatctcaaataaataaaaaggaaaaaaaagtcaataaactgtacaaatttaattacagtaattcatttggcttttagtgtatcttctttgtcccaattaaacagttgcttgctgtgatgtaatcttaaaaaaaaaaaaaaaaa

SEQ ID NO: 287536 - DNA, 1000 bp, Homo Sapiens
ccttccttgaaccctctgggtagggctgtgctgaggggctgggcggggagcacaggccgtgtccgctcgcttgcaccttttcagactgccgtgtcaggcctcgagccgggcccacctggagccctcccctgcccacccgcccccagcgcccgatatccgcccccggcccagaagggccgggctcggtcatccccagtcccgtcgcggccactgacccttgagatcagccctcccctccccaccttcccgtcccaggccagcccagggcccgaagcccacccactcgcgtctctagcagccgctcttgtcctctgggtacggctcgcgggagtgttggttaccatggtgaagctggcagccaaatgcatcctggcagacccagcagtgggcaagaccgccctggcacagatcttccgcagtgatggagcccatttccagaaaagctacaccctgacaacaggaatggatttggtggtgaagacagtgccagttcctgacacgggagacagtgtggaactcttcatttttgactctgctggcaaggagctgttttcggaaatgctggataaattgtgggagagtcccaatgtcttatgtctcgtctatgatgtgaccaatgaagaatccttcaacaactgcagcaagtggctggagaaggctcggtcacaggctccaggcatctctctcccaggtgttttagttgggaacaagacagacctggccggcagacgagcagtggactcagctgaggcccgggcatgggcgctgggccagggcctggaatgttttgaaacatccgtgaaagagatggaaaacttcgaagcccctttccactgccttgccaagcagttccaccagctgtaccgggagaaggtggaggttttccgggccctggcatgacgagctggagcagatcgtgctgcacaaccggagaagacagaattacctctgctcttttaatatataatgatggctttaaataaaattaggagaaaatgtc

SEQ ID NO: 287537 - DNA, 1000 bp, Homo Sapiens; identical to SEQ ID NO: 221943

SEQ ID NO: 287538 - DNA, 1000 bp, Homo Sapiens
tttgttgactttggagataatggagattgcccactgaaggacctcagggctctcaggagtgacttcctaagccttccatttcaagcaatagaatgtagtctggcacggattgctccctcaggtgaccagtgggaagaggaagctttggatgagtttgatagactcactcattgtgctgactggaagcctctggtagccaagatctctagctatgtccagactgggatctcaacttggccaaagatctacttatatgatactagcaatgggaagaaacttgatattgggctagaattagtacacaaaggatacgcaattgagcttcctgaagacatagaagaaaacagagctgtcccagacatgttgaaggacatggccacagaaacagatgcctctctcagcacgttgctcactgagaccaaaaagagctctggagagataacacataccctgtcctgcctcagcttatcagaagctgcttccatgtctggtgatgataaccttgaagatgactacttactcggaagtctgggcttcagtttgctcagccatctgctttgctgtatgttgcctgcaatgaactcgctgaagcatgctcagccctggaactggtgctaccagagttccgtagggaacctttactctttagaggttccctgatataaatcattcataagacttcctaccctggaaaatgagtaatgtctcattcttacctgcagtttgttactatgtataaaagtctttttctttaatatgcctttaagtcttacctgtttacagcccattctgatgggttctttgtcattctgttagtataacccagtacttttcctgctgcctggaatgccctcttctatgttacctattctgtccgttgagatgccccaacttgggccaaagccaagagatctatgtgccttctctggttttctccacatctatagcacctcaactgaaatatatggataaaaacagcctaacaaaaaaaaaaaaaaaa

SEQ ID NO: 287539 - DNA, 1000 bp, Homo Sapiens; identical to SEQ ID NO: 116721

SEQ ID NO: 287540 - DNA, 1000 bp, Homo Sapiens
caaggatgcaattaaaaagaaatttcaaggcataaaacatgaatgtcaagcaaatggaccagaagatctcaatcgggcttgtattgctgaaaagttaggtggatccttaattgtagcctttgaaggatgccctgtgtagattattcagtgccacaaattgaaagcttccatgtttaatgttatcctcttgctatataaataaagcaaatatatttaggccagggtctcactgagggggagctgtcttgtcatcttttagagtaaactattctataaacatatgcaaacagccctaaataaatctaaagtctaaagttttattgatgtgaaattaaattcttattggccaaatgcctgttttgatgagttgatttataaagatttttgttaagctcaggattttaaattacacagttcacaaacagtaaaggccatgtgaagagaattattacatctttattaacctcagcatttactttgtttcttttgcttaggaaattgctcataatctggttataattttggtccaaattctttattcttccttgagctaagcagaataatggaatataatatgtcttcataatataacaacactaatacactaatagtaagattaagttaggcagtcttctaccaaatgtgtaatggagattgcctcaaaattgtgtccacataatccacgctcatcttgcaaagcgctatttcaggcacatcattggaatacaggaagtagccctgcacctgccagtgagctcgccattcactgattggaagagtgacctggcatcttggaaatcattgtgtgtcttcaggagaatgtgcagtgtcttgtaacaactaattataatgcaaattagggctacattgtaatctgctttgttaatgaaaatgataaaacagaatattgacaagctaggacacctgtggtatctttaattgtatctccttcagaagtttgcttcttatggtataataaagtatggaagaatattgagta

SEQ ID NO: 287541 - DNA, 1000 bp, Homo Sapiens; identical to SEQ ID NO: 221945

SEQ ID NO: 287542 - DNA, 1000 bp, Homo Sapiens; identical to SEQ ID NO: 221946

SEQ ID NO: 287543 - DNA, 1000 bp, Homo Sapiens
taccctaagcctggcctggcctggcctggcccccaatggtcagaagagccatcccatggccatgtcacagggatagatggacatttgttgacttggttttacaggtcattaccagtcattaaagtccagtattactaaggtaagggattgaggatcaggggttagaagacataaaccaagtctgcccagttcccttcccaatcctacaaaggagccttcctcccagaacctgtggtccctgattctggagggggaacttcttgcttctcattttgctaaggaagtttattttggtgaagttgttcccattctgagccccgggactcttattctgatgatgtgtcaccccacattggcacctcctactaccaccacacaaacttagttcatatgctcttacttgggcaagggtgctttccttccaataccccagtagcttttattttagtaaagggaccctttcccctagcctagggtcccatattgggtcaagctgcttacctgcctcagcccaggattctttattctgggggaggtaatgccctgttgttaccccaaggcttcttttttttttttttttgggtgaggggaccctactctgttatcccaagtgctcttattctggtgagaagaaccttacttccataatttgggaaggaatggaagatggacaccaccggacaccaccagacactaggatgggatggatggttttttgggggatgggctaggggaaataaggcttgctgtttgttctcctggggcgctccctccaacttttgcagattcttgcaacctcctcctgagccgggattgtccaattactaaaatgtaaataatcacgtattgtggggaggggagttccaagtgtgccctcctctcttctcctgcctggattatttaaaaagccatgtgtggaaacccactatttaataaaagtaatagaatcagaaaaaaaaaaaaaaaaaaaaaaaaaaaaaaaaaaaaaaaaaaaaaaaaa

SEQ ID NO: 287544 - DNA, 1000 bp, Homo Sapiens; identical to SEQ ID NO: 221947

SEQ ID NO: 287545 - DNA, 1000 bp, Homo Sapiens
ccgcgagagtggcagaagggatttatgaatgcaaagagaagcgcgaggacgtgaagtcggaggacgaggacgggcagaccaagctgaaacagaggcgcagccgcaccaacttcacgctggagcagctgaacgagctcgagcgactttttgacgagacccattaccccgacgccttcatgcgcgaggagctcagccagcgcctggggctttccgaggcgcgcgtgcaggtttggttccagaaccggagagccaagtgccgcaaacaagagaatcagatgcataaaggcgtcatcttgggcacagccaaccacctagacgcctgccgagtggcaccctacgtcaacatgggagccttacggatgcctttccaacagatggagttttgctcttgtcgcccaggctggagtataatggcatgatctcgactcactgcaacctccgcctcccgagttcaagcgattctcctgcctcagcctcccgagtagctgggattacaggtgcccaccaccatgtcaagataatgtttgtattttcagtagagatggggtttgaccatgttggccaggctggtctcgaactcctgacctcaggtgatccacccgccttagcctcccaaagtgctgggatgacaggcgtgagcccctgcgcccggcctttgtaactttatttttaatttttttttttttttaagaaagacagagtcttgctctgtcacccaggctggagcacactggtgcgatcatagctcactgcagcctcaaactcctgggctcaagcaatcctcccacctcagcctcctgagtagctgggactacaggcacccaccaccacacccagctaatttttttgatttttactagagacgggatcttgctttgctgctgaggctggtcttgagctcctgagctccaaagatcctctcacctccacctcccaaagtgttagaattacaagcatgaaccactgcccgtggtctccaaaaaaaggactgttacgtgga

SEQ ID NO: 287546 - DNA, 1000 bp, Homo Sapiens; identical to SEQ ID NO: 221948

SEQ ID NO: 287547 - DNA, 1000 bp, Homo Sapiens
ccagcgcgaccctccccgccggggccgccgcacctccctcgccgcccttcagcttccagctgccgcgccgcctgtccgactcgcccgtgttcgacgcgccccccagccccccggactcgctgtcggaccgcgacagctacctaagcggctccctgagctccggcagcctcagcggctctgagtctcccagcctcgaccctggccgccgcctgccaatcttcagccgcctctccatctccgacgactgaggcaagagggcgccagtgaggaggaagggaaggcggttcagagatgttggaggacacccctcgccatctcgcccttgctgggggcacgggagtggggggggtgacatgggccctaggcagactgcaagcccgaccgagcacttggactcgaactctgtgccgggaggggcccccacccctcctttttcggtttcctcttgtctttttttttttatttttattacgaagtttcattctttttgagcaaaaaagtcgaactttttctgttgaacaaaatattcacaacagggcagttgtgatacgaatagaacaaaaaaaaaaaaaaaacacttaaactttgttaggactccgatgagtttgggacttcaggaaaaatcaacccagcaccagcagctaccaaccaccattccatctcttcacttgaacagcattagttaagtccagatgtgggaacccttctcttggaagaagttcctaattgtgtctcagaccggtgtaaacaaaccagccagccgccaccttgctaaacctataagctttttaaaatccaatatattctgccaagaatatgccttgatagttagccctcagcccataggtgttttttgttttttaacagaattatatatgtctgggggtgaaaaaacccttgcattccaaaggtccatactggttacttggtttcattgccaccacttagtggatgttcagtttagaaccattttgtctgctccctctggaagccttgcgca

SEQ ID NO: 287548 - DNA, 1000 bp, Homo Sapiens; identical to SEQ ID NO: 116723

SEQ ID NO: 287549 - DNA, 1000 bp, Homo Sapiens; identical to SEQ ID NO: 116724

SEQ ID NO: 287550 - DNA, 1000 bp, Homo Sapiens
ctttgcaacagggtatagttttgcctaccccttccttgatgagtctatcatcaaaagcagaaacaatgagatcattttatttaaaggagtatttcctcctctacttgagaagtcaaccatagcagtgattggctttgtccagtcccttggggctgccattcccacagttgacctccagtcccgctgggcagcacaagtaataaagggaacttgtactttgccttctatggaagacatgatgaatgatattaatgagaaaatggagaaaaagcgcaaatggtttggcaaaagcgagaccatacagacagattacattgtttatatggatgaactctcctccttcattggggcaaagcccaacatcccatggctgtttctcacagatcccaaattggccatggaagtttattttggcccttgtagtccctaccagtttaggctggtgggcccagggcagtggccaggagccagaaatgccatactgacccagtgggaccggtcgttgaaacccatgcagacacgagtggtcgggagacttcagaagccttgcttctttttccattggctgaagctctttgcaattcctattctgttaatcgctgttttccttgtgttgacctaatcatcattttctctaggatttctgaaagttactgacaatacccagacaggggctttgctatttaaaaattaaaattttcacaccacctgcttttctattcagcatcttttgcagtactctgtagacattagtcagtaatacagtgttatttctaggctctgaaatagccactttaagaatcatgtcatgatcttaagagagcactaatcatttctgtttgagttccactaacacttcaaaatcagaactatgttctttatatctaacttaaatcatttcctgaaacattttgacatgattcctttttccttttaaacaatgtatgaaagatgtattttaaatctaaataaagagcaaattaagcagaataattataaa

SEQ ID NO: 287551 - DNA, 1000 bp, Homo Sapiens; identical to SEQ ID NO: 221950

SEQ ID NO: 287552 - DNA, 1000 bp, Homo Sapiens
cttccagcaagttgcgaaagcaacttaaaaagcagcaagactctttagatgtcgtggactcttcggtctcctctttatgtctgtctaacacggcatcatctcatgggaccagaaaactatttcagatttattccaaatctccattctaccgagctgcctcaggtaatgaggccctgggaatggaaggaccattgggccagaccaaattcctggaagacaagcctcagttcatcagcagaggaaccttcaacccggaaaagggcaaacaaaaattaaagaatgtgaaaaactcacctcagaaaaccaaagagaccccagaggggacagtcatgtctggccgcagaaaaactgtggacccagactgcacctccaaccaacagctagcactctttggaaataatgaatttatggtctgaaccggcagatgtgtgtccctccgtggctacagagtggtaaacaaatctcacctttggggctgcgtttcatcacctcgtccacaatagtcaatcctaattgtggtcctgcctcttttctaagcatatggctaagactgtatgtgctgaattcctgggcctcctgcagaagcagaaagcctgctggggatggtgccagctgtgccttggctgttgtatttgaattgagatttttactatacaaagccacctagggcctggggatttgggtcagttgtagttgcctctcccccaccctcttttcccttcccaaaggtgggtgttgaactaggggggatattgctgtcctgagggaccctctcatttctgacatttgaagaaaacgtataaatctttcttaaccgtgaaagcaaaagcctttgggtttattttgggatagttaggagctagggtagaatataatttttttccaaaaacttacttacaaacaaaaagcctaatccctctattttaagatttctgaaaaaacactccatgttatattctggggaaagcaaaaacaaaaaaaaaaaaaaaaaaaaaaaaaa

SEQ ID NO: 287553 - DNA, 1000 bp, Homo Sapiens
attgattccttcttcttttagcccactattaaaacatttcttactgaatggttcatgtaggcttgctgaacagcacgcattacttgcttcctgaagagttcccccattcatccatttgtcccattagttgctgtggattatcaagttttgaaggaactgtacatcccaacagactgaaacattctaagtgaaatgagtataatccaagtaactggtgaactttggaggtttggagcttgaagagaatggctaagaagatttgaattatagggagggaacagaaatcatacatgaaaaggttttactgagaaggggaaaaccttagatagagggacatgtgaaacaaaatcatttgaaattttgattcagacatccatttccagtggcaaacagcaaagcctgaacccataaacccaaatgataggtgaagttgggtggttttatccaatgtctcaagcaagcaatgtctgggaatatcatagagtaacaagtgctggtcagccaaagaaacattcactgctggtgaaccaataccataagcatgtattatctaagcacttgatcaagaaatatacatgttgtacaagctctcaattttgttcatttattatcaaatttttaaaatacaagtttggtatgtgatttggaaaagatgccttctggatcttaagccagttgtcagtggaggtcctcagggctgcaaatgtcaagacataaccctgttcctcaccatcatgataccagatacaggtgaatacataggaactatctgcctgtgtcctcaatctcccttcaaacaagatgctgatttgtagggtacttggcaggttaaattaaaccagaagaggtgacttaataaaaaagggaatgacatttagggtataaagatctcataagaaatgtaatatgtaaattatatcttgctttatgttgtaaaatatacattgtttgcgctagaatagaaatgatttcttttcaataaaaagaaagaaggactcta

SEQ ID NO: 287554 - DNA, 1000 bp, Homo Sapiens
cagcattccatgagctgattttcctgaaacactaaagagaaatgtcttttgtgctacagtttcgtagcatgagtttaaatcaagattatgatgagtaaatgtgtatgggttaaatcaaagataaggttatagtaacatcaaagattaggtgaggtttatagaaagatagatatccaggcttaccaaagtattaagtcaagaatataatatgtgatcagctttcaaagcatttacaagtgctgcaagttagtgaaacagctgtctccgtaaatggaggaaatgtggggaagccttggaatgcccttctggttctggcacattggaaagcacactcagaaggcttcatcaccaagattttgggagagtaaagctaagtatagttgatgtaacattgtagaagcagcataggaacaataagaacaataggtaaagctataattatggcttatatttagaaatgactgcatttgatattttaggatatttttctaggttttttcctttcattttattctcttctagttttgacattttatgatagatttgctctctagaaggaaacgtctttatttaggagggcaaaaattttggtcatagcattcacttttgctattccaatctacaactggaagatacataaaagtgctttgcattgaatttgggataacttcaaaaatcccatggttgttgttagggatagtactaagcatttcagttccaggagaataaaagaaattcctatttgaaatgaattcctcatttggaggaaaaaaagcatgcattctagcacaacaagatgaaattatggaatacaaaagtggctccttcccatgtgcagtccctgtccccccccgccagtcctccacacccaaactgtttctgattggcttttagctttttgttgtttttttttttccttctaacacttgtatttggaggctcttctgtgattttgagaagtatactcttgagtgtttaataaagtttttttccaaaagta

SEQ ID NO: 287555 - DNA, 1000 bp, Homo Sapiens
ggctctatgtttgctctgttcgtaactcagccactggcaaggaaagctccaaatccatgacagtcgaagtctctggtaagtggatcccagcatcgttggcaatagggttttaggtggagtctatctggcattcagagaagagtcaggaaaacaattgtattcccagcctgtgtcccatgggcacaagcaaatcccaaattctcctcctgaaccctccaaatttgtctaagaacttcgaaaactttaacaaacaggctgatatcttcataatattcccagcctagaccaagcaggaagaacattgatttcattgaaataattgataataatgaagataatgtttttatgatttttatttgaaaatttgctgattctttaaatggtttgttttctacattgatggaatttttctcttttaatctatctacagcttatagcagttcaataaactatacttctgggaaccgtaattgaaacatttacttttgctttctacctgactgccccagaattgggcaactattcatgagaattgatatgtttatggtaatacacatatttgcacaagtacagtaacaatctgctttctttgtaacatgacacatttgaaatcattggttatattaccaatgctttgattcggatgttatattaaaaacatagatagaatgaaccaatatgaactgcaggcaaagtctgaagtcagccttggtttggcttcctattctcaagaggtttgtgaagatttaatctcagattccttataaaaacttagagaaaagaaaattttagaagacagcctacatggtccattgctactcttgctgcacttatgtaaacaatcagaccacatttgaagaaactccacctattttgcaaacaaacttattctactgaaattatcattggtaaaagtagagatgcccatagagggaaaaattatgtggaaaataaaaactgtagtatacctaaaaaaaaaaaaaaaaaaaaaaaaaaaaaa

SEQ ID NO: 287556 - DNA, 1000 bp, Homo Sapiens
cctgcatccgcacacgggagctgcagtccatggctgaccaggagcaggtgtcaccagccgccatcaagaagaccatcctggacaaggtgaagctggactcccctgcagggaccgctctgtcgccttctggccacaccaagctgctcccccgcagcctggccccagcgggcaaggattgacacgtcctgcctgaccaccatcctgccaccaccttctcttctcttgtcactagggggactagggggtccccaaagtggcccactttctgtggctctgatcagcgcaggggccagccagggacatagccagggaggggccacatcacttcccactggaaatctctgtggtctgcaagtgcttcccagcccagaacaggggtggattccccaacctcaacctcctttcttctctgctcccaaaccatgtcaggaccaccttcctctagagctcgggagcccggagggtcttcacccactcctactccagtatcagctggcacgggctccttcctgagagcaaaggtcaaggaccccctctgtgaaggctcagcagaggtgggatcccacgccccctcccggcccctccctgccctccattcagggagaaacctctccttcccgtgtgagaagggccagagggtccaggcatcccaagtccagcgtgaagggccacagcccctcttggctgccaagcacgcagatcccatggacatttggggaaagggctccttgggctgctggtgaacttctgtggccaccacctcctgctcctgacctccctgggagggtgctatcagttctgtcctggccctttcagttttataagttggtttccagcccccagtgtcctgacttctgtctgccacatgaggagggaggccctgcctgtgtgggagggtggttactgtgggtggaatagtggaggccttcaactgattagacaaggcccgcccacatcttggagggcatctgccttactgattaaaatgtcaatgtaatct

SEQ ID NO: 287557 - DNA, 1000 bp, Homo Sapiens
cttgggcaggggtggatgaagctggataaaaacgaaagaactccttacattatgaaaaccagccaacacttcaatgacatgagtaacctggtggcctcccagataatgaactatgctgatgtcagctcccgtgccaacgccatcgagaaatgggtggcagtggcggacatctgccgatgcctgcacaactacaacggcgtgctggagatcacctcggccttaaacagaagtgccatctacaggctgaagaaaacctgggccaaggtctctaagcagacaaaagctctaatggacaaacttcaaaagactgtttcctctgaaggaagatttaaaaatcttagagaaacccttaaaaattgtaaccctcctgcagttccttatcttgggatgtacttgacagacctggcatttattgaagaaggaacaccaaactttactgaggaaggccttgtcaatttctccaaaatgagaatgatatcacacatcatcagagagatacgccagttccagcagacttcctacagaatagatcatcagccaaaggtcgcacagtacttgcttgacaaagaccttatcatagatgaagatacgctatatgagctgtcactaaaaattgaacctcgactccctgcttgaagatctggccttgcccctgagtccacgggatgttcatggaaagcaggacagacagaattgtgtatgccttgcctatcacggtacagcacgaagccaggctcctttctccaccaaagaagatggaaccagactggaattctgtctccagagagaaacccagctgtttgggtcaaagacagatgcttcagacttgggtgggaaggtgaaagatggctatttagaaagctggtggcacgttttacataagggaatgtcagatgggagatgctagttgccattttaacaaagcaggtaaatcggtaaattttaaactctgtccatgttctgttagaactcagggacaaggatccatgaaaaagacctg

SEQ ID NO: 287558 - DNA, 1000 bp, Homo Sapiens; identical to SEQ ID NO: 221951

SEQ ID NO: 287559 - DNA, 1000 bp, Homo Sapiens
ggccaaatcgcgagcggggcggggcgggcgcgaccttcgaatgtaatatatgtttggagactgctcgggaagctgtggtcagtgtgtgtggccacctgtactgttggccatgtcttcatcagtggctggagacacggccagaacggcaagagtgtccagtatgtaaagctgggatcagcagagagaaggttgtcccgctttatgggcgagggagccagaagccccaggatcccagattaaaaactccaccccgcccccagggccagagaccagctccggagagcagagggggattccagccatttggtgataccgggggcttccacttctcatttggtgttggtgcttttccctttggctttttcaccaccgtcttcaatgcccatgagcctttccgccggggtacaggtgtggatctgggacagggtcacccagcctccagctggcaggattccctcttcctgtttctcgccatcttcttctttttttggctgctcagtatttgagctatgtctgcttcctgcccacctccagccagagaagaatcagtattgagggtccctgctgacccttccgtactcctggacccccttgacccctctatttctgttggctaaggccagccctggacattgtccaggaaggcctggggaggaggagtgaagtctgtgcatagatgggagagccttctgctcagaggctcactcagtaacgttgtttaattctctgccctggggaaggaggatggattgagagaatgtctttctcctctcctaagtctttgctttccctgatttcttgatttgatcttcaaaggtgggcaaagttccctctgactcttcccccactccccatcttactgatttaatttaatttttcactccccagagtctaatatggattctgactcttaagtgcttccgccccctcactacctcctttaatacaaattcaataaaaaaggtgaaatataaaaaaaaaaaaaaaaaaaaaaaaaaaa

SEQ ID NO: 287560 - DNA, 1000 bp, Homo Sapiens; identical to SEQ ID NO: 221952

SEQ ID NO: 287561 - DNA, 1000 bp, Homo Sapiens
gatttgtttataagtttgggtggggtgcataccatattcttggttcttaaaatctatcacttttcaccttatacttgatgtgtgaaaactataaaaacaatgtgtgaaacccaggggttctaaaatacaagcatagattttatcagggtgttttgtcaaagcaggttattcagtgattcctccccaccattcttaagaacgttaaataatgctgttgtgttagctctgagtagaaaggaaaaagtaaaacctctgtttggaggtaatattgggttgaattctgactgcccctttctagctggacctttaacaaatcacccaatcttttttgtgtttctctaaagtcatttatacattaaatgtaattatagcaactgtggggttctgttgagaattaagagctaacactatatatgtaaagtttccagtactagtcccagaatttagaatatgctcaacacaaagtaaacagcattatataagtttatatttttgtgagttataaagtactttgatatattctcattaaatctgtaaatcacctctataagtaagtggtaataataaagcagatatttttgtccccatttaaaaaatgaagaaattaatgcttaatagggtggtaccctggaaaggatctgggaagtggtagaatttctggtctgtacttttacaaatggagcccttgggaggtgggttaggtaaaagaagctttttacttaacgttgtcttatttccagtctaattttacgctgtagcagaaccagatggctgagaaaattctggaactatggatcttgaccccaaggatatattattttattccaagaaagatcaggtaggcgaaaagatgacaggatacagagtcaatccataaactaaatatttataactgttctgaattatacagagtctaaaaatatgtgtcagctacttcattcctgtaaatactcttgctgtgttataaatatggcaagaaataaacatgaccaatatcaat

SEQ ID NO: 287562 - DNA, 1000 bp, Homo Sapiens; identical to SEQ ID NO: 221953

SEQ ID NO: 287563 - DNA, 1000 bp, Homo Sapiens
tatgttaagagggaagttgggatcgatgacatgttcaactttgagacctttggcaacagcatgatctgcctattccaaattacaacctctgctggctgggatggattgctagcacccattctcaacagtaagccacccgactgtgaccctaataaagttaaccctggaagctcagttaagggagactgtgggaacccatctgttggaattttcttttttgtcagttacatcatcatatccttcctggttgtggtgaacatgtacatcgcggtcatcctggagaacttcagtgttgctactgaagaaagtgcagagcctctgagtgaggatgactttgagatgttctatgaggtttgggagaagtttgatcccgatgcaactcagttcatggaatttgaaaaattatctcagtttgcagctgcgcttgaaccgcctctcaatctgccacaaccaaacaaactccagctcattgccatggatttgcccatggtgagtggtgaccggatccactgtcttgatatcttatttgcttttacaaagcgggttctaggagagagtggagagatggatgctctacgaatacagatggaagagcgattcatggcttccaatccttccaaggtctcctatcagccaatcactactactttaaaacgaaaacaagaggaagtatctgctgtcattattcagcgtgcttacagacgccaccttttaaagcgaactgtaaaacaagcttcctttacgtacaataaaaacaaaatcaaaggtggggctaatcttcttataaaagaagacatgataattgacagaataaatgaaaactctattacagaaaaaactgatctgaccatgtccactgcagcttgtccaccttcctatgaccgggtgacaaagccaattgtggaaaaacatgagcaagaaggcaaagatgaaaaagccaaagggaaatgaatgaaaataaataaaaataattgggtgacaaaaaaaaaaaaaaaaaaaa

SEQ ID NO: 287564 - DNA, 1000 bp, Homo Sapiens; identical to SEQ ID NO: 116726

SEQ ID NO: 287565 - DNA, 1000 bp, Homo Sapiens
agagttccaatgtattggtgtagataatctagttgggaatacttttaagtctcaccttcccctttaaactaatattcataattggttcatatgtttaaaagactttaatttacaaattaaattgcaaatgggagcattagatttagttttagacttaggtgggtagcaatgccagtaaacttaaattacgtaacttcttgcaaccacgaaacctgtaatacgctgtacagtaacaagtgttggcattatcagttgaactgtaaatacaaaatgcttcttccaattagtctctatgatgattaagtttctaaaatttatctgaacaccattcagaaacttgttttggggaatttgatagttattgatgtgcatctgttaaactgatgacagacataactcatcattccccagaaaccttttttgattacagtatctaacattttgcctcctcttttttggttttgctggttataaaggtttggattggagagggctcactggatcccaatccttggagctggatcattggattcaaatcataatgtggataggatagggaggatgaattacccaggattcatggagcgggatcagattaccaggaacataggagtggattcctgccccaaccaaaccgcattcgtgtggatttttttattcaacttaattggctattccaaagattttttttttcctatttttgacgattggagcccttaagatgcacgatggaattgtgttttgcgttttttggtaaaaggagcaaagcgaggacctggagataaacgctggagcaatctccttggaaggattcagcacgagtagatggtaaacatttaaaggggaaagggggggtttgtttaaaatagtaaatcagtaagtcacttctaaatttaaagaaaacaaaattggagttgaagaataagtaggtttccaattggctattgccgttttctttgaaaaaataaacattttttaaaaaactaaaaaaaaaaaaaaa

SEQ ID NO: 287566 - DNA, 1000 bp, Homo Sapiens
gacaagctggggaagtaacgtttgcggatgcacaccgacctaaattaaatgaaggggtggttgagtttgcctcttatggtgacttaaagaatgctattgaaaaactttctggaaaggaaataaatgggagaaaaataaaattaattgaaggcagcaaaaggcacagtaggtcaagaagcaggtctcgatcccggaccagaagttcctctaggtctcgtagccgatcccgttcccgtagtcgcaaatcttacagccggtcaagaagcaggagcaggagccggagccggagcaagtcccgttctgttagtaggtctcccgtgcctgagaagagccagaaacgtggttcttcaagtagatctaagtctccagcatctgtggatcgccagaggtcccggtcccgatcaaggtccagatcagttgacagtggcaattaaactgtaaataactcgccctgggggcctttttttaaaaaacaaaaaccacaaaaattcccaaaccatacttgctaaaaattctggtaagtatgtgcttttctgtgggggtgggatttggaaggggggttgggttgggctggatatctttgtagatgtggaccaccaaggggttgttgaaaactaattgtattaaatgtcttttgataagccttctgctcacatttttgtgaatgtctgaagtatatagtttgtgtatattgacagagctcttttataactaaagcaaatttaatttttttgtactagaaaaaaatttgaacattttagttcttggttataaaaatgttaattcagaattagtttaatgccttaattaaactaattaatagctttggacacttaaaagagctctaaatttgcttgtacataaaggcttaatttgttttccttgttagggtcaagggtgtcctccactctttaacagctgctggacagacacattagagcagctgtttgttattgataataaaatattataaaactaaaaaaaaaaaaaaaaaaaaaaa

SEQ ID NO: 287567 - DNA, 1000 bp, Homo Sapiens; identical to SEQ ID NO: 221954

SEQ ID NO: 287568 - DNA, 1000 bp, Homo Sapiens
ccgggtgaatggggagaagatcttggaggacttcagcaagaggcagcagccaaaattcaagaaggatcctccccttgcagccgtgaccactgctgtccaggaactgctgcgtctggctcaggcccacccagccggacctcccaccctcgaccctgtcaatgacctgcagctcaaagatatgtcagttgtagagggtgggctccgggcccggaagctggaggagctgatccagggggctcagtgtgtacacagcccccgttttcctgcccagtacctgaagctgcgggagcgaatgcagatacagaaggagatggagcggctgcgcttcctactgtcggatcagtcattgctgctgcttcctgagtaccatcagcgagtagaggtgctccgaaccctgggttatgtggacgaggcgggcactgtgaagctggcagggcgggtggcttgtgccatgagcagccatgagttgctcctcactgagctcatgtttgacaatgcactgagcaccctgcggcctgaggagattgctgccttgctctctggcctggtctgccagagccctggggacgctggggatcagctcccaaacaccctcaagcagggaatagaacgtgtccgggctgtggccaagcggattggtgaggtccaggtggcttgtggcctgaaccagacggtggaggaatttgtgggggagctgaattttgggctggttgaggttgtatatgagtgggcccggggcatgcccttctccgagttggcagggctctcagggacccctgagggcctggtggtccgctgcattcagcgcctggctgagatgtgtcgctcactgcggggggcagcccgcctggtaggagagcctgtgctgggtgccaagatggagacagcggctaccttgctacggcgggacatcgtatttgcggccagcctctacacccagtgaatgccccatgtaaaaacatgatgataaaacagcaaagcacaaaaaaaaaaaaaaaaa

SEQ ID NO: 287569 - DNA, 1000 bp, Homo Sapiens
gttgattttctgttgtattttaactcatacctttaaaggaattccccaaagaatgtttatagcaaacttggaatttgtaacctcagctctgggagaggatttttttctgagcgattattatctaaagtgtgttgttgctttaggctcacggcacgcttgcgtatgtctgttaccatgtcactgtggtcctatgccgaatgccctcaggggacttgaatctttccaataaaccaggtttagacagtatgagtcaatgtgcagtgtagcccacacttgagaggatgaatgtatgtgcactgtcactttgctctgggtggaagtacgttattgttgacttattttctctgtgtttgttcctacagcccctttttcatatgttgctcagtctccctttcccttcttggtgcttacacatctcagaccctttagccaaacccttgtcagtgacagtattttggttcttagttctcactgttccctctgctcctggagcctttgaataaaaatgcacgtagctgaggccggatgcggtggctcacgcctgtaatcccagcactttgggaggcctaggcgggcggtcaggggttcgagaccagtctggccaacatcgtgaaaccctgtctctactaaaaatgcaaaaattagccgggcgtggtggcgggcgcctgtaatcccagctacttgggaagctgaggcgggagaatcatgtgaacccgggacgcaggggttgcagtgagcggagatcgcatcattgcactctagcctgggccacagggcgagactccgtctcaaaaaaaaaaaaatgcacatagctatcgagtgtgctttagcttgaaaaggtgaccttgcaacttcatgtcaactttctggctcctcaaacagtaggttggcagtaaggcagggtcccatttctcactgagaagattgtgaatatttccatatggattttctattgttactctggttctttgttttaaaataaaaattctgaatgtacacg

SEQ ID NO: 287570 - DNA, 1000 bp, Homo Sapiens; identical to SEQ ID NO: 116729

SEQ ID NO: 287571 - DNA, 1000 bp, Homo Sapiens
gcaacgactccagactgggaagacctttccattttcaggatcgacgcttcacgttgaggggagggcattcaggacgccctcttaaggcttctcccaacccatggcgctaccaggctcctcacaggaccaggcctggagcctggagcctccggctgccacggctgctgcctcctcatcttcgggaccccaggagcgggagggcgctgggagccccgcggcccccgggacgctgcccctggagaaggtgaagcggccgatgaacgcgttcatggtgtggagctccgctcagcgccgccagatggcgcagcagaaccccaagatgcacaactccgagatctccaagcgcctgggcgcgcagtggaagctgctggacgaggacgagaagcggcccttcgtggaggaggccaagcggctccgcgcccgacacctgcgcgactaccccgactacaagtaccggcctcggcgcaaggccaagagctcgggcgccggaccttcccgctgcggacagggaagaggcaacctggccagcggcggcccgctctgggggccggggtacgcgaccacccaaccgagcagaggctttgggtacagaccccccagctactcgacagcctacctgcctggcagctatggctcttcccactgcaaactggaagccccctcaccgtgctccctccctcagagtgaccctaggctccagggggaactgctgcccacctatacccactacctgccccctggctctcccactccatacaaccctccccttgctggtgcccccatgcccctaacccacctctaaccctcatggacgcagacctcacgggacgggcctcatcctccttttttaatccagcagcatcccctaccccaggctgtcaaccctttctcctgttggactacagttcagaggcagcctgcagtcctcccatgatagccagggagagccgcacaacatacaattatatttttggtagtattaaacagttttgtattattc

SEQ ID NO: 287572 - DNA, 1000 bp, Homo Sapiens; identical to SEQ ID NO: 221957

SEQ ID NO: 287573 - DNA, 1000 bp, Homo Sapiens
tcctcttaggaagaactgtcatccccaaacacatagagagacactctctgtctctcgattacaatcatgatttccagaatggagaagatgacgatgatgatgaagatattgattatgtttgctcttggaatgaactactggtcttgctcaggtttcccagtgtacgactacgatccatcctccttaagggatgccctcagtgcctctgtggtaaaagtgaattcccagtcactgagtccgtatctgtttcgggcattcagaagctcattaaaaagagttgaggtcctagatgagaacaacttggtcatgaatttagagttcagcatccgggagactacatgcaggaaggattctggagaagatcccgctacatgtgccttccagagggactactatgtgtccacagctgtttgcagaagcaccgtgaaggtatctgcccagcaggtgcagggcgtgcatgctcgctgcagctggtcctcctccacgtctgagtcttacagcagcgaagagatgatttttggggacatgttgggatctcataaatggagaaacaattatctatttggtctcatttcagacgagtccataagtgaacaattttatgatcggtcacttgggatcatgagaagggtattgcctcctggaaacagaaggtacccaaaccaccggcacagagcaagaataaatactgactttgagtaacggccttgaggtgtccctcgcccttttggtttgttcaaggagctgctgctttgcatagctgctctagtgtctggtatcatcggatctggttttgaataattcccaggagtcctgggtccctggcctccaaagctggaatgtgaacgcatgccacggtggtctgaccctcacactccttttctcttaacagcaaaatgcaatggaaggaagaaaagttccaacaaagaatgattttgtgaattctgtgatttttcttctgatcagtttcaatctgtaataaatgccttatttttcctgt

SEQ ID NO: 287574 - DNA, 1000 bp, Homo Sapiens
agcgcgggagtgccataccacggagaagtgcctgtcagcctggccagggcccagggcagcgtcgcctttgattaccgaaagcgcaaacatgtcttcaagctgggcttacaggatggaaaagaatatttattccaggccaaggatgaggcagagatgagctcgtggctacgggtggtgaatgcagccattgccacagcgtcttctgcctctggagagcctgaagagccggtggtgcccagcaccacccggggcatgacccgggccatgaccatgcccccagtgtcacccgtcggggctgaggggcctgttgtgctccgcagcaaagacggcagagaacgagagcgagaaaaacgcttcagcttctttaagaagaacaagtagttgggggcaaggtcccaggccaactccctccctccgttcaggaaactgccagggacagtcgacagggaccgccctcttgtcaggacaactgcctgctgctagggtctgttgccaaggtcaacccatcaccaggaactgtcactggggacgagtccatgttcccaagggcagcccttctcttctgctgtttaattccagactggtggtgggacccaggtaaccccctctcccacccccgccgacttctcccctttccccagcctcgtgcctctgtccctcaccacggtgtggacagtgccgcaccctcaacataggccatgtggggagtggctgcccctgcctcagggtcattctcctgccatgcgagggcactcgccttctgccttctggttcctcacccctcagaccagccaggaacctctcagagctgaagcaggccctgggggcagaagtgccagatgacagtcagaggcgcaggagccctccctccccacccccaccctgtaactccagctgccactccatctccagctgctctcaatggcttccaggtgtgttgttcggggacagccaccgccttgagtctggccaaggaggtgattaaacagctcagcttctc

SEQ ID NO: 287575 - DNA, 1000 bp, Homo Sapiens
aagattaatgactgttatcaagaacatgaacattggcttcctccatagagaagaaatcagtatctgagttgcataccaggcagtattaaaatctaacaggtctgtttggcccattgatagatactcaaatggtgtctccttctggttatggattttgaccattgattacctttctcaatgtaatgaagtattttacagtcaatttgtggtgtaaatgttgctcttgtctttccttgcttacaaactactttcacattgaacagctgtgagacagacatattgagatgcctgcccttgttagtattcattttatgctgcccaagatatcatttaatttagacttaacaagtatttccttgtgattatattactctgtccttgttaataaagtgctgctgtgtttgactctgaacatactaccaaaacttcttcaaagagttttttatgaaagactttcctcctttacaagaaagaaatggggtgctgcctttctgtttagtaaaagcagaatttgcagtggcatctaaagagatcttttttaaataaaaattatgtattgtggcataatcctttttttgagctctacagagaacagtcttttggtaatagtggcaggtatttattccttctgaatatataccccattataggaataactgttacttatttaggttccatcattgaaaattttgacccaaggcacagcagtgaaatttatagttctcaatttagttgtcattattgacaggcattggtattattagtcattgctaagcaactaaaacttcatcagttcaaataagttttaattgtcaaatgaagtataaacacatgaactttctagaaatatttcctcttttggataggtctttaaccagttcatatatatactttgtcaaatatatggatgtgtatgtgtacatttataagaaccagtatggatacatccattcactgtggtacattttaaaataaaatattttagcagtgaatatggaaa

SEQ ID NO: 287576 - DNA, 1000 bp, Homo Sapiens
caggtatgagaccaccgggctgagcgaggcgcgggagaaggccgtcttgctggacgaggacgatgacttgtgggtggagcttcgccacatgcatatcgcagatgtgtccaagaaggtcacggagctcctgaggaccttctgtgagagcaagaggctgaccacggacaaggcgaacatcaaagacctatcccagatcctgaaaaagatgccgcagtaccagaaggagctgaataagtattctacgcacctgcatctagcagatgattgtatgaagcacttcaagggctcggtggagaagctgtgtagtgtggagcaggacctggccatgggctccgacgcagagggggagaagatcaaggactccatgaagctgatcgttccggtgctgctggacgcggcggtgcccgcctacgacaagatccgggtcctgctgctctacatcctccttcggaatggtgtgagtgaggagaacctggccaagctgatccagcatgccaatgtacaggcgcacagcagcctcatccgtaacctggagcagctgggaggcactgtcaccaaccccgggggctcggggacctccagccggctggagccgagagaacgcatggagcccacctatcagctgtcccgctggaccccggtcatcaaggatgtaatggaggacgccgtggaggaccggctggacaggaacctgtggcccttcgtatccgaccccgcccccacggccagctcccaggccgctgtcagtgcccgcttcggtcactggcacaagaacaaggctggcgtagaagcccgggcgggcccccggctcatcgtgtatgtcatgggcggtgtggccatgtcagagatgagggccgcctacgaggtgaccagggccaccgagggcaagtgggaggtgctcattggctcctcacacatcctcaccccgacccgcttcctggatgacctgaaggcactggacaagaagctggaggacattgccctgccctgacgcggccgc

SEQ ID NO: 287577 - DNA, 1000 bp, Homo Sapiens
cagccactgggcatataaatttacctgagaattcacaggagttattgttgggaacatatatgaccaaatcaacaccagttgtacaccttcattttactcgaagaaacctggttctagctgcaggagcttatagtccacaataaaccatcggtattaaagaccttttggaagctactgtttttaaaaagggagactaaaagcaaatacctcagtgattaatatttaagctacagagaatgtttttgtctatatggatctggaagtatgctgcttggaaaaatctgaacaggacagttccacgtttctatagcaaccacatttgactaatttccgttagttgaataagaggtattatgatcatggaggggacatttatggtgctttggattgtgtggaaactatgcattttctgttcaaatgctattttaatttattacatttagaaaaaaagttgatttcaataattcatcctgcttcaagattcaaattcagaaatatactatcatcttgaattttagctgaagaatcctatgagcatgtatgtttctgctgtaaaaacgtagttactgtatggcactcaaaaactatgttaaatgatccactaactttttttttcttggcccatgattaatggaatgtatgtaactaggtagggttcctttcttagatctagaggaagtacagccacccactgacatctgaatttatatacctgttgagttttgagtgcacccaaacactcgataaaccaggtgaagaaatttagcttccatgttctacttcagctaaaacagctacatacaacctagtacacttgaagtcagacagacatttcagttgcttacctccagtactgagccttgctttgggaaactaaaagatttagaccaagtcactgccagtttttgcctttgttgcattttgtacagtttttatatttttgatatcttgtaaataaagacaaccagcttttccaggttcataaaaaaaaaaaaaaaaa

SEQ ID NO: 287578 - DNA, 1000 bp, Homo Sapiens; identical to SEQ ID NO: 116730

SEQ ID NO: 287579 - DNA, 1000 bp, Homo Sapiens
ctcggctgcctgcggttcggctcggctgtgaacctgcagccccaactggccagtgtgactttcgccaccaacaaccccacacttaccactgtggccttggaaaagcctctctgcatgtttgacagcaaagaggccctcactggcacccacgaggtctacctgtatgtcctggtcgactcagccatttccaggaatgcctcagtgcaagacagcaccaacaccccactgggctcaacgttcctacaaacagagggtgggaggacaggtccctacaaagctgtggcctttgacctgatcccctgcagtgacctgcccagcctggatgccattggggatgtgtccaaggcctcacagatcctgaatgcctacctggtcagggtgggtgccaacgggacctgcctgtgggatcccaacttccagggcctctgtaacgcacccctgtcggcagccacggagtacaggttcaagtatgtcctggtcaatatgtccacgggcttggtagaggaccagaccctgtggtcagaccccatccgcaccaaccagctcaccccatactcgacgatcgacacgtggccaggccggcggagcggaggcatgatcgtcatcacttccatcctgggctccctgcccttctttctacttgtgggttttgctggcgccattgccctcagcctcgtggacatggggagttctgatggggaaacgactcacgactcccaaatcactcaggaggctgttcccaagtcgctgggggcctcggagtcttcctacacgtccgtgaaccgggggccgccactggacagggctgaggtgtattccagcaagctccaagactgagcccagcaccacccctgggcagcagcatcctcctctctggccttgccccaggccctgcagcggtggttgtcacaccctgacttcagggaaggtgaaacagggcttgtccctccaactgcaggaaaacccttaataaaatcttctgatgagttctaaaaaaaaa

SEQ ID NO: 287580 - DNA, 1000 bp, Homo Sapiens; identical to SEQ ID NO: 116731

SEQ ID NO: 287581 - DNA, 1000 bp, Homo Sapiens; identical to SEQ ID NO: 221961

SEQ ID NO: 287582 - DNA, 1000 bp, Homo Sapiens; identical to SEQ ID NO: 116734

SEQ ID NO: 287583 - DNA, 1000 bp, Homo Sapiens; identical to SEQ ID NO: 221962

SEQ ID NO: 287584 - DNA, 1000 bp, Homo Sapiens; identical to SEQ ID NO: 221963

SEQ ID NO: 287585 - DNA, 1000 bp, Homo Sapiens
gcgacgaaggctgcactgtggttcgaccggaaaagaagcgggtgacccacaatccaatgatacagaagacccgtgacagtggtaaacagaaggcggcttacggcgacttgagcagcgaagaggaagaggaaaatgagcccgagagtctcggcgtggtttataaatccacccgttcggcgaaacccgtgggaccagaggatatgggagcgacagctgtctatgagctggacacagagaaagagcgcgatgcacaagccatctttgagcgcagccagaagatccaggaggagctgaggggcaaggaggatgacaagatctatcggggaatcaacaattatcagaaatacatgaagcccaaggatacgtctatgggcaatgcctcttccgggatggtgaggaagggccccatccgagcgcccgagcatctacgtgccaccgtgcgctgggattaccagcccgacatctgtaaggactacaaagagactggcttctgcggcttcggagacagctgcaaattcctccatgaccgttcagattacaagcatgggtggcagatcgaacgtgagcttgatgagggtcgctatggtgtctatgaggatgaaaactatgaagtgggaagcgatgatgaggaaataccattcaagtgtttcatctgtcgccagagcttccaaaacccagttgtcaccaagtgcaggcattatttctgcgagagctgtgcactgcagcatttccgcaccaccccgcgctgctatgtctgtgaccagcagaccaatggcgtcttcaatccagcgaaagaattgattgctaaactagagaagcatcgagctacaggagagggtggtgcttccgacttgccagaagaccccgatgaggatgcaattcccattacttaggtttcccataattcttaaatttaaaaaataaacgttttgttcttttggaagtcttacttcgtgtccttcctttgtagagaaagtgacagagcaggcgggtggtgaag

SEQ ID NO: 287586 - DNA, 1000 bp, Homo Sapiens
tcaaagaattggtaaatgctggctgtaacttgagtactttaaacatcactcttctatcttggagtaaaaaaagatatgaagctaaattgaaaaagttaagcagatttgcctaaggatgccaatgtttttaattctcaggaactgtgaatatgttatgccacattgcaaaagaattttgcagaagtgattaatttaaaatgttattaagggccttgagatggggagattatcctgaattactttggagggcctaatataattgtagggatctttaaaagttgaagagggaggcaaaagaggaggtcagagtgatcctgtataagaaagacaactacttttgaaggaagttaaaaggtggctttgaaggaggaagacaccttgagccaaggaatgaagggggcctgtaaaaaaagattgaaaaggcaaggaaacagattctccattagagtccccagaaaggaatgcagccttgctggcacctttttagcccagtgagatcaatgtcaaacttctgacccacagaaccataagatggtaaatttgtgttgttttaaaccactgagtcagtgataatttgctgaagaagcaaatagattaacatagcaactaagtagatgattagttgcattataggtgaagtcaaaaatacagtcctttagtaaagtctctatttcttccttttataagagtaattatatttaaaaaatctacctacccttctggaattgctaatgttagtgtttataaagtcttaaatgtgtgcataaaaaactaaatgtgaatataaaatctaaataaaggaatatgtttgcctaatatagtttaaggaaatgataatcatttctgtgcattttgttggcatttcagctaatattaaagagtaattttcagaggcattgacttaaaaaatggcaaatcagataatgtcggtattttcaagatacaatctagctctgacataaactgaaagacgtgagacaaattatatgaccttaatttt

SEQ ID NO: 287587 - DNA, 1000 bp, Homo Sapiens; identical to SEQ ID NO: 221965

SEQ ID NO: 287588 - DNA, 1000 bp, Homo Sapiens; identical to SEQ ID NO: 116737

SEQ ID NO: 287589 - DNA, 1000 bp, Homo Sapiens; identical to SEQ ID NO: 116738

SEQ ID NO: 287590 - DNA, 1000 bp, Homo Sapiens; identical to SEQ ID NO: 116739

SEQ ID NO: 287591 - DNA, 1000 bp, Homo Sapiens; identical to SEQ ID NO: 221966

SEQ ID NO: 287592 - DNA, 1000 bp, Homo Sapiens; identical to SEQ ID NO: 116740

SEQ ID NO: 287593 - DNA, 884 bp, Homo Sapiens
gctcttacagcatggccgccggtactgcagctgccttagcgtttttgagtcaggagagccgaacgcgggccgggggtgtcgggggcctacgggtcccggccccggtcactatggacagttttttcttcggctgtgagctctccggccacacccgctccttcacctttaaggtagaggaagaggatgatgcggagcacgtgctggcactaaccatgctctgcctcaccgagggagccaaagacgagtgtaatgtggtagaagttgtggcccggaaccatgaccatcaggagatcgcagtccctgtggccaacctcaagctgtcctgccaacccatgctcagtctggatgacttccagctccaaccacctgtaaccttccgcctgaagtcgggctctggccctgtgcggatcactgggcggcaccagattgttacgatgagcaatgatgtttctgaggaggagagcgaggaagaggaagaggacagtgatgaggaagaagttgagctgtgccccatccttcctgccaaaaagcaggggggcaggccctagccctcctaggtcagctccatgtgccatgcaccgccatgcaccctgttccctgacaaagtttcaacaattgtaaatatttcttccttgaagaggagagcttgggtgggggttgggtgggagggacttgggtctttggtgctaggagagggcctgtgctccacacagccgtggttttctgattttcaccatgcccggggcctcccttcccacctgcctgtgagaattggaggttagtgcctgaagctcagagctacacatttttaatagtttaaacatttttggataaaggttgaaataaagtggtgtggagtttttgcaaaaaaaaaaaaaaaaaaa

SEQ ID NO: 287594 - DNA, 1000 bp, Homo Sapiens
aatttatgttaaaatagcattaataaatcagttataggttaatgtagataggatgttttgtgaaaaagcaatctattgtgtccaaataaaaaaacaaaaagtgtgacactggttaactttttccagatctcatgtctggcttaataagagatatttgtattatcatatctgcctttgtattaaacctattggtatatcataggtcatgttagctcaaaaaaactttactgcacactactgagagaatgagatgaaaaacgattaatgtttcattattattattgtgaaaatattattaacactggggactccttaagagtacatcagagttctctctaggaatcccaaaaccacattttgaaactagaatagtggatcctggaagttaatccatgtgctggttaattttagatgtcaacctgactggattaaggaatacctagacagctggtacaacattatttctgggtgtgtctgtgagtgtgtttccagaagagattggcaagtgagtcagtgggaaattctctccttctgttggctgggtgcccaatacaacaaaaaggcagaggaaaggcaaattcttctctcctctggagctgagacactcttcttcttctgcccttggacatcagaactcctggctctccggcctttgaacttcaggacttgtaccaggaggccctgggttctcaggcctttggctttggactgagagttacacaatcagcttccctggttctgaggctttcagacttaaactgagccatgctaccagcatcccagggtctccagcctacagatgagctgttgtgcgatttcttagcctccataatcacatgagccaatctccttaataaatgcctgctcatagatctgtatctacatctatatctgtatgtgcatctatatctatgcctatatctatatctatatcatattgattttgtctctctggagaaccctgactaataaaatgaggcatctaaaaaaaaaaaaaaaa

SEQ ID NO: 287595 - DNA, 1000 bp, Homo Sapiens; identical to SEQ ID NO: 221968

SEQ ID NO: 287596 - DNA, 1000 bp, Homo Sapiens
gaacccaagacagaccaggatgaggagcattgccggaaagtcaacgagtatctgaacaaccccccgatgcctggggcgctgggggccagcggaagcagcggccacgaactctctgcgctaggcggtgagggtggcctgcagagcctgctgggaaacatgagccacagccagctcatgcagctcatcggaccagccggcctcggaggactgggtgggctgggggccctgactggacctggcctggccagcttactggggagcagtgggcctccagggagcagctcctcctccagctcccggagccagtcggcagcggtcaccccgtcatccaccacctcttccacccgtgccaccccagccccttctgctccagcagctgcctcagcaactagcccgagccccgcgcccagttccgggaatggagccagcacagcagccagcccgacccagcccatccagctgagcgacctccagagcatcctggccacgatgaacgtaccagccgggccagcaggcggccagcaagtggacctggccagtgtgctgacgccggagataatggctcccatcctcgccaacgcggatgtccaggagcgcctgcttccctacttgccatctggggagtcgctgccgcagaccgcggatgagatccagaataccctgacctcgccccagttccagcaggccctgggcatgttcagcgcagccttggcctcggggcagctgggccccctcatgtgccagttcggtctgcctgcagaggctgtggaggccgccaacaagggcgatgtggaagcgtttgccaaagccatgcagaacaacgccaagcccgagcagaaagagggcgacacgaaggacaagaaggacgaagaggaggacatgagcctggactgagccacgcgccgtcctccgaggaactgggcgcttgcagtgcgttgcacaccctcacctcccacccactgattattaataaagtcttttcttttacctgccaaaaaaa

SEQ ID NO: 287597 - DNA, 1000 bp, Homo Sapiens; identical to SEQ ID NO: 116742

SEQ ID NO: 287598 - DNA, 1000 bp, Homo Sapiens
tttaaaactttttattgtcttataaatagcattcacttattattttggatatttaagggttccattaagttaacactgtatttggacaaagtgtgaccaaattagccagtctgttttcttccatgtttaattagaagtgagaggtagaagtacttcaaattcaacaggccagcaagcaatcggcttaaaattccctttcttaaatgttgtgctcttatgttctcggctttttaatgactttatttttacagtacttgttcagtcacttgagatgaaatgcttggggtagcttttccatcctcaaacttaatgtttttactagttcatagtgtttggaacagtatatgccaatcactgagactgcatcagagtttgcaattttgtatgtttcattgccaaagaaggcttagtggttgttgactgtagtataagtcagctttctgtagcataagatttgattttcccatacttacttcacttgttatacatcactgattatttgggttaaactggactcatttcaagcagtttgcttttgttcaaatcgtgatgagaaacctaatactgtaatttgatttgagccataaaacacattttaatattagcttgtattatagttattaagcttgtttttgtggaaaaaaacttactaaaacctaggtaactctagattaggccagttcaggtgtattttgtatcttagtaatggatcatatcgtaaaaatagagataagttgggaagatatattgattatgctgttctgttgagggaaaggtcatgtatttagaaatttaaacttttggttattgtgttcacatcatagtattcaagcatcatttatagtttggttttgagaacttttctggtattacgtttatggcaaatgtataaaagaaacaagttttggttatatttttatatttgtaaagtaagtttggttaaagtgatcactgttctttttttattttattgtcatttcaataaaaaatatttgaaaga

SEQ ID NO: 287599 - DNA, 1000 bp, Homo Sapiens
atataagctgttcattctgtacagtgaattttccgaacctctcaaagtatgttttccgttcttccacagaaatatgcaaaacagttcatccttttctactttatttattgttcccttgaaatgactgaccaggaaaaagatcatccttaaattttgaagcaagtgagagactttattaaaaatacatatatatctatataaacatatatgatagtggctctagttttatagagctccaagtgtattaaacatgacagccattcattcataaagatctggatttgctttaccttgttaatattatctaggggaaaaagtgcaaattgctccatgttcttctctcccttatgtaacatctcctgagggtgtttagttgcatggctgttcagaaaggtattaagggcttaggccaaatcttactttgagtatgttaaaaaaaaaaaaatgctgctggcttttctgaagacaggtgcttgaacttgtcagtttgttttaaataaatacaatagttgaaaatttttctctgttacatcagtaatattgttaaagtaatggatagaaccataacttacacatgaaagtcatatactagatccaatactatttagtttattatcgaaattggaaggattcattgagcagcatagaagtttgtttacatgttactttgagatgctaggtatttgtggaattaaaaagaatcaggctcttttgtactttgtttttaaatctgtgatgcttttcaaatttaattcataataaattgatgcaatttcatacttaggaacatacaaaaggtaatgtaaactctgccacttttttgtgttcaaaattttggtttttatgaagccagatggattgaagagttacataagcatttgaatgctctaatataaggctaatgattttctgttagtgtttgaatatcttcattcctctcaaattcataacagttctatttaactgaattaaataaccatatgaaaaaaaaaaaaaaaaa

SEQ ID NO: 287600 - DNA, 1000 bp, Homo Sapiens; identical to SEQ ID NO: 221970

SEQ ID NO: 287601 - DNA, 1000 bp, Homo Sapiens; identical to SEQ ID NO: 116743

SEQ ID NO: 287602 - DNA, 1000 bp, Homo Sapiens; identical to SEQ ID NO: 116744

SEQ ID NO: 287603 - DNA, 1000 bp, Homo Sapiens
ggctgcattcagcttaccagctacctagcaagagaaggaattatttgacatgcctaaagcttacacactctagcttaggaatccccagtttgtggctaccctgtttcatttccacttgtgccatcttctttgctgaagtgttgaataaggcccacgtgaagagtttggtagaaatagccttgtcaagagaactagcaagcccctgacatttttttctaagagtgtttatgggatgagatgtgctacaaatgggatagatttggataaaattttaactcaacatcttgatttggagcctggggtttcgggaaggtgttgaggaatctatagaagtccaaattataggttgtattcttccatcttcattgtcttacctctgaaggaatagaacctgaccacattattatgaaacattatggctgtttatgtaatttagggaggactggtctgtaatttctgaatgtatatagaataatatttatgtttacaatgtaacttttcaaaatttacaaatcaggattatatacataagaattccactaagaaatgccaagattcttaaatttgccagcgttaaagtagaaaataacatttcagaagagcacaatatgcataaaacatttttcaaaattgaaatattttcctgggcattaaaaacctttactattggctacaaatttattgtacctgatgaaaacatattttctggacttaaatgttattacaaatatcttaattttcagtaattgttttgcactttcaaagattgtaaatagttcattcaatcaatggtatagagttatttatttgctacataatagatactgtgccaaataattactttttatttattttatttagtacgtaattttgaagtacattttttcctgttttcacaattagactacatttaatgtgtaggaattgtatgtatgtatatcttctgtaaataacatctagtatcttcactaaatataattgtcgaccgggaaaaaaaaaa

SEQ ID NO: 287604 - DNA, 1000 bp, Homo Sapiens; identical to SEQ ID NO: 116746

SEQ ID NO: 287605 - DNA, 1000 bp, Homo Sapiens
gcatttagtgggtggaaggttattttacatgtggatcagtctcgagaagcaggcttcaaacgccttcttcagtcaggaggagcaaaggtgctacctggtcattctgtacctttatttaaagaggccacacatcttttttctgacttgaataaactgaaaccagatgactcaggagttaatatagcagaagctgctgcccagaacgtgtactgcttgagaacagaatacattgctgattatctcatgcaggaatcacctcctcatgtagaaaattactgtctaccagaagctatttcatttattcagaataataaggaacttgggactggattatcacaaaagaggaaagctcctacagaaaaaaataaaatcaaacgacctagagtacactaatcgcatctaccctttagttaccaaacattaaatgtttttaaaaattgaaagcctgaatgtgactgtgatagatttgggtagtaatttaaagatgagtacctgaagaattctgcttcagagtataatgatgacccttcttgagttttgaacacctgaaattgtaatcactgaaatattaactgtttcttaataaaaagttacctgaaataacaacaaaatacaactcctcagctagcttgctgttaaaccacattgaagtctgttaaaagatatttatttttcttgtaaatatctgaagctgtagcttagtggaaattttagcaaggtaatggattttgctttaaaatgtctgccttacaaattcataacaacaagatttgtcagtcagcatttattcatgttttccctgatttttatcttctcaccattttacctcttttaacaggagcctgagcacaaggtttaatgaggaagctggggctataaatatgtgtgtatatatgtatatgtatgtttgtacaaatctccatgatgtttgccaagtttgaatgcgcaaaacttggaaaatgtgacaataaagaataaaagtagtaactcaaattagtat

SEQ ID NO: 287606 - DNA, 1000 bp, Homo Sapiens
aaaaatgacatgaagagctggggcttgttacagaaaaataatcataaaatgaacaaaacctcagagcccgggtcatcttctgcaggcggcagaactacatcggggccaccaaatcaccactcttcagccccatcccactccctgtttcgggcctcgtctgctgggaaagtcacttttccagtatgtctcctggcctcttatgatgagatttctggtcaaggagcgagctctcaggatacgaagacatttgacgttgcgctgtccgaggagctccatgcggcactgagtgagtggctgacagcgatccgggcttggttttgtgaggttccttcaagctaagccagctcagagaacacggggagcggtggtgctacacggacttcggagcatagagtggcgctgagtgagtggctgagaccgaccacggttcttgacttagtggaattgggtcgaaggagtggagaatgggagggctcgggctactgagagtggagatgggggcgggggtggtggtgaagagagttggagaaggaatggacgaattcttgagcaaaaggaggggaagagacaatctccagccacccgccccacgcttgacttcttatcactttggctgtggtgccgcctagtggaaaaaggaagtccctgcagcagtccccgcactctttaagcagctgtttaccgaaggcaccagttcagccaggagtgaaatccggagaggagcaacgccagcctgggtcacagtccatcaaaccccatgagcccgaccactctcgctcttccttacattcccacgtcccccttctctcccaacccctcatatcagcaagggaaattaattaatgagatttgataaatcagtagatagaatgaggtccccattctgaaatatttagcagactggaaccaccacgcaagcctctgtagggggtggatggagacacttctaactttaataaactgcgactgaacgtggaaaaaaaaaaaaaaaaaaaaaaaa

SEQ ID NO: 287607 - DNA, 724 bp, Homo Sapiens; identical to SEQ ID NO: 116747

SEQ ID NO: 287608 - DNA, 1000 bp, Homo Sapiens
ataaagtcacgaggacatagtggtcaccactgtcagttacaacttgtctgtggaatccgtaattgcatctgtgtgccgcctccgaacacagaacattgtttggacggcagccccactgcacataacagacccgtgcatcttcctcagtcagtttctgaatattgtgaattcaggcaggtgtgtgttctcttctgcatgtttttatgcactgccaattagcttctactaaccacggttcaacagaaaataaatgtgtatttgtgaataacaaactgcacaacctgcaaaccaggagagagggacaggttctgtcaggggtgacaccaggacacagggacaggttctgtcgggggtgacaccaggacacagggacaggttctgtcatgggtgacacgaggacacagggacaggttctatcatgggtgacaccaggagagagggacaggttctgttgggggtgacaagaggagacagggacaggttctgtcgggggtgacaccaggagagagggacaggttctgtcaggggtgacaccaggagagagggacaggttctgttgggggtgacaccaggacacaggaataggttctgtcgggaggacagtgctgatcgtgtctcagcatcaggaaaggagaaaggcagagggagagcgctgagaagactgttcacgccagagtgcttatttatttttaatttactgctataggataagcaaccaggtagtgttcctaacaattagcgttaccaaaattaaagttcaaattatatgtttaaaatattgtagaagatatatatttatactggactacttttacaccttctaatatcctgtccaagtttgggcgcagatggtggagttgggctggcatcatgtcctgtggccgccccacttgcctgttggtgccactccatcccgggccccagggatgccagctcagggctgaccacagcagccctgcgtgggcatcacctcctaccccagcccccatcctgggctgct

SEQ ID NO: 287609 - DNA, 1000 bp, Homo Sapiens
gaattctgtataaagatgtgtaaattcttttgagggttcattaaattgcatgaatagagacgggtcaaataaataggcaaaagggatttttacagttagagataaaagagaaaaccattcactgtattttatttcatttctcctgattcagatatttttagtaatttgcttatatgtaaaagttgtttttgtggagtcagtggatatatttctaatgaagtgctagactatccaattacttaatttcttatacctttagataatcagtatgaaaagttcccatttataatggaaatgaaaattcttaactaaactatacatgtaatatgtatttctagaagagaataaaaacccaagtcagttattagatttaaatcaccttctgaaatgctgctatagggctggtatctgtaaaagaatatcctgatgcatctgtttcaccattttgatttttaaagtatgctgtagcatttcttaataacatcgttgtgatgttcttaaggcagatctttcttcataaaaaggaaagtaatggcaatttctctcctgtggaaatcccaattgcttgaattactgatattttagaatagactttttaaaatgccatatgtaattttatgcaagttgactatatatcttgtacttaataaattataggctcattttgttctctgctagtttaaagtaattcgtttaataatagatgtgtttttagaggaaatgctgttacttggaattaattttccagttatacagtcttctataacttactaataatattctatatgtactttatgtaatttccctaaaaagaatgaactaccactacactatggtgttaaaccaaaatatagggaaaataaacactaactgctgcttatggataatgttgcaactacttgttatgcatataaatattttactttttcacatgtatagattgcatttcttaggtgttttaattttttaaatatatttatgttttaaaaaaaaaaaaaaa

SEQ ID NO: 287610 - DNA, 1000 bp, Homo Sapiens
gcgcctgcagagcttccggcccttgccagagcctctgacagtgcagctcctgacagtccctggcgaggtcttccccccaaaagtcaaatacaccttctttgttcctaatgacgtggactttagcatgcagagcagcaaagagagagcaaccaccaacatcatccagccgctgctccacgcacagtgggtgctgggggactggtctgagtgctctagcacctgcggggccggctggcagaggcgaactgtagagtgcagggacccctccggccaggcctctgccacctgcaacaaggctctgaaacccgaggatgccaagccctgcgaaagccagctgtgccccctgtgattcaggggggcaggggccagtcttgtgctcctggacatgcggtactgaggtgcagacaagggtctccactgtggtgactgggtcccttggccatatcaaggcagcacggcccacccaggcctcccattgccgcaacccctccagtactgcacaaattcctaagggggaagaggagagggtatggggcggcagaccctatcatcaactgtccagtggactggaccttgctcgggttcaagtagagggcataggttaaaaggtaaaagtgcacttattgactcagacaggacactcagcgtcagtctgtttgcaaaggactagcaaacttaaatgaaaaaaaaaattctatctggtttccccgataaataatctacctcacaggggaaaaaattagtacaagagaggcgtggggcagggagtcaatggtgaatgtcaaagcaggctccaaagctggaccccaagctgtcttcaagaatgaccacgactgtcttcagtgttaaaatccatcacctaaagggccgcagcgtcgcagggtttggagagccacatgttctcaggctgccacctgcaggggtggatccatttcaagtatttatgcaaatgtgtctctgaactaaagtgtgatcttatgccaaaaaaaaaaaaaaaaaa

SEQ ID NO: 287611 - DNA, 1000 bp, Homo Sapiens
aaatttgaggagcatcaggccggagtagcagacttttagatgagtcatatttcagcattcactaagtcctcagcattccattcaaactgtcgtgtatatttggcctgattttttttcaagctttgcaataatttatgttattggtaaacacttggtgactatatctcagccttttctttaacaactcacaatatattagaaacacgtctacctatactgagagtatatttacaatagaagaacatactgtatgtgactttgtaaagctagacttttgattaagaaatatataatctctggatgctatttttgcattatacactcaggcacaacgtaaaccttgatggctcatcttgctacaattacgagttgaaaaacactacttacgtatttgtatgacctattagtcagaggaaatcatacatatgctttgtaaatagactttgcagataactaaatagactgaagaaatatgttgcatttgatagaagcaattgcataaatatttggtttctatattagagtctgtgagtaaagtcaagtaataaacctaagtaggtataacagatttttaaaccttgaaacttgctttgatggtagagaaaatcattgaagatttacatactgtatataagatgtaaaatgtacgctgcttattaccctcaattttccagaagcaatggtatataatgcagttgaaaaaccaaaaatcttggaaaactaagacgggtcttgtttaaaatgtctctcagctttggcaaccttcaaatcttaatcaactatttaaagcattactgtgtcttgtagcctgcattccacaacagctctgttattcaggtaaaagacttgaactgagccgtttgggacctatactgtaatattttcattgaggaacaatatcctattttgtaaagcatttccctatgtgtgactttaaactgtaaaattaaacactgcttttgtgggttcagtgggcataataaatataaattgtaaacta

SEQ ID NO: 287612 - DNA, 1000 bp, Homo Sapiens; identical to SEQ ID NO: 221973

SEQ ID NO: 287613 - DNA, 1000 bp, Homo Sapiens; identical to SEQ ID NO: 221974

SEQ ID NO: 287614 - DNA, 1000 bp, Homo Sapiens; identical to SEQ ID NO: 116749

SEQ ID NO: 287615 - DNA, 1000 bp, Homo Sapiens
gaagagaggaaaagaacaaatcacctgctgcagtaacagaaccagagacaaataaatttgatagtaccggatatgataaagacttagtagaagctttggaaagagatataatttcccagaatcccaatgttcgatgggatgatatcgctgatttagtagaagctaaaaagttgcttaaggaagccgtagtgttaccaatgtggatgcccgaattctttaagggcattaggagaccatggaaaggagtactgatggtcggcccacctggcacggggaagacgctccttgctaaagcagtagctacagaatgcaagacaacattcttcaatgtctcttcatcaactttgacttccaaatacagaggagaatctgagaagcttgttcgtcttctgtttgaaatggctcgattttattctccagccaccatatttattgatgagatagactccatctgtagtcgccgagggacttctgaagaacatgaagcaagcagaagggtgaaagcggagctgctggttcagatggatggtgttggaggtacttctgaaaatgatgacccttccaaaatggttatggttctggcagctactaattttccctgggatatagatgaggctttaagacgacgccttgagaaacgaatctatattcctttgccgtcagcaaaaggcagggaggagctattacgaataagtctacgtgagttggaattggctgatgatgttgaccttgcaagtatagcagaaaacatggaaggttattcaggtgcggacattaccaacgtgtgcagggatgcgtccttgatggcaatgagaaggcgcattgaaggtttgactccagaggaaatccgaaatctttccaaagaagaaatgcacatgcctacaactatggaggatttcgagatggctttaaaaaaggtttctaagtcagtgtctgctgcagacattgaaagatacgagaaatggatatttgagtttggatcatgctaactcgagaagcc

SEQ ID NO: 287616 - DNA, 1000 bp, Homo Sapiens
ctaggaagcaagcaggaagtctggcctcgctctcggatgcaccccccttaaaaagtggactcagctccctggcgggagccccttctttaaaagactctgagagtaaaaggggaaatacagttttgaaagatctgaaattgatcagtgataaaattggatcacttggattaggaactggagaagatgatgactatgttgatgattttaatagtaccagccatcgctcagagaaaagtgagataagtattggtgaagagatagaagaagacctttctgtggaaatagatgacatcaataccagtgataagcttgatgacctcacacaagatctgactgtatcccagctcagtgatgttgcggattatctggaagatgttgcatagacacgaagaaggaagtattctaattaacaaggacagaggactgaccggttccattttttttttttccagacaatcactcagctggaatgtctgctctctattggtgccttgcatttcaaaaacactgcagatattttttaaaagtaattttcattttactaaacaaaatacttcctatttgagcccatgtgtggaagatttaatattcttaatttaactgtacatttctttatggaaattgattatctacactcagtttcattacagggaaggaacccatgaaaacatcagtgttaagagcatgatgaaaggtgtcaataaagccgtaggatcgcgcaaccctttgtgtgtgtggctgctggtacgtgtgatctttgaaaaccttggctttagccctctggaatcagagcttacccaccatagtatattttgatattaggtggttctacacatagttggcaaaatgacttggtaaatttgtaatgctgaagtatattagtataagttaaatttgatgtgtcaactttattttgtatttccttccatttggaaggtttgttagaccattaaggttatattaaagtactcttgtgtgtgctaaaaaaaaaaaaaaaaaa

SEQ ID NO: 287617 - DNA, 1000 bp, Homo Sapiens; identical to SEQ ID NO: 116750

SEQ ID NO: 287618 - DNA, 1000 bp, Homo Sapiens; identical to SEQ ID NO: 221975

SEQ ID NO: 287619 - DNA, 1000 bp, Homo Sapiens
cagaagccagaagtcaggtatccgccttcagggccattttttctccattctattcacagagacagggaactacacagtgacgggattgaaacaaagacaacaccttgagttcagccataatgaaggcactctcagttcaggcttcctacaagaaaaggtctgggtaatgctggtcaccagccttgtggcccttcaagctttgtaagccttgtgccaaaagaaacttttaaaacagctacagcaagatgagtctgactatggcttagtatctttctcattacaataggcacagagaagaatgcaacagggcacaggggaagagatgctaaatataccaagaatctgtggaaatataagctggggcaaatcagtgtaatccttgactttgctcctcaccatcagggcaaacttgccttcttccctcctaagctccagtaaataaacagaacagctttcaccaaagtgggtagtatagtcctcaaatatcggataaatatatgcgtttttgtaccccagaaaaacttttcctccctcttcatcaacatagtaaaataagtcaaacaaaatgagaacaccaaattttgggggaataaatttttatttaacactgcaaaggaaagagagagaaaacaagcaaagataggtaggacagaaaggaagacagccagatccagtgattgacttggcatgaaaatgagaaaatgcagacagacctcaacattcaacaacatccatacagcactgctggaggaagaggaagatttgtgcagaccaagagcaccacagactacaactgcccagcttcatctaaatacttgttaacctctttggtcatttctctttttaaataaatgcccatagcagtatttggagtattttcttttctcctaaatccacaaactctcttctttctctttggacagatgacctcttgtcatagttaagcagagagtgggcaggatattcctgataggaggaactacatgaataaaggggtaag

SEQ ID NO: 287620 - DNA, 1000 bp, Homo Sapiens
ttagtgatattctcatgcctggacaaaatctttaattaaaacagtgaagacttctctataatttcaattaatggaagttgtagatcaatgaataagactggaaataataatttgcttaagaacttttagtctacatatattaatataacattaaaattgtacaactggtgattgttcaaattgttgtactactactcttcaattgtactgtgcagggaagttgggggaacagttcatactatagagagttacagtttagatgtatgtgtaaatcgattagctatttatccaactactgtatatttaggtaactagaatttcaaaatagaaaaaaaaaaactgtgtcctgttttgcacatagaaagaagcagatcagattgtcctatgttgcgctgttatatatgaatgtttggactgtacatctaaagaatgattccgtcctaacacccacccagcctgtttgaacacattctaattgtctaacatttgttgcattttaagtatgagatgactgatcttatgaatgttttgtagaaaatgttataatttaacagtctttgcgagtatacatgttttttaacaagttggaaatgtttcatctgaacctttcctaacttttttttgccagtttgagttcaaatcaaatacaccttaagttctggtttcatgttctcttgaaacattgaattgtacgtaaatataaaggatctactgttgcggaaaattaagaagctaaatactgctcagttatctttgcctgcgtgtatatttttaaaaattcactctgaagtgttatggatgcttttctttgagttctaaattttggtgggaattactttatgtctcccagttaagaagagtctccattttccagaaaatacagctaagcaagaaaaatatcttttaaatactttgcctttaaaacactttttattttgtttttctattttaaaaataaaatattattttctgaaaaaaaaaaagaaaaaaaaaaaaaaaa

SEQ ID NO: 287621 - DNA, 1000 bp, Homo Sapiens
ccccatggtgtcttcacacctgacgatgagccaggcctgagccccacacaggccagggcacattcttggattttccattccttggtcatgctggaatctctcaatgtgacatacttatgtaaatattgttactattatttatttgttccatttgagggatttggaatttttgttattttagttttatttttgaaaccaagcatctatagaaaccaagaaagtcagcatgtaagcgtcactggaaaaactggtttaagcaaatagagccgtctgggatttgtaactgaggtgcaactgtcatgaggcccaggcagctctgtaacatcttctatagatgcccctggctaccctgttgttttcatctacctcagacccctatcatggggctctaccctgtgacaagagccaaacccattctccatggcctatggaagcctcactggagtttggggcctgctgcaatggggatgagatggttttttgtagaattatacttacgttccttggatgatctctagttgattttttaagttctgagttgatgctgttaaggtacccggggtagccattggttcttggatctgtgttagaatgagtgctttcccttcctactgatgtgattgtggattaggaattcgtgaccgagtgatttttggccagtggttgggtttaaaattctattaaaatttgtagtttgggctgggtgctgtggctcatacctataatcccagcactttgggaggccgaggggggcagatcacttgagcccaggagttcgagagcagcctgggcaacatgacgaaaccccgtctctacagagaatacaaaaattagccaggcatggtggcccatgcctgtagtacctgctattggtaaggctgaggtggaaggttcacttgagcctgggaggtggaggttgtagtgagccaagatcgtgccactacactccagcctgggcaacaaagcaagaccttgtctcaaaaaaaaaaaaaaaaaaaaa

SEQ ID NO: 287622 - DNA, 1000 bp, Homo Sapiens; identical to SEQ ID NO: 221977

SEQ ID NO: 287623 - DNA, 1000 bp, Homo Sapiens; identical to SEQ ID NO: 221978

SEQ ID NO: 287624 - DNA, 1000 bp, Homo Sapiens
aagatccagaagaaaatgatttgtatcaagccatcgccacagtcaccacactgctgctgcagatcggggaggtggggcagcgaggcagcagctctggaagctgctcccaggagtgtggggaggagctgcgggcttcagctccttctcctgaggactcggtttttgcagacactgggaagacgccccaggactcccaggcacttccagaggcggcagaaagggactggactgtctcccttgaacatattttagcttcacttctgactgaacagtcattagtcaacttttttgaaaagccactggacatgaaatccaaacttgaaaatgccaagatcaatcagtacaatctcaaaacttttgaaatgagccaccaatcacaatctgaacttaagctgagtaacttgtagcaagacagcagctgctatgcacactggagtccaccataccaaagcacgaaccagactgtttcttggggtcagccctaaaccgagatttcagtctaccttaccaatggggcatctggctaaacaacctgacaaactgtggccaggggaaccgacacaaccctcaagcatttctatgtattgagaattgtcagtgccctaaggtatccattggttcccttgatgccaacttacaatttttaccggatttgctgaaatgggcacttctgctgtgatgctagtgttgattttgctctcagatgaacacaatgtctcatactaaccaagaagcaagaaaagccccatgctttcatttttcacttggagtgacaatgggagaggtcaggaatcaagttcactttcaagatctaagggagtccactatctgtgcaattgtatttggcttttttttgcactgtttcaatgctggtaattgaaaccattttaatatatttggttgtattcactttatatgtccttccaaaaatgttgttgtgtacataccatgctttcaatgttggcttccaagttttttaataagaaactttttgtttttt

SEQ ID NO: 287625 - DNA, 1000 bp, Homo Sapiens; identical to SEQ ID NO: 115445

SEQ ID NO: 287626 - DNA, 1000 bp, Homo Sapiens; identical to SEQ ID NO: 116752

SEQ ID NO: 287627 - DNA, 1000 bp, Homo Sapiens
tgaatgagatggagagaagaatgaaggggtggtggttctgggtttgatttgagttcacctgtgggcagtgggcagtgggcagtgtcttggtgaaagggaacggatactactttttgcctcaccgtaaagtactcactagtaaatatttccttctctctttactcccactttttacgtttgcaggtgccaaagtaatgtccacttttccctttcatgctgcatattaactggttaattatactgcagaaaccttttcacctccactagtctgatacagtacatctgtacttccatataccttgcactgattttgtctgagtgccctgggagaagtagaaaatgattgaaagtgacttccgtatctcagcccatgactcagcaaggcagaatggccacccctgccaaagtttgcttctcttttcaacagtgcctcaccctccctctaggattaaagtgcttctgcccttccacgaactcctcctccatttcctttttgggatttgtcaccatccttctattctctggtcttctatttttggtgttgttcaagtgaaggaagagatgttccctctaatttctctctagcccattataacctgctatcttggggcaacttttgatgtatgacatgtcacccttcccaacttggtctcctccaacatgctgtcttcatgtggagccctcaccacaatccctgactccggtcatttgtgcccttctcttgtcatctctgtacactacttatattcactgtgggttgggggagctaattttaagcatgttcagtggcagctcccctccagtttcagtgtcactgttaaaatttatcaaaaagcaacttcactaggggttttcttaagggataaaggccttttacagaagctaaacccttccccacatgtggtagaatgtgctcttctatatctactcctcaataaagcatgttctctgctcaaaaaaaaaaaaaaaaaaaaaaaaaaaaaaaaaaaaaaaaaaaaaa

SEQ ID NO: 287628 - DNA, 1000 bp, Homo Sapiens
tcacatcttgaaatagaggttttttcccacatgttactaaagaaaagtcagcaaagagatttaaatcttatatttatcttaaaagtccctgatttatgataactatacattgtatgtaaattcagggatatgtatatgtatgtttgtgtgtgtgtgtgtttgtgtgtgtatacctgacatatatagtagatatatatacctattgaaattctctcactctgtgtatgtatatatacctatggaaaactagttgttgggaaaggagtacgtgattccctccctttcacttttcaaagtgagccactaaacagaaagtctaagagttcagaaatgtcccattctcctaaggactttcccttcaccatttttctagggtatagtgccactgacttacatagctagatgtttttccacaagaggatttaagggaggaatgtttataggacacacacacaaaagctctttctatttataatatcaaactgcatattcacctttatagcaacagaaaacagacattaaattaagccaaattttaaatcatttgactttgacaagcagaaattacttttaaaaaatgtatttatggctgggcgtggtggctcacacctgtaatcccagcactttgggaggccgaggcaggtggatcacttgaggtcaggagttcaagaccagcctggccaacatggagaaaccccatctctactaaaaatacaaaaattagccaagtgcagtggcatgtgcttgtaatcccagctactctggaggctgaggcaggagaattgcttgaacccaggaggcagagattgcggtgagccaagatggcaccactgcactccagcctaggtgacagagtgagactccgtctcaaaaaaaaaaaaaaaacttttttaaaatgttaaaattaatttaaatgtaaaatttctgaatactaatcttagaaatgtgtaaaagatattattttgattgttaaacaaataaaatcctgttttcaaaatgc

SEQ ID NO: 287629 - DNA, 834 bp, Homo Sapiens; identical to SEQ ID NO: 221980

SEQ ID NO: 287630 - DNA, 1000 bp, Homo Sapiens
cctgcatccttaatatccagtgacttcatctcccctttcttcaccacaattccaggcaatggcctgtcggaccagacaattctaccactgcaaagagttgtaaccattttctggtatcacatttatttttcaagacatacttttcaagacatcattcactgacccactacctgcattgagtataaatgcctggatgttaaggattccaatttaactttgaaaagaactgtctcattcatttacatttctgttacagtcagcccaggaggttacagtgagctctccactaagaatctggaagaaatgcatcactaggggttgattcccaatctgatcaactgataatgggtgagagagcaggtaagagccaaagtcaccttagtggaaaggttaaaaaccagagcctggaaaccaagatgattgatttgacaaggtattttagtctagttttatatgaacggttgtatcagggtaaccaactcgatttgggatgaatcttagggcaccaaagactaagacagtatctttaagattgctagggaaaagggccctatgtgtcaggcctctgagcccaagccaagcatcgcatcccctgtgatttgcacgtatacatccagatggcctaaagtaactgaagatccacaaaagaagtaaaaatagccttaactgatgacattccaccattgtgatttgttcctgccccaccctaactgatcaatgtactttgtaatctcccccacccttaagaaggtactttgtaatcttccccacccttaagaaggttctttgtaattctccccacccttgagaatgtactttgtgagatccaccctgcccacaaaacattgctcttaacttcaccgcctaacccaaaacctataagaactaatgataatccatcacccttcgctgactctcttttcggactcagcccacctgcacccaggtgaaataaacagctttattgctcaaaaaaaaaaaaaaaaaaaaaaaaaaaaaa

SEQ ID NO: 287631 - DNA, 1000 bp, Homo Sapiens; identical to SEQ ID NO: 116754

SEQ ID NO: 287632 - DNA, 1000 bp, Homo Sapiens; identical to SEQ ID NO: 115470

SEQ ID NO: 287633 - DNA, 1000 bp, Homo Sapiens; identical to SEQ ID NO: 116756

SEQ ID NO: 287634 - DNA, 1000 bp, Homo Sapiens
gagcaacgaggccttcccgttctccacccacaagctactgagagccgcagggcacctggtccgagccatgcggctgtcctttgtgggggagctgggctgggagctgcacattccaaaggcgtcctgcgtgcctgtgtaccgggctgtgatggccgcgggtgccaagcacggcctcatcaacgcagggtaccgcgccatcgactccctgagcattgagaaaggctaccggcactggcacgcggacctgcggccagacgacagccccctggaggcaggcctggccttcacctgcaagctcaagtcgccggtgcccttcctggggagggaggccctggagcagcagcgggccgcaggcctccgccggcgcctggtgtgcttcaccatggaggacaaagtacccatgtttggcctggaggccatctggaggaacggccaagtggtgggccatgtccggagggctgactttgggttcgccatcgacaagaccatcgcctacggttacatccatgaccccagcggtgggccggtctcgctggactttgtgaagagcggggactatgccctggagagaatgggggtgacctatggtgcccaggctcacctgaagtcgcccttcgaccccaacaacaagagggtgaagggaatctactgagggctcagaccacatgccccatcccatgctgtccatccattctcacaggtcccaaatggccctgggtcccaggaccctggacccagccagaacttgtgccctccctgtccttagcctaggcctagtcctgcgaaaacccccaaaccagatacggacagagaccaagatggcccatcctgtggtcactgactggaaggcagtctctaatccaccccaatcctcccagaaagcaaacctgtaagtgtcttgggctcagggaccatggcttgtagccctttccaagcttctaaaaggtgcttagtaaatacttgataagccccacgtgaaaaaaaaaaaaaaaaaaaaaaa

SEQ ID NO: 287635 - DNA, 1000 bp, Homo Sapiens
ctccaatctgcaggtggccatccgagaggcctatgaggcaggtctgattggcaagaatgcttgtggctctggctatgattttgacgtgtttgtggtgcgcggggctggggcctacatctgtggagaggagacagcgctcatcgagtccattgagggcaagcagggcaagccccgcctgaagccccccttccccgcagacgtgggagtgtttggctgccccacaactgtggccaacgtggagacagtggcagtgtcccccacaatctgccgccgtggaggtacctggtttgctggctttggcagagaacgcaactcaggcaccaaactattcaacatctctggccatgtcaaccacccttgcactgtggaggaggagatgtctgtgcccttgaaagaactgattgagaagcatgctgggggtgtcacgggcggctgggacaacctccttgctgtgatccctggcggctcgtctaccccactgatccccaagtctgtgtgtgagacggtgctgatggacttcgatgcgctggtgcaggcacagacaggcctgggcacagctgcggtgatcgtcatggaccgctcgacggacatcgtgaaagccatcgcccgcctcattgagttctataagcacgagagctgtggccagtgtaccccatgccgtgagggtgtggactggatgaacaaggtgatggcacgtttcgtgaggggggatgcccggccggccgagatcgactccctgtgggagatcagcaagcagatagaaggccatacgatttgtgctctgggtgacggggccgcctggcctgtgcagggtctgatccgccactttcggccggagctcgaggagcggatgcagcggtttgcccagcagcatcaggcccggcaggctgcctcttagcccaccaccctggcctgctgtcctgcgtctatccatgtggaatgctggacaataaagcgagtgctgcccaccctccaaaaaaaaaaaaaaaaaaaaaaaaaa

SEQ ID NO: 287636 - DNA, 1000 bp, Homo Sapiens; identical to SEQ ID NO: 221983

SEQ ID NO: 287637 - DNA, 1000 bp, Homo Sapiens
aaatgttatcttcaagagatgttaaatatttatatgctttgttgactagctgaaatatgaattctgttagtgttgactaaagaatctggtagttgcttaattgggcaattaaacaatttatggctctattttgtaaaacaaactactggtaattatttttaatacctattttcattctgattactctttttttaagttaaagactatcagttaattaagattgagtttttatgatggttaaaaataattctctattggtttttcaatatatttttctgtgtgttctcagattatatatttccctcaatttagagtttgctaagtgaaataaactggttcactagtagagaaagaattacgtcgcttaatacctaatatcatagttgtacaatatgaaaaaaagaataaaaagtagcagtaaaattatatactgaaaacaccaaaaatttagatgccttaatagtatatacgtgaaatactcagctgtccctttaaaaataattcattggactgcctggtggttaaaatacgattcctcatatccaaggctacttttgaagatccctctgccaaaaatatagctcacttatctaaaggtgagagctgcatagatccagtaatgtacataaagcctgaatgatgagcctatgtccctgcctaacactggtgtctcactcatctcttttacctaaattgtcctgaactttgttaagtgttctggacaaggccaagcttttctttattaaaacctcagcatgtctccctgatctgaactatttgctttctcttcaagataagttgtattttaccatggaaaaatacagtatctaacattaccattcacgttaaatgaagtttcctcataacatttatctttagttttatgaagtcatcgtgaccaatgttacagtaatttctgttagctgattgtggtaaacaatgtttaatgtgaaaagaaattaaaactttcttcatctgttgtagaaaaaaaaaaaaaaaa

SEQ ID NO: 287638 - DNA, 1000 bp, Homo Sapiens; identical to SEQ ID NO: 221984

SEQ ID NO: 287639 - DNA, 998 bp, Homo Sapiens; identical to SEQ ID NO: 221985

SEQ ID NO: 287640 - DNA, 1000 bp, Homo Sapiens; identical to SEQ ID NO: 221986

SEQ ID NO: 287641 - DNA, 1000 bp, Homo Sapiens; identical to SEQ ID NO: 116757

SEQ ID NO: 287642 - DNA, 1000 bp, Homo Sapiens; identical to SEQ ID NO: 221987

SEQ ID NO: 287643 - DNA, 1000 bp, Homo Sapiens
gacctatccgtagcattaaaaactttctgcagagcaggcttctgcctagagtttgacctatccagaagttctttctcattctctttcacctgccaatcagctgttaatctgaattttcaagagaaaacaagcaaacataactgatcagctgccggtatgttcatcgtgtgaaattgcattccaagtgagctgtgctcagcagtgcttggacacagagctgcaagctgcgctggggtggaggaccgtcacttacactctgcccaaggcagaggtcgcattgctgtatcacagtattttattcaggtttctgcaaaaaaataaaaagataacttttttaaacaaacatgaatagaattttgcaaatttaacgttttcaagatttattcaaggaaacaaaatgcctatgttcaaccactggtgttaatgaacaaagatactgtgcgtctctggggaagacgcacctaggtggcggccactcccatggccttgtctaggactcagagaccactcggctctgagcttccaggcgcctcgtctgtgtgcatctcacgcccgacgtggcttctgaaacgtgcattcaacctcaaacttttgcataaaatagaatgaatcgttttgctctgatgaaatgtaggccttacttgtatataagactgttcctgccttcggtctgtcattttcccacctgcctcccctacccaccccccacccaccacctggggcttcctctgggggtccgagggtcttcccatcacatgaagacatcaggttgggtcctgccccactgcccctccccctgttcctgccccaagccgtcaatcagattgtggagcagtacacagtcagatgaaaatactgtaaatgcactcattgggggttttttggttttacttcatatcatgtgcaatgttgtggctttaacattttatgcaactatttatgaagacctctgttgtacctgtaataaatatatagaaaaagcaaaaaaaaaaaaaaaaaa

SEQ ID NO: 287644 - DNA, 1000 bp, Homo Sapiens
cccgagatgcccgccagcaacgctttgcccacttcacggagctggccatcatctcagtccaggagatcgtggacttcgctaagcaagtgcctggtttcctgcagctgggccgggaggaccagatcgccctcctgaaggcatccactatcgagatcatgctgctagagacagccaggcgctacaaccacgagacagagtgtatcaccttcttgaaggacttcacctacagcaaggacgacttccaccgtgcaggcctgcaggtggagttcatcaaccccatcttcgagttctcgcgggccatgcggcggctgggcctggacgacgctgagtacgccctgctcatcgccatcaacatcttctcggccgaccggcccaacgtgcaggagccgggccgcgtggaggcgttgcagcagccctacgtggaggcgctgctgtcctacacgcgcatcaagaggccgcaggaccagctgcgcttcccgcgcatgctcatgaagctggtgagcctgcgcacgctgagctctgtgcactcggagcaggtcttcgccttgcggctccaggacaagaagctgccgcctctgctgtcggagatctgggacgtccacgagtgaggggctggccacccagccccacagccttgcctgaccaccctccagcagatagacgccggcaccccttcctcttcctagggtggaaggggccctgggccgagcctgtagacctatcggctctcatcccttgggataagccccagtccaggtccaggaggctccctccctgcccagcgagtcttccagaaggggtgaaagggttgcaggtcccgaccactgacccttcccggctgccctccctccccagcttacacctcaagcccagcacgcagtgcaccttgaacagagggaggggaggacccatggctctcccccctagcccgggagaccagggccttcctcttcctctgcttttatttaataaaaactaaaaacagaaaaaaaaaaaaaaa

SEQ ID NO: 287645 - DNA, 1000 bp, Homo Sapiens
ttctctgagcaaatgagtttgcaaaatgccctcatgctattggagattctcagtatgcaccccgttactgaaactccaaaaagcattgtaagaaagctattcaactttgcttagctaatcatgcctaacagatatttgatgtaatgttttctttttctttctcttgctgtttccttcttctttttttcactgtgacaacttaatatctcatgttctatgaagaacattgtggggaaaactaatcccagggaaaagataacttctctaagccaggactatggtaaagcaagtgaggctcttgtttcggtcacaaaatttaaaggcactaaaaaactcagtgttaatgtaaattttaatgcaatatttttaaaaatgaaaatcaatgtgaaagcactataaaaatattatcaaaagcttaaataaagacagattgaactctgtaccagcacaatcctgcctcactggccttaccctcctcctggccttactagtaccgcaatattttggaagtcccatgacctctgtgacttacagcttctaatagcatgatttcaatatagctgtaaaaaaactctacttatggtacaccatttttccaatttttaaaaaaatttacaaagtataagatatatattattatgtaaactcataaagatgttcatttaatcatccatgagaaagtcattttggagcaaatagctagtctttaaaatattgcatatgtgaagacaatgaaatggaattcgagctataaaaatttgtattgttttatttttacttaaaatagtaaatagtttgcttttcattgagactggctgctgatgcaccttggtaatgaatcatgattatattctaactgagatatattgagattaatgcatgattaactactctctcagtacatcaaaatcattgcagagtattagaaattgaaccattgagctaaaaatgctcaacttctgctttatattcttaaaatggcaaaaaaaaaaaaaaaaaa

SEQ ID NO: 287646 - DNA, 1000 bp, Homo Sapiens; identical to SEQ ID NO: 116758

SEQ ID NO: 287647 - DNA, 1000 bp, Homo Sapiens
tgattacatttgtggttccaaaataatttttttaaatattaatagcccatatacaaagataatggattgcacatagacaaagaaataaacttcagatttgtgatttttgtttctaaacttgatacagatttacactatttataaatacgtatttattgcctgaaaatatttgtgaatggaatgttgtttttttccagacgtaactgccattaaatactaaggagttctgtagttttaaacactactcctattacattttatatgtgtagataaaactgcttagtattatacagaaatttttattaaaattgttaaatgtttaaagggtttcccaatgtttgagtttaaaaaagactttctgaaaaaatccactttttgttcattttcaaacctaatgattatatgtattttatatgtgtgtgtatgtgtacacacatgtataatatatacagaaacctcgatatataattgtatagattttaaaagttttattttttacatctatggtagtttttgaggtgcctattataaagtattacggaagtttgctgtttttaaagtaaatgtcttttagtgtgatttattaagttgtagtcaccatagtgatagcccataaataattgctggaaaattgtattttataacagtagaaaacatatagtcagtgaagtaaatattttaaaggaaacattatatagatttgataaatgttgtttataattaagagtttcttatggaaaagagattcagaatgataacctcttttagagaacaaataagtgacttatttttttaaagctagatgactttgaaatgctatactgtcctgcttgtacaacatggtttggggtgaaggggaggaaagtattaaaaaatctatatcgctagtaaattgtaataagttctattaaaacttgtatttcatatgaaaaatttgctaatttaatattaactcatttgataataatacttgtcttttctaccaaaaaaaaaaaaaaaa

SEQ ID NO: 287648 - DNA, 1000 bp, Homo Sapiens; identical to SEQ ID NO: 221989

SEQ ID NO: 287649 - DNA, 1000 bp, Homo Sapiens; identical to SEQ ID NO: 221990

SEQ ID NO: 287650 - DNA, 1000 bp, Homo Sapiens; identical to SEQ ID NO: 116761

SEQ ID NO: 287651 - DNA, 1000 bp, Homo Sapiens
ctgagcttggctattttgttggccaatgggacattaacaagtatgatacaagcagaggcttgagaagtgcctgcacaatgaggcttgcccacttttgcagctctttggaatcctgaacccatgtgtggaaaagcctgaactgtgctgttggaaaatgagagcgatcacatggagcagtaatggagcaaagaccagccatcccagttgagataccctacaccaaccagattttcaactgctggacatatgaatgaagctatcctaggcatgcagtcttggtcaaggcaactttggctggcagtctctgagatgaccctgaatgatccccacctcctggtattctcactcttatataatcccctcctcttgagtttggactggaattagtgacttggttctagtgaatagaatgaggcagaggtaatgggatgtcatgttcaagattggttacaaaaagactgtggcttccattttgggtgcttgcttactctctcagatggctcatcataggggaaacctgctgctacatcatgagatagccctgtggaaaggtccacatgagtgaactttgaagcatatcctcccccagtttagcctttagatgaggaccacagccaaatagcttgactgtaagccagatagcttgactcatgagggaccttcagccagaggcatcttttgagccatacgaattcctgacccatagaaactgcaagacaataaatgttgttttaagttgctaaattttagggtaatttgttacacagtaataggttaataatacactggcccagattaggaaggttctgccatccatcccagccatcccaaacaactaccagaataatggattaaaacgttaactgttttaagtcactaagttttgggcagcatgataacaacccagcaaaaagctaactgatacattgattatttattgcatttcttcctccactattcttctctaacagatgaccaatactaataaactactgtgaac

SEQ ID NO: 287652 - DNA, 1000 bp, Homo Sapiens
attagaatttggaatatgatacaagtggcatcaggaaatgaggaaataatggaactattttttttaagtggaggtagtttgttctccaagggggaaaaatagaccatgaactatacacaaaagtgaatccagagattaaaaacagaaatatggaaaagctatgtactaaaatgcatatgaccttgggaatagggaaacattccttggaacaatttgagaaatacttagcggttctacttatgagtatgaatgctcaggaaatacgcactaggatatttactgtggcttgatttgtagtagccaaaaattagaaacaactgagaaagcccatcacgaacaatatgggaaattcttatgtaatactatatatctgtaaaatgcaacaaatgaaatccacatgtattaacagaaagatcccagaattgttgaggggggatcaagttgcagaatgatacagatagtacaatgacttttttgtaaatttgaattaaaagtttcctcataaaactcagtactatctattggtaatggatgcatatatgtatgtacatgtacatgtttttgaaacggattggaaggatacagaccaaactcttgatagtggtcacctgtgaagagtggagaagggaaaataatgagtgtgggaggtgggatgggtattggttaaaggggacttcagctttttatataaacatccacttctctttcaaaagacttcaagtaaatataagaagatactgattgattctggattgtggtatagggatatcttgtcttattttttgtacttttctgtatttttaaaatttctcaaaataggaatgggagtgaggatgggaatgctgtatctgtggaagtcatgttatactggattcatttccaattaaatactaaacattttatagaaaatatttctaaaattttatcacggatgaatggatggacttgctctctatgtaatatgaaattaatctattttattaaaatttaaaaggacagc

SEQ ID NO: 287653 - DNA, 1000 bp, Homo Sapiens; identical to SEQ ID NO: 116762

SEQ ID NO: 287654 - DNA, 1000 bp, Homo Sapiens; identical to SEQ ID NO: 221993

SEQ ID NO: 287655 - DNA, 1000 bp, Homo Sapiens
gagccaagccttatgagtgtgctgagtgtggtaaagcctttcgacattgttcatctcttgctcaacatcaaaaaactcacacagaagaaaaaccctaccagtgtaataaatgtgaaaagacctttagccagagctcccatctaactcagcatcaacgaattcacactggggagaagccctataagtgcaatgaatgtgacaaagcctttagccggagcactcatctgactgaacatcagaatactcatactggagagaaaccttataactgtaatgaatgcagaaagacttttagccagagcacatatctcattcagcaccagagaattcattcaggagagaagccttttggatgtaatgattgtggaaaatccttcagatatcgctctgctctcaacaaacatcagagactgcatcctggcatatgacaattctaggaacatcataaatttaggggagatatttactttagtttgtccttttgttaagtactgaagaatcagagtggatttagaaactgccttgaaatcttttaaattttcactatcatgttatggaatggaaagtacattgggctgaactaatccaattgttattaagccactctgtgacattagaaaactctactgttttaagctttagtttcctttatggaatgaaggctttggagtagattatttcaaaggtagtttggagttttataatcagttttgtatatttacaatattttcttgaatgggtttactatacatcagcattttgctgtgttgcatctagaatgtgtatgtttatgcatgttttgccaatagaatttgtgcttcagtaactagatcggggatctagtatgctcctggtctaatgcatttacattgtttaggtaactggttcctaataaaaagaattataaaataccctcaaattaacaattcaattgcatataatagcctaactcagtaagaatattaaaacttactattattcttaaaaaaaaaaaaaaaaa

SEQ ID NO: 287656 - DNA, 1000 bp, Homo Sapiens
tctattctctctcctttgctttccttgaagtcagctttggaccacaataatttcactgtagatgatatgctaggatcaaagttaaacagcattcttcactgcaggacatctcagagcatgtaacataactgcatgattatatactctaagcaatagagagcttcatgactgagtaagagttttgaagtcagcagtgaatcaagtgcccacagatttgcaggcttaagcagaacaagggaagattgatatttttggatatgctatagcagctttctcctatgaaataaaactgatgatgtttggaagtatactactctcaaaggtgtctttaaagtacaggttaatggtgaacattttcccccagtggcttcacctcattcctcccactggccttaccccttccttccccagtggaagcattttcaaaagcaaagataattttcgctggtgaacttcagaacttgccttcagggttagcttcatgtaattttaccatttcccatccccattccccaccacattatgtcaagattcaagttataaattaacgttttacttagactttgaaagagatttcatgagtaatttgaatgaaccttgctgaattaatctgaatagcaactgtctgacttgataactccagtgccagtatagtggctgctgcatagacactattcagtaaatgtctgatgaaagaaattggactttttccctttaatactgatgatgcaattttgaaatgttgcttgttctggaatacttcggaagttaaacaataaagtcagcttggagaggagatcatgatctttatactgtgaatagcagaatgtcacagatgaagaatattaaaattaggggcgtccactccaaaacatatcaccagagtgacaacttcagccctcagcctctgcaatccatatatatcctggtcttgggagtccatagaatactgtttccttctaataaaggtttcaaacaaaaaaaaaaaaaaaaaaaaaaa

SEQ ID NO: 287657 - DNA, 1000 bp, Homo Sapiens; identical to SEQ ID NO: 221994

SEQ ID NO: 287658 - DNA, 1000 bp, Homo Sapiens
cagcatgaagacgcacatggttaaaaggcataaggtgggccaggatctcttagctcagctagaagcagcaaattctcttacacccagcagtgaacttaccagccagagacagaatgatctcagtgatgcagagatagtgtctctcttctctgatgtacctgacagtacttctgctgcattgctggacacagcattggtgaactctggaatcttgactattgatgtggcttctgtgagctcgactctggcagggcacctccctgctaataataataattccgtagggcaggctgtggaccctccgtccttgatggccaccagcgaccctcctcaaagtctggatacctctctcttttttggaacggcggccactggttttcagcagagctccttaaatatggatgaggtctcaagtgtaagtgtggggccattgggatctctggactctttggccatgaaaaactccagtccagagcctcaggctttgacacccagcagtaagctaacagtggacacagatactctgactccttcgagcaccctttgtgaaaacagtgtctcagaactactgacaccagccaaagcggagtggagcgtacatcctaactctgacttctttggacaggagggagaaacccagtttggattccccaatgcagcaggaaaccatggttctcagaaagaaagaaatcttatcactgtgactggcagctcatttttggtatgaagcaactctattcattccttgccatgtggctaacttttattacagtcaattttgaggatattctggactaaatatttaagtgcagtcatttctttttggtttgcaaaaagagcacagccctggactatgagtttggagatctaaattctgatcttgagtctggaactgacaagttgtgtgaccctcagcaagtcacttaacctatctgagccttaatttccttatttataaattgtggtggtttgaacacattgctcaaaaaaaaaaaaaaaa

SEQ ID NO: 287659 - DNA, 1000 bp, Homo Sapiens; identical to SEQ ID NO: 116763

SEQ ID NO: 287660 - DNA, 1000 bp, Homo Sapiens; identical to SEQ ID NO: 116764

SEQ ID NO: 287661 - DNA, 939 bp, Homo Sapiens
atggttaaccaaagctccacaccgggcttcctccttctgggcttctctgaacacccagggctggaaaggactctcttcgtggttgtcttcacttcctacctcctaaccctagtgggcaacacactcatcatcctgctgtctgcgctggaccccaagctccactctccaatgtactttttcctctccaacctctccttcttggacctctgtttcaccacgagttgtgttccccaaatgctggtcaacctctggggcccaaagaagaccatcagcttcctggactgctctgtccagatcttcatcttcctgtccctggggacaactgagtgcatcctcttgacagtgatggcttttgatcgctacgtggctgtctgccagcccctccactatgccaccatcatccacccccgcctgtgctggcagctggcatctgtggcctgggtcattgggctagtggagtcagtggtccagacaccatccaccctgcacctgcccttctgccccgatcggcaggtggatgattttgtctgtgaggtcccagctctaattcgactctcctgtgaagacacctcctacaatgagatccaggtggctgttgccagtgtcttcatcttggttgtgcctctcagcctcatccttgtctcttacggagccattacctgggcagtgctgaggattaactctgcaaaagggcggaggaaagcttttgggacctgctcctcccatctcactgtggtcaccctcttctacagctcagtcattgctgtctacctccagcccaaaaatccctatgcccaagagaggggcaagttctttggtctcttctatgcagtgggcactccttcacttaaccctctcatatacaccctgaggaacaaggaggtaaccagggcattcaggagattgctggggaaggaaatggggctcacacaaagctga

SEQ ID NO: 287662 - DNA, 765 bp, Homo Sapiens; identical to SEQ ID NO: 221995

SEQ ID NO: 287663 - DNA, 1000 bp, Homo Sapiens; identical to SEQ ID NO: 221996

SEQ ID NO: 287664 - DNA, 1000 bp, Homo Sapiens
tgcacagtatgtttgatttttatccacaagaatgaatctgattcagaatgcttttctcagctgacatacagagcactaaatattttaaggcaagtccataggtctgaatctcttaagaattctcggcctctgtgggatttagggaagcattataaatgcattaatccttatagtcaattctgtgcctaggattttgccagggaacagttcactgactaggaaaagcactacattttaaattcagcattagtgcattgggaaggatctttactgctttgtgcttggcatgtcattattttccatttgacattagggcctttccaaaatgaatgtgaggaattgctttcacttcaagactttccttcttttcactaaaactctagaaggtgttacaagggggagggaaggggggcaaagtccttgaacattttctttggctcgtgccatgttatgatcatataccttttaaataaggggaaatagtatctttaaagttaatgtctagccaagagtttagtaaacgaagaattaaactgcactgttgatcggtgctttgtgtaaatacatctttaacatttgggtggagaggggccttaagaaggacagttcattgtaggaaagcaattctgtacatgagtttaagcattcttgttgcattgtctctgcagattctatttttgtttacaatattaaaatgtatgttagcaaaatgggtggattttcaaataaaatgcagcttccacaaaagttttgttatggtattctggtctgagatgcattttcatttttcctttctctttttattatcaatattgtcatttttccctaataaaatatacccaggtgattatatttgttgatctaataacatggaaggtttgttttatatgaattttcaaaaagatgtctctttacactttttgttaccttgtagactcttattgataaatgcaactacttattaaaattgttcactttttgtcttttgaaaaaaaaaaaa

SEQ ID NO: 287665 - DNA, 1000 bp, Homo Sapiens; identical to SEQ ID NO: 116765

SEQ ID NO: 287666 - DNA, 1000 bp, Homo Sapiens
cctttagcccaagctttcttcaaattagagaaggttaaacagagctttgacctagaggagtacagcctctcacagtctaccctggagcaggttttcctggagctctccaaggagcaggagctgggtgattttgaggaggattttgatccctcagtgaagtggaagctcctcccccaggaagagccttaaaaccccaaattctgtgttcctgtttaaacccgtggttttttttaaatacatttatttttatagcagcaatgttctatttttagaaactatattataagtacagaaatggttctccgtgtggtgggaggaggaggttcgggtgctgggtaagtgccatgtcagtgtggacagaggcatttgactaagccaacctcctctcacagcctctgtatctctgcaggccatactggttccattgttctgtataatactgaataaataaatttacttttacatgatcgtataagtttctagataagataaacaaattttgtttaaatttttttaataaaaatcttaaaacactttttttctaacctagactgagaaattcatgtttacttttctaggtgtatgatactttgtaaagttgatactttcctaagaatttaacatgtcatatttttgaaatagatttaagtgtgcttcttattgctaaaaatactaaatgtcatgggtcatagtatctgatatcaatatcgttgataacatatccacaggtaacaccatgatgtaggcataaatggaaaacaaaaaccctactatttcaaatatattgtacttttttatttctgtaagccaactgtgtgccattttcactggacttttaaatctagactttagtgatgtctacattgtaaatgatcttttgtggatatttgtcacttggtttcagaaagttcacaaatgtagcaacagctcacatgactgagtaggtagaaaatgtgaaataaatctcatatatatagttttgaaaaaaaaaaaaaaaaaa

SEQ ID NO: 287667 - DNA, 1000 bp, Homo Sapiens; identical to SEQ ID NO: 221998

SEQ ID NO: 287668 - DNA, 1000 bp, Homo Sapiens; identical to SEQ ID NO: 116766

SEQ ID NO: 287669 - DNA, 1000 bp, Homo Sapiens; identical to SEQ ID NO: 221999

SEQ ID NO: 287670 - DNA, 1000 bp, Homo Sapiens
cacgtgtttgctgtgcttgcaccccaggtaaacctgcattgtagcaatttgtaaggatattcagatggagcactgtcacttagacattctctgggggattttctgcttgtctttcttgagctttttggaaggataattctgataaggcactcaagaaacgtacaaccacagtgctttcttcaaatcatatgagaaatactatgcatagcaaggagatgcagagccgccaggaaaattctgagttccagcacaattttctttggaatctaacaggaatctagcctgaggaagaagggaggtctccatttctatgtctggtatttgggggttttgtttgtttttgctttagcttggtgaaaaaaagttcactgaacaccaagaccagaatggatttttttaaaaaaatagatgttccttttgtgaagcaccttgattccttgattttgattttttgcaaagttagacaatggcacaaagtcaaaatgaaatcaatgtttagttcacaagtagatgtaatttactaaagaatgatacacccatatgctatatacagcttaactcacagaactgtaaaagaaaattataaaataattcaacatgtccatctttttagtgataataaaagaaagcatggtattaaactatcatagaagtagacagaaaaagaaaaaaggactcatggcattattaatataattagtgctttacatgtgttagttatacatattagaagcatatttgcctagtaaggctagtagaaccacatttcccaaagtgtgctccttaaacactcatgccttatgattttctaccaaaagtaaaaagggttgtattaagtcagaggaagatgcctctccattttccctctctttatcagaggttcacatgcctgtctgcacattaaaagctctgggaagacctgttgtaaagggacaagttgaggttgtaaaatctgcatttaaataaacatctttgatcacaaaaaaaaaaaaaaaaaaaa

SEQ ID NO: 287671 - DNA, 1000 bp, Homo Sapiens
aaattcctggcaactggtacagaaccaacctagaggctttgcagttggcaagctaactcgcggccttatttctgcctttaatctcccacaaggcatctgttgctttgggtcctccacgactcttaggcccgcctcaacaacccaggcacctcctaggtaggctcaaaggtagacccgtttccaccgcagcaggtgaacatgaccgtgttttcaactgtgtccacagttcagatccctttccagattgcaacctggcctgcatcccagctccttcctgctcgtgtcttaacctaagtgctttcttgtttgaaacgcctacaaacctccatgtggtagctcctttggcaaatgtcctgctgtggcgttttatgtgttgcttggagtctgtggggtcgtactccctcccctcccgtccccagggcagatttgattgaatgtttgctgaagttttgtctcttggtccacagtatttggaaaggtcactgaaaatgggtctttcagtcttggcatttcatttaggatctccatgagaaatgggcttcttgagccctgaaaatgtatattgtgtgtctcatctgtgaactgctttctgctatatagaactagctcaaaagactgtacatatttacaagaaactttatattcgtaaaaaaaaaaagaggaaattgaattggtttctacttttttattgtaaaaggtgcatttttcaacacttacttttggtttcaatggtggtagttgtggacagccatcttcactggagggtggggagctccgtgtgaccaccaagatgccagcaggatataccgtaacacgaaattgctgtcaaaagcttattagcatcaatcaagattctaggtctccaaaagtacaggctttttcttcattaccttttttattcagaacgaggaagagaacacaaggaatgattcaagatccaccttgagaggaatgaactttgttgttgaacaattagtgaaataaagcaatgatctaaact

SEQ ID NO: 287672 - DNA, 1000 bp, Homo Sapiens
tttataaatggaacatctatcaaaataagtaactgtttataaaattcagtttttgtagggttttccaaggaaaaatcaccttggttgaatgtttctcactcattaaactttgcagaagtgattcatattcagtactgtttttaatcactttttaaaatataaggaccgaatgcaaggaaaccaaagtttattaataatttttatataactaaaataaaatagatgtggagggatctgtgatcatataaaaagggagggttactgaaagaattttagcaatatattgattcaggaaaaggagctgttttataaatgatcattcactgttcctatggttctatgtatctttcaaaccgatacctttactatttaaagagcgtaaatagtgaaagtaagatggtcatacttactgactttatctatttaagtttgatggagataaactatatcttggctagtggctactgtgtctgtgaatgtaaccagtacttctttaagctctattcagtagggttccagccactgcttttttgttgtttctagccactgttttttttttcttgtttccttataaaacaggtaataaccaatcattttgtgtttgtatttccattcctttttatttctgcctttgtgtagactgatgattaagtaggcaaactacttctactttcaaagagccccaagggcttaatgaccccatttgtaactgagaaatgattcttgttttagtaatcattctataaatgatactgctggattgattgccgtgggttgatagctggaggaattgttttggacaatactaacatgtgaatttatgtcttagttttatttgcagtcttgctaagtaaaatgagtctttgtatctacttttttattaaagtgaaatttagcaatagttaatattaggtgacataaataaaacatcccagactagtgagttaagtacaagatctctctaaaaataaacagatgaaaatctatccccattatcgat

SEQ ID NO: 287673 - DNA, 1000 bp, Homo Sapiens
acacaggtcagcctggctgcctccggctccttactgtcatttgctcattcctcttgtattcttgaagtcaaatcttcttttttctcaccttcaagagtctgcgttcacaactaaacactaagtgccctttcttatttcctcctaaagaagaaacagattcttgagagagcagagacaaaaaaatagaactaggcagcatagatgaaacaactgcatgacatgggaagaagacaactaaaccccgaggagaatgcactggaatggacagttgctcttaaaccctacccagagggcctcccccagctggaccctcatacacagtgtgtgtatccaaaaggccattgctatttcagcaaatatttgttgagtacttctccatgccggacacttgggaaagagaaatgaacgacacaggcaatgcccctgccctgtgggccttatattatagtcaaggtaacagaatcaacaagccaacacaaaaataaagaacttcaaatagggataagaactctaacaaacacaaggtattttggtcaagaaggaatgtggggtgggcagtggggaacgtaacttaaattagatcatcagaaagtcctccctgaggagatggatttttttttgtttttttagagacggggtttcactctgtcacccaggctgggaattgcagtggcacaatccctcactgctgcctcaacttcctgggctcaagtgaccctcctgcatcagcttcccaagtagctgggactgcaagtgtgtaccaccacatccagctaacatttttgggggtgggaagagatggggtcttactatgttgtccaggctaagaggtgggatttgagctgagacttgaatgcccaggagttaaatgtcttaagatatggagcaggccgttagaaaggagggagcagcaactggaaggtagaatagtcttattcaaggaataagaactatgtaatcacagcatggtgaagagttaggaagtgaaaaaaaaaaaaaa

SEQ ID NO: 287674 - DNA, 1000 bp, Homo Sapiens
ctaaggtgacagagcagtgctggaatagcatctcctttcactttcccaaaactgccacagatagctgccactggcatgctctttgattcctggaagcaaacgtgggactgtcggaggaaagggattgttctggtcttactcataactgggtggtttgagggtgactgaagtcgtgcttttcctgtgtgtgctgccagcacagggctgtaaatgcagatattgcgcctgtgtgcgtgtgtataagtcaagctccaagaggctcctgaatgtgactggcgtgctgagaatgtgtttacgctgtttaatgtctgccaggtgagggttacactgaagatgcacaatccctaaaataaagatcaccacttccccaaagaagcagccctcgggtccatgtgttgttcagacatgtgaagagaagcaagacagagggtctcagatggacgagggctctccaagggaatgcctggggattcacccagtggtccccagaggtgctccatggaggcaacaagtcattccatgaagccccagaggtagaagggacctcaagcaccacgccctccagggcagccgtgcagacgaccttggttcacttttcaggggtcgtcccaactctgtatctccagccactccaactgtggaggctgtaaatccagattttcactgttccagtctcctttgcagcttaggatggctatgtgatcaggtgtggccaatgaaattgaagaggaagtctacctgggcttctgggaaagcttttccaataaaagacacaggcatggctaacacctccctgggcctcttcttcctaccttgattgagggtgtgatgcctggagccacagcagccactttgctaccatgacaaaaaggccaagagaatcacagagtcattgaccctatcattatttcaccaagccaataccagccgccatccttctccagaattcttgtaaataaaataaatccctctttgtttaaaaaaaaaaaaaaaaaaaaaa

SEQ ID NO: 287675 - DNA, 1000 bp, Homo Sapiens; identical to SEQ ID NO: 116768

SEQ ID NO: 287676 - DNA, 1000 bp, Homo Sapiens; identical to SEQ ID NO: 116769

SEQ ID NO: 287677 - DNA, 1000 bp, Homo Sapiens
ctgcgccccaagacactcctgctcaccagctccgagatcttcctcctggatgaggactgtgtccactacccactgcccgagtttgccaaagagccgccgcagagagacaggtaccggctggacgatggccgccgcgtccgggacctggaccgagtgctcatgggctaccagacctacccgcaggccctcaccctcgtcttcgatgacgtgcaaggtcatgacctcatgggcagtgtcaccctggaccactttggggaggtgccaggtggcccggctagagccagccagggccgtgaagtccagtggcaggtgtttgtccccagtgctgagagcagagagaagctcatctcgctgttggctcgccagtgggaggccctgtgtggccgtgagctgcctgtcgagctcaccggctagcccaggccacagccagcctgtcgtgtccagcctgacgcctactggggcagggcagcaggcttttgtgttctctaaaaatgttttatcctccctttggtaccttaatttgactgtcctcgcagagaatgtgaacatgtgtgtgtgttgtgttaattctttctcatgttgggagtgagaatgccgggcccctcagggctgtcggtgtgctgtcagcctcccacaggtggtacagccgtgcacaccagtgtcgtgtctgctgttgtgggaccgttgttaacacgtgacactgtgggtctgactttctcttctacacgtcctttcctgaagtgtcgagtccagtcctttgttgctgttgctgttgctgttgctgttgctgttgctgttggcatcttgctgctaatcctgaggctggtagcagaatgcacattggaagctcccaccccatattgttcttcaaagtggaggtctcccctgatccagacaagtgggagagcccgtgggggcaggggacctggagctgccagcaccaagcgtgattcctgctgcctgtattctctattccaataaagcagagtttgacaccgtc

SEQ ID NO: 287678 - DNA, 1000 bp, Homo Sapiens
tggggcaaacgctgcttcgtggcccccgggggcacaagacaccggcccctcccacccccctgcctctctgaagggccatggctatgcttccctggctccaagggcccatttcctcctagatgcccttttggcctttgtgagggagcgaggaacaggctcgaaggctccggggtatctgccttctgctgggctcctgtgacaggccttctgtacccagcgtttgtacttgcctcccccaacagtgggcctgttctacccgtgcaggccccaggagagccgcaggggcctgccacacactcccagctcaccctcaccccagcctcttccccacattaggggtttcttggaagctggctctcactcccctccaccctcagctagaggtaggatatccctgattcctgggctcccagccttaaaactcactgcctcccccaagggccccctctaaggagggtgtgggggagccctgagggctgcctctctgccagtcagccacagagaccctcctcctttcacgaggaaaagaccttcccctgaacccctaaaaatgtttacagtctctgctggttccctctgtgtaaataccactaccacccgtgcgttatccagcccgcccggcctggcccggacgctgccatctctctttctgggagtttagacaatgttgcccttggatttttttctctctcttaatttctccctttgctttggggggtaattgggtattgggaggaggggtgtggggaggggtcaaggggtttattacctgatcattttctttaggaagaggttttagggaaaagaaaatggggtgggggtgggggtggtaaggggagaccggggagtcagtttcagacagttctctatgcttaacttatttatttattgcattttacttttaaagagttggtcttttctgtctaaataaagaaaaaagtttaaaagcatcaaataagagtcttggaaggttgagggtaggggattgttccctacccac

SEQ ID NO: 287679 - DNA, 1000 bp, Homo Sapiens
caaccagcacagcagaactggggtccagaggggagcagggtgtgcagctgggagaggtctcaggagtggaggctgagcctagtcctgatggaatggagaagcagtcatggagacaaaggcttgaacacctgcagcaagcagtggcccggctggagattgacaggagcaggctgcagcgccacaatgtccagctgcggagtaccttggagcaggtggagcgagaacggaggaagctgaagagggaggccatgcgtgcggcccaggcagggtccctagagatcagcaaggccacggcttcttcacccacacagcaggatgggagaggacagaagaactcagatgccaagtgtgtggctgaactgcagaaagaggtggtcctgctgcaagctcagctgactttggagcggaagcagaagcaggactacatcacccgctcagcacagaccagccgtgagctagcaggcctgcaccacagcctctcacactcacttcttgccgtggcccaggcccctgaggccactgtcctggaggcagagacccgcaggctggatgagtccctgactcaaagtctgacatccccagggccagtcctgctacaccccagccccagcactacccaagccgcctccaggtagcagccacagccaggagcacacagacagaagactgtgtcatgggtcatggcccctccgcacacctacaggtttgccaaaggaaaagcctggctctgttaggcacccaggagccccaggtcggcgggtgttcccaggaagaggaagtaaatctgcaaccctggggaggaccccaactcacctgggaatgaggcaaattgcatttgcttgctccctatggaatcacccagaggggtgccttgccctggctgagggacatgtactgcctctcatctagaatttattttcctagcacttcaccacctccttcatcttctccttcaacaataaaccctgagatctttgcattcaaaaaaaaaaaaaaaaaa

SEQ ID NO: 287680 - DNA, 1000 bp, Homo Sapiens
ctaaatgtatttgatgtgaattaaaataaatattttttcatgtgaaatttattttggttcctaaaatggaagcctaccacattgcattgtaatacagtgtattatgttcagtgtctaaaaactgctaattaagtcataatttaagatgctatgtatctgttatttaaaacatggagaaacagggcctttattccattcatattcataagagcatatttatcctgcattgaaaatgcattacttttgcacattgatattaactgttgtccaacaaataagtatcggagtacgtgagaatattcccagcccagtgatgatttggttctgaggctgatgtgagaaagctgatgtaaaaaatgtatgcatattggcttaccttactcaatttaaagtcaaaagccaacagccaggagcagctcaggtacttcagatgtgcttaatatggagtgaaaactggaccagaggtggaaagatgtatttgccccagttcacttcaaagcagcaaacgttgtttaagcattttagtttgaaccaggcattgtgttaggaatccagggataaagatgaatgaaatgtatttctgttcttcaggagttcacattctagcatatgccttttttcccccagtcatgcactctttttagcagtcttatatgtactagaaaagattttttaaagtttatttaaagctgtgtagatgaaggcttgatctaaaatagtataaggtctccagcttcagtaaaagtttttagtgtttacttaaattagtaatttctcactttctgtctggttaaaatgtcttaaaaagtagaattttcttctttaatccgtttagtagttacctcccttttacttttcaaattcacaaaattacatttctcataaattgtatagtatttaacttataatagttaatatttgtctttttaagatgactgtacatgtaagaaaaaagcttattaaaaacttgatcaaagaaaaaaaaaaaaaaaaaaaaaaa

SEQ ID NO: 287681 - DNA, 1000 bp, Homo Sapiens; identical to SEQ ID NO: 116770

SEQ ID NO: 287682 - DNA, 1000 bp, Homo Sapiens; identical to SEQ ID NO: 116771

SEQ ID NO: 287683 - DNA, 1000 bp, Homo Sapiens; identical to SEQ ID NO: 116772

SEQ ID NO: 287684 - DNA, 1000 bp, Homo Sapiens; identical to SEQ ID NO: 116773

SEQ ID NO: 287685 - DNA, 1000 bp, Homo Sapiens
ctcatgagctctggcatgccatgaagggagtaggcactgatgagaattgcctcattgaaatactagcttcaagaacaaatggagaaattttccagatgcgagaagcctactgcttgcaatacagcaataacctccaagaggacatttattcagagacctcaggacacttcagagatactctcatgaacttggtccaggggaccagagaggaaggatatacagaccctgcgatggctgctcaggatgcaatggtcctatgggaagcctgtcagcagaagacgggggagcacaaaaccatgctgcaaatgatcctgtgcaacaagagctaccagcagctgcggctggttttccaggaatttcaaaatatttctgggcaagatatggtagatgccattaatgaatgttatgatggatactttcaggagctgctggttgcaattgttctctgtgttcgagacaaaccagcctattttgcttatagattatatagtgcaattcatgactttggtttccataataaaactgtaatcaggattctcattgccagaagtgaaatagacctgctgaccataaggaaacgatacaaagagcgatatggaaaatccctatttcatgatatcagaaattttgcttcagggcattataagaaagcactgcttgccatctgtgctggtgatgctgaggactactaaaatgaagaggacttggagtactgtgcactcctctttctagacacttccaaatagagattttctcacaaatttgtactgttcatggcactattaacaaaactatacaatcatattttctcttctatctttgaaattattctaagccaaagaaaactatgaatgaaagtatatgatactgaatttgcctactatcctgaatttgcctactatctaatcagcaattaaataaattgtgcatgatggaataatagaaaaattgcattggaatagattttatttaaatgtgaaccatcaacaacctacaacaa

SEQ ID NO: 287686 - DNA, 1000 bp, Homo Sapiens; identical to SEQ ID NO: 222004

SEQ ID NO: 287687 - DNA, 1000 bp, Homo Sapiens; identical to SEQ ID NO: 116775

SEQ ID NO: 287688 - DNA, 1000 bp, Homo Sapiens; identical to SEQ ID NO: 222005

SEQ ID NO: 287689 - DNA, 1000 bp, Homo Sapiens
tccgagaatctgagcctgaacctgatgtaaggaaatcaaaaggatccatgttctcacaagctatgaagaaatgggtgcaaggaaatactgatgaggcccaggaagagctagcttggaagattgctaaaatgatagtcagtgacattatgcagcaggctcagtatgatcaaccgttagagaaatctacaaagttatgactcaaaacttgagataaaggaaatctgcttgtgaaaaataagagaacttttttcccttggttggattcttcaacacagccaatgaaaacagcactatatttctgatctgtcactgttgtttccaggagagaatgggagacaatcctagacttccaccataatgcagttacctgtaggcataattgatgcacatgatgttcacacagtgagagtcttaaagatacaaaatggtattgtttacattactagaaaattattagttttccaatggcaataacccatttatgagagtgttttagcctactggaatagacagggaccacatcctctgggaagcagataagcatagaactgatacttgatgcacactcgtagtggtaactcatccctaatcagcattgtaaagcaggtgccagaggtggtttgctttgtccttccaaagcaggtgagtcagccccaccgagagccaggcagctttgagtggcagcgtggtgctagcagcttcagcggaacagggtgagagttaattatgcagtcttcttgacagcggcattaatttggaaggaaactgacaagtcatgggtcaagtttcagtgacttcctccttcctctgatggcagtatatagttttcacattttaattcctcctcctgagatgcactatacttaaaaccattctctcccctgctaacagaagggtgtgaatctggtttactttgagcattaggatttgcccctttggaattctgcactccagttacttaactttcccttcagaatacatgtggaaaaaaaaaaaaaaa

SEQ ID NO: 287690 - DNA, 1000 bp, Homo Sapiens; identical to SEQ ID NO: 116776

SEQ ID NO: 287691 - DNA, 1000 bp, Homo Sapiens
ccccagagagagcccccacaagctcctcaggaaacaggattgctgatgtctgggaacctgatcaccagcttctctggaggccgtaaagatggatttctaaacccactgggtggcaaggcaggaccttcctaatccttgcaacaacattgggcccattttctttccttcacaccgatggaagagaccattaggacatatatttagcctagcgttttcctgttctagaaatagaggctcccaaagtagggaaggcagctgggggagggttcagggcagcaatgctgagttcaagaaaagtacttcaggctgggcacagtggctcatgcctgaaatcctagcactttgggaagacaatgtgggagaatggcttgagcccaggagttcaagaccggcctgagcaacatagtgaggatcccatctctacgcccaccctccccccggcaaaaaaaaaagctgggtatggtggcttatgcctgtagtcgcagctactcagaaggctgaggtgggaggattgcttgttccccggaggttgaagctacagtgagccttgattgtgtcactgcactccagcctgggcaacaggtaagactctgtctcaaaaaaaaaacaaaaaagaagaagaaaagtacttctacagccatgtcctattccttgatcatccaaagcacctgcagagtccagtgaaatgatatattctggctgggcacagtggctcacacctgtaatcctagcactttgggaggccaaggcaggtggatcacctgaggtcagaagtttgaaaccagcctggactacatggtgaaactccatctctactaaaagtacaaaaattagctgggcatgatggcacgcacctgcagtcccagctacttgggaggctgaggcaggagaatcactcgaacccaggaggcagaggttgcagtgagccaagacagcaccattgcaccccagcctgagcaacaagagcgaaactccatctcaggaaaaaaaaaaaaaaaaa

SEQ ID NO: 287692 - DNA, 1000 bp, Homo Sapiens; identical to SEQ ID NO: 222008

SEQ ID NO: 287693 - DNA, 1000 bp, Homo Sapiens
tgtttgcattgagaaattaaccctaaagggttttcaatagggtgtagacctccagtacctttgtaactaaagtctgtctagtcattgtaaatatttatctgtcagttttgacagattggggccagcttgatgttttaaatcttcagcccggtatgaaaacttaaaggtatatattcaattttttaccattttatggaaaatatttaaaatctgtttttacagggttttttttttttttttttttttgtaatctgtgccatgaaatttgaaaaccaccaaaaatcaagggaacttttatatattcaattccttttctggtgtaatgttaaagttgtatagattattaatgcatgcccactgaatataaccctggttttgtgataaaactgcttagattttgttgatgacattagattagtagttgcattaaataactaaattcccattgtgattaattgaaattttgtctttaagcagagagttatttgtgactataagctttgtgcttagagaatgtatgtgtttttatctgtcagtatgggaggatataaactgcatcattagtgaaattattggttgtgtaatcctttgtgaaatataattctaggtatttgatagggtattgagtgtattttgtgtgtgtgtggatgtgtgttttggggtacggggagaggcgatgctattggccatcactaccaaccagggtttcaaaaagtattacctaagtaatttcttttatcactatctcaactgaggaagaaaaggctcaccacaagtggtgtgaaggctttgggtacttagttctaaatttttttatggtaacatatacatagccacatttacagttttaaccattttaaggcatgtaattcagtggggttaggtacattcacaatgttgtgtaatgatcaccgctgtctacttgtaaaactttttcatcaccccaaacagaaactctgtgtgcaattaaagtaatgcatttctcttcttcttaacccct

SEQ ID NO: 287694 - DNA, 1000 bp, Homo Sapiens
cacaaatatgttttaagtaacatcgctcaagtttaagtaacatcgctcaagttgataatctcttgataagctctgttgttgacattttgcagtgatacaacagctccactcatagatttaaacttttatttttacttatcttggtcataagttggcattctctcacattccacatgatatagagggctacgttttggaattttccttttcttaattgcccagagttatcagacagattataaaaatggcttttaatggcttaaaccatttctaaacctctatcttagcagatcaatgcaggatctaattcttttgataagttctagctctaaaagtgatagtgggactgtatgttttctgatactggtggcttatgttattaaaccttttttaaaaaaggttcactctaaaagctgaactacatccttagttttcagtctacttgactctatcaggagctttttaaggaaagtaagtataacatgcaaaggaagctttttttgtattcattttggactcctgtcaataaaaatagaagtttgttgactcgttttatgtttcaatggtgtgtgtctttttactatcaggacataaatagggcaatccacttctttatttttcaactaaagattgaatagtattgtacattactgctaaagtgactgctatttctgtatactgtagaaaaacccaggagtgagagggatttcccctcatagtacaactggaaggatagtgcttgtaaagagtagagatgtgtacatgatgaatcattgagggagggtggatatttttattcctagatatggaggaaacataagtctgtagtattataaaactgattgtaataattctttcctatcaaaatctccataggtcaaaatattgttggaatactaaaatttgcaaccttgtttactttaaaaggttgccactttcagtgcagaatactaccggcatcttgttactgcaatagttggaaataaaatgtgaaaattaa

SEQ ID NO: 287695 - DNA, 1000 bp, Homo Sapiens; identical to SEQ ID NO: 222011

SEQ ID NO: 287696 - DNA, 1000 bp, Homo Sapiens
tatgcccctctatgcagtcatgtatcctgtgtttaatgagctagaacgagtaaatctgtctgcagcccagacactgagagccgctttcatcaaggctgaaaaagaaaatccaggtctcacacaagacatcattatgaaaattttagagaaaaaaagcgtggaagttaacttcacggagtcccttcttcgtatggcagctgatgatgtagaagagtatatgattgaacgaccagagccagaattccaagacctaaacgaaaaggcacgagcacttaaacaaattctcagtaagatcccagatgagatcaatgacagagtgaggtttctgcagacaatcaaggatatagctagtgcaataaaagaacttcttgatacagtgaataatgtcttcaagaaatatcaataccagaaccgcagggcacttgaacaccaaaagaaagaatttgtaaagtactccaaaagtttcagtgatactctgaaaacgtattttaaagatggcaaggcaataaatgtgttcgtaagtgccaaccgactaattcatcaaaccaacttaatacttcagaccttcaaaactgtggcctgaaagttgtatatgttaagagatgtacttctcagtggcagtattgaactgcctttatctgtaaattttaaagtttgactgtataaattatcagtccctcctgaagggatctaatccaggatgttgaatgggattattgccatcttacaccatatttttgtaaaatgtagcttaatcataatctcacactgaagattttgcatcacttttgctattatcattcttttaagaattataagccaaaagaatttacgccttaatgtgtcattatataacattccttaaaagaattgtaaatattggtgtttgtttctgacattttaacttgaaagcgatatgctgcaagataatgtatttaacaatatttggtggcaaatattcaataaatagtttacatctgttaaaaaaaaaaaaaaaaaa

SEQ ID NO: 287697 - DNA, 1000 bp, Homo Sapiens; identical to SEQ ID NO: 116778

SEQ ID NO: 287698 - DNA, 1000 bp, Homo Sapiens; identical to SEQ ID NO: 116780

SEQ ID NO: 287699 - DNA, 1000 bp, Homo Sapiens; identical to SEQ ID NO: 222013

SEQ ID NO: 287700 - DNA, 1000 bp, Homo Sapiens; identical to SEQ ID NO: 222014

SEQ ID NO: 287701 - DNA, 1000 bp, Homo Sapiens; identical to SEQ ID NO: 116782

SEQ ID NO: 287702 - DNA, 1000 bp, Homo Sapiens; identical to SEQ ID NO: 116783

SEQ ID NO: 287703 - DNA, 1000 bp, Homo Sapiens
cgcctgtggaagctgagaggaccccgtggaattgcatcttctgcaggatgaaggagtctccgggaagccaacagtgttgtcaggaatctgaggtcctggagaggcagatgtgtcctgaggaacagttgaaatgtgagttcctcctcttgaaagtctattgctgttctgagagctccttttttgccaagattccatactattattatattagagaggcgtgtcaaggcctgaaggagcccatgtggttggataaaatcaagaaaaggctgaatgagcacggttacccccaagtggaggggtttgtacaagacatgcgcctcatcttccagaaccacagggcctcttacaagtacaaggattttggccaaatgggatttagactggaggctgagtttgagaagaatttcaaggaagtgtttgctattcaggaaacaaatgggaacaattgactggattagtggatgctgaaagcattcagcaaatggcaccctaaaatatgccgctggtttgccactgacttcaaaatgaggtcacttgggcacagcacatgcagggaggggcttttctctgagcctccttcatctgcccaaagacaaatcctcaaaaggaaattcaatcatcatgaatcacaaccccaagtatctcatcagccagggaagagtaagtgggatcacagggaaggatgttggcagcgacaccatcccatacaggctcttacctcttctcctgagggctgctccagacaacatttattacccagaagaccttttgtctgaaaaccagccaagctttattcaggacacacttcttgccttcactttcccacttccgtggccacctccatgcagaagccctaagcccacattctttcgatagctcacggtggtgcatgagtgtccatcatctgactcttctcggagtctcatattttgtgggactcctgtgcaaacatatgttattaaaatttttttcctcctgttaaaaaaaaaaaaaaaaaaaa

SEQ ID NO: 287704 - DNA, 1000 bp, Homo Sapiens; identical to SEQ ID NO: 116784

SEQ ID NO: 287705 - DNA, 1000 bp, Homo Sapiens
tcctctgctttgtgctccatgtcatctcctggctcctcatctttagcatccttctcgtctttgactatgctgagctcatgggcctcaaacaggtatactaccatgtgctggggctgggcgagcctctggccctgaagtctccccgggctctcagactcttctcccacctgcgccacccagtgtgtgtggagctgctgacagtgctgtgggtggtgcctaccctgggcacggaccgtctcctccttgctttcctccttaccctctacctgggcctggctcacgggcttgatcagcaagacctccgctacctccgggcccagctacaaagaaaactccacctgctctctcggccccaggatggggaggcagagtgaggagctcactctggttacaagccctgttcttcctctcccactgaattctaaatccttaacatccaggccctggctgcttcatgccagaggcccaaatccatggactgaaggagatgccccttctactacttgagactttattctctgggtccagctccataccctaaattctgagtttcagccactgaactccaaggtccacttctcaccagcaaggaagagtggggtatggaagtcatctgtcccttcactgtttagagcatgacactctccccctcaacagcctcctgagaaggaaaggatctgccctgaccactcccctggcactgttacttgcctctgcgcctcaggggtccccttctgcaccgctggcttccactccaagaaggtggaccagggtctgcaagttcaacggtcatagctgtccctccaggccccaaccttgcctcaccactcccggccctagtctctgcacctccttaggccctgcctctgggctcagaccccaacctagtcaaggggattctcctgctcttaactcgatgacttggggctccctgctctcccgaggaagatgctctgcaggaaaataaaagtcagcctttttctacaaaaaaaaaaaaaaa

SEQ ID NO: 287706 - DNA, 507 bp, Homo Sapiens; identical to SEQ ID NO: 116785

SEQ ID NO: 287707 - DNA, 1000 bp, Homo Sapiens
tggggagtgaggggtcttggaggcagggctgtcccacagggcgcccgccgacctgcacctgtctgtgaagtatgtagggtgggcagaagccacagtcgccgccgccaggggcttgctcctggctctgtcctttgcttccctccgtcctcgctcagttgtgatccagcagcccccctccccactgcctccccagctctcagtgaccccgactgtctcctgacttagccgaggtaaggtcagtgcagcagacagggccagactggggtgtggggggctgagctgggcacatgagtgagggctctggcttactgggaaacagcgattgacctgtgcttctgacagcccccgagacaccttgaggaggccgctccttcccagacacacccccacgcccccactggacggcattggaggaagggacagctgcttgggttctaatgctcctgctctcttctctttcccctccaaccagttcaatctcatccctcccagcagctccccttccaccccccggggaactgaagattgtcctggccgcgacctgagacctccatgagtggagggaagagtgatctatgtctcttcccccagcagctcggaccactcccagccccccatccccccgttccccaggggagctggggaattcctgccaagcaccttgaatgggaggggcctcacagagggcagggccagggtccagcaggggtggggggttcctgctctgcccctgcccgtccccacccagtcttgccctcccatcctctcatctattcccccgctggagacggaagatcttttattttctattatttataacttcagacttgggccccctgttctttctttcccattaacttgagtgacctgtgtgagagacagacagatgccccacgaggatggctggacaaggacttttactttttattacataaaaatattaaaaaataaataaaaaaaataaaattttaaactaacttaaaaaaaaaaaaaaaaaaaa

SEQ ID NO: 287708 - DNA, 1000 bp, Homo Sapiens; identical to SEQ ID NO: 222015

SEQ ID NO: 287709 - DNA, 1000 bp, Homo Sapiens; identical to SEQ ID NO: 222016

SEQ ID NO: 287710 - DNA, 1000 bp, Homo Sapiens; identical to SEQ ID NO: 222017

SEQ ID NO: 287711 - DNA, 1000 bp, Homo Sapiens; identical to SEQ ID NO: 116787

SEQ ID NO: 287712 - DNA, 1000 bp, Homo Sapiens; identical to SEQ ID NO: 222019

SEQ ID NO: 287713 - DNA, 1000 bp, Homo Sapiens; identical to SEQ ID NO: 222020

SEQ ID NO: 287714 - DNA, 1000 bp, Homo Sapiens; identical to SEQ ID NO: 116788

SEQ ID NO: 287715 - DNA, 1000 bp, Homo Sapiens
gcatctgggtcctctcggccatcatcccgctgcctgaggtggtccacatccagctggtggagggccctgagcccatgtgcctcttcatggcaccttttgaaacgtacagcacctgggccctggcggtggccctgtccaccaccatcctgggcttcctgctgcccttccctctcatcacagtcttcaatgtgctgacagcctgccggctgcggcagccaggacaacccaagagccggcgccactgcctgctgctgtgcgcctacgtggccgtctttgtcatgtgctggctgccctatcatgtgaccctgctgctgctcacactgcatgggacccacatctccctccactgccacctggtccacctgctctacttcttctatgatgtcattgactgcttctccatgctgcactgtgtcatcaaccccatcctttacaactttctcagcccacacttccggggccggctcctgaatgctgtagtccattaccttcctaaggaccagaccaaggcgggcacatgcgcctcctcttcctcctgttccacccagcattccatcatcatcaccaagggtgatagccagcctgctgcagcagccccccaccctgagccaagcctgagctttcaggcacaccatttgcttccaaatacttcccccatctctcccactcagcctcttacacccagctgaggtagaggccagactcctccaacagtgaaggaaaaggcacaggtgagagtataggtgggagatttggggggatgtagaggggagggtcaaagcactcgtggtcaattttgaatctatcttaaaatactgaggtgtggagagagagacaggatcaggagcgatagagagcaggccctcagtgttgtactatttgtctcggtccttgtgtctaaggagcaatgcagaaaaaaaggtgaaataaatggaagagatagccatggaaaaaaaaaaaaaaaaaaaaaaaaaaaaaaaaaaaaaaaaaaaaaaaaaaa

SEQ ID NO: 287716 - DNA, 1000 bp, Homo Sapiens; identical to SEQ ID NO: 222023

SEQ ID NO: 287717 - DNA, 1000 bp, Homo Sapiens; identical to SEQ ID NO: 116792

SEQ ID NO: 287718 - DNA, 917 bp, Homo Sapiens; identical to SEQ ID NO: 222024

SEQ ID NO: 287719 - DNA, 1000 bp, Homo Sapiens; identical to SEQ ID NO: 116793

SEQ ID NO: 287720 - DNA, 1000 bp, Homo Sapiens; identical to SEQ ID NO: 116795

SEQ ID NO: 287721 - DNA, 1000 bp, Homo Sapiens
gaggtcttcctggacctggagcaacatctgaatgaattgatgacgaagaagtggctattagggtcaaacgctgtagacattatctgtgtcaccgtggaagactatttcaacgattttgccaaaattaaaaagccgtataagaagaggatgacggccgaggcgcaccggcgcgtggtggtggagtacctgcgggcggtcatgcagaagcgcatttccttccggagcccggaggagcgcaaggagggtgccgagaagatggttagggaggcagagcagctgcgcttcctgttccggaagctggcgtccggtttcggggaagacgtggacggatactgcgacaccatcgtggctgtggccgaagtgatcaagctgacagacccttctctgctctacctggaggtctccactctggtcagcaagtatccagacatcagggatgaccacatcggtgcgctgctggctgtgcgtggggacgccagccgtgacatgaagcagaccatcatggagaccctggagcagggcccagcacaggccagccccagctacgtgcccctcttcaaggacattgtggtgcccagcctgaacgtggccaagctgctcaagtagcctccgccggcctgccctgctcgcccctccacagcctcggtccctgcctttagaaacgcgggacagctgattgctctccttggccacacgtgctccttttagctgcacggcctgtctttaggtgccagtgtgatgcaccgggtgtgcgtcgagtgagcgtcccgaggccacgtgcggaggcccctcactgtgctgtcaaaggcctgtgggtgcagggctctgccgcacagcctctcttgggtgcttgtttgttgcagtggttgaaagtgtgtggggcacagaggacgtgcacctccctgccctcctcctccctgggccttcaccgcaccccatctgcttaagtgctcggaaccccgtcacctaattaaagtttctcggcttcctcagagaaatg

SEQ ID NO: 287722 - DNA, 924 bp, Homo Sapiens
gctccgctgaatccgcccgcgcgtcgccgccgtcgtcgccgccccccgtcccggcccccctgggttccctcagcccagccctgtccagcccggttcccgggaggatgaagttcgtgtacaaagaagagcatccgttcgagaagcgccgctctgagggcgagaagatccgaaagaaatacccggaccgggtgccggtgatagtagaaaaggctcccaaagctcggataggagacctggacaaaaagaaatacctggtgccttctgatctcacagttggtcagttctacttcttgatccggaagcgaattcatctccgagctgaggatgccttgtttttctttgtcaacaatgtcattccacccaccagtgccacaatgggtcagctgtaccaggaacaccatgaagaagacttctttctctacattgcctacagtgacgaaagtgtctacggtctgtgaagctgctgcccctgagctggaggggggtctcattctacaaagagagaggtggcccccctttcttgacctcctcctccttcaagctcaaacaccacctcccttattcaggaccggcacttcttaatgtttgtggctttctctccagcctctcttaggaggggtaatggtggagttggcatcttgtaactctcctttctcctttcttcccctttctctgcccgcctttcccatcctgctgtagacttcttgattgtcagtctgtgtcacatccagtgattgttttggtttctgttccctttctgactgcccaaggggctcagaaccccagcaatcccttcctttcactaccttcttttttgggggtagttggaagggactgaaattgtggggggaaggtaggaggcacatcaataaagaggaaaccaccaagctgaaaaaaaaaaaaaaaaaaaaaaaaaaaaaaaaa

SEQ ID NO: 287723 - DNA, 1000 bp, Homo Sapiens
ccgcagctgccgtcttggctgcagcctgagaggtgcgctgtgttccagtgcgcacagtgtcacgcagtgctcgccgactcggtgcacctcgcctgggacctgtcgcggtccctcggggccgtggtcttctccagagttacaaataacgtcgttttggaagcgcccttcctagttggcattgaaggttcactcaaaggcagtacttacaaccttttattctgtggttcttgtgggattcccgttggtttccatctgtattctacccatgctgccctggctgccttgagaggtcacttctgcctttccagtgacaaaatggtgtgctatctcttaaaaacaaaagccatagtaaatgcatcagagatggatattcaaaatgttcctctatcagaaaagattgcagagctgaaagagaagatagtgctaacgcacaatcgcttaaaatcactaatgaagattctgagtgaagtgactcctgaccagtccaagccagaaaactgatcctgtaccaaagcttgagtgtcaggttcaggctttattgctgtcttcaacaacaggtgctgcttagtcatttcttgaaaaagattggcttcaagaatggaggggaaatgcagtttctatttacctttaggctgattttccaaattatttgtgaagctgtttttagaagatgagagactaaggattcttctcttttatagctatttgccttaagaacttactttagattcttattgaattcataatacttatctctgaaaatgtctttgactgtaaatttaggaattaagatgcagagtcccatgtgtcctctgatctaaagttgcatggttggtctgaaaatagagttgggcttaatgttgacttctattactcctgcatggagcagttgttatgaatactaatacatcactttttaacttctgtaaaatacagatcataatattctataggtaatgtttaataaattgcctgaataatatacaaaaaaaaaaaaaaa

SEQ ID NO: 287724 - DNA, 1000 bp, Homo Sapiens
gcaagcaccagaccctgcagggcctcgccttccccctgcagcctgaggcccagcgggcactccagcagctcaagcagaaaatggtcaactacatccagatgaagctggacctagagcgggaaaccattgagctggtgcacacagagcccacggatgtggcccagctgccctcccgggtgccccgagatgctgcccgctaccacttcttcctctacaagcacacccatgagggcgacccccttgagtctgtagtgttcatctactccatgccggggtacaagtgcagcatcaaggagcgaatgctctactccagctgcaagagccgcctcctcgactccgtggagcaggacttccatctggagatcgccaagaaaattgagattggcgatggggcagagctgacggcagagttcctctacgacgaggtgcaccccaagcaacacgccttcaagcaggccttcgccaagcccaagggcccagggggcaagcggggccataagcgcctcatccgcggcccgggtgaaaatggggatgacagctaggaggctggagcagggccggccacgtgtggactgtggggctgcccaccttccgctccctgccaccatcctccttcctgggctccaggaaagtgtttctgggaggtcaggagggctggcagctgaacgcacttgcagcgtccgagggccaccgggctggcattttgtgacccttccctgttgctgtccctgcatctcgtctgtgtgcccagggtgtccggggaccctgcctggctggcttaagggggctgggtcaggggcctggcatgaacctggcctcccggggagctgagactagggtcccagcacagcccagaaacctttggccacaagaagtggggtcagtcagggctggggcaggggtcactgcagtttgggatggttgaatgctgtattttctaaagaataaaatatttttaaatcaagaaaaaaaaaaaaaaaaaaaaaaaaaaaaaaaaaaa

SEQ ID NO: 287725 - DNA, 1000 bp, Homo Sapiens; identical to SEQ ID NO: 222027

SEQ ID NO: 287726 - DNA, 1000 bp, Homo Sapiens; identical to SEQ ID NO: 222028

SEQ ID NO: 287727 - DNA, 1000 bp, Homo Sapiens; identical to SEQ ID NO: 222030

SEQ ID NO: 287728 - DNA, 1000 bp, Homo Sapiens; identical to SEQ ID NO: 222030

SEQ ID NO: 287729 - DNA, 1000 bp, Homo Sapiens; identical to SEQ ID NO: 222031

SEQ ID NO: 287730 - DNA, 1000 bp, Homo Sapiens; identical to SEQ ID NO: 116799

SEQ ID NO: 287731 - DNA, 1000 bp, Homo Sapiens
cactcctctaagacaaagtagattcttacaaggccctttcctttggaacaagacagccttcacttttctgagttcttgaagcatttcaaagccctgcctctgtgtagccgccctgagagagaatagagctgccactgggcacctgcgcacaggtgggaggaaagggcctggccagtcctggtcctggctgcactcttgaactgggcgaatgtcttatttaattaccgtgagtgacatagcctcatgttctgtgggggtcatcagggagggttaggaaaaccacaaacggagcccctgaaagcctcacgtatttcacagagcacgcctgccatcttctccccgaggctgccccaggccggagcccagatacgggggctgtgactctgggcagggacccggggtctcctggaccttgacagagcagctaactccgagagcagtgggcaggtggccgcccctgaggcttcacgccgggagaagccaccttcccaccccttcataccgcctcgtgccagcagcctcgcacaggccctagctttacgctcatcacctaaacttgtactttatttttctgatagaaatggtttcctctggatcgttttatgcggttcttacagcacatcacctctttgcccccgacggctgtgacgcagccggagggaggcactagtcaccgacagcggccttgaagacagagcaaagcgcccacccaggtcccccgactgcctgtctccatgaggtactggtcccttccttttgttaacgtgatgtgccactatattttacacgtatctcttggtatgcatcttttatagacgctcttttctaagtggcgtgtgcatagcgtcctgccctgccccctcgggggcctgtggtggctccccctctgcttctcggggtccagtgcattttgtttctgtatatgattctctgtggttttttttgaatccaaatctgtcctctgtagtattttttaaataaatcagtgtttacattagaa

SEQ ID NO: 287732 - DNA, 1000 bp, Homo Sapiens; identical to SEQ ID NO: 222032

SEQ ID NO: 287733 - DNA, 1000 bp, Homo Sapiens; identical to SEQ ID NO: 116800

SEQ ID NO: 287734 - DNA, 486 bp, Homo Sapiens
gccatgctgaccgcagcggtgctgagctgtgccctgctgctggcactgcctgccacgcgaggagcccagatgggcttggcccccatggagggcatcagaaggcctgaccaggccctgctcccagagctcccaggcctgggcctgcgggccccactgaagaagacaactgcagaacaggcagaagaggatctgttgcaggaggctcaggccttggcagaggtactagacctgcaggaccgcgagccccgctcctcacgtcgctgcgtaaggctgcatgagtcctgcctgggacagcaggtgccttgctgtgacccatgtgccacgtgctactgccgcttcttcaatgccttctgctactgccgcaagctgggtactgccatgaatccctgcagccgcacctagctggccaacgtcagggtcggggctagggtaggggcaaggaaactcgaataaaggatgggaccaacaaaaaaaaaaaaaaaaaaa

SEQ ID NO: 287735 - DNA, 1000 bp, Homo Sapiens
actcaactttgctgccaggtccaaggaggtgatcaatcggccttttaccaatgagagcctgcagcctcatgccttgggacctgttaagctgtctcagaaagaattgcttggtccaccagaggcaaagagagcccgaggccctgaggaagaggagattgggagccctgagcccatggcagctccagcctctgcctcccagaaactcagccccctacagaagctaagcagcatggacccggccatgctggagcgcctcctcagcttggaccgtctgcttgcctcccaggggagccagggggcccctctgttgagtaccccaaagcgagagcggatggtgctaatgaagacagtagaagagaaggacctagagattgagaggcttaagacgaagcaaaaagaactggaggccaagatgttggcccagaaggctgaggaaaaggagaaccattgtcccacaatgctccggcccctttcacatcgcacagtcacaggggcaaagcccctgaaaaaggctgtggtgatgcccctacagctaattcaggagcaggcagcatccccaaatgccgagatccacatcctgaagaataaaggccggaagagaaagctggagtccctggatgccctagagcctgaggagaaggctgaggactgctgggagctacagatcagcccggagctactggctcatgggcgccaaaaaatactggatctgctgaacgaaggctcagcccgagatctccgcagtcttcagcgcattggcccgaagaaggcccagctaatcgtgggctggcgggagctccacggccccttcagccaggtggaggacctggaacgcgtggagggcataacggggaaacagatggagtccttcctgaaggcaaacatcctgggtctcgccgccggccagcgctgtggcgcctcctgaccgtcgtctcctcactccgccttttcaaatttttgtataaccccgtgttgtgtaaatacagtttttgctccggtg

SEQ ID NO: 287736 - DNA, 1000 bp, Homo Sapiens; identical to SEQ ID NO: 222033

SEQ ID NO: 287737 - DNA, 1000 bp, Homo Sapiens; identical to SEQ ID NO: 222035

SEQ ID NO: 287738 - DNA, 1000 bp, Homo Sapiens
ccaacttcctcacagcagctgtctcaggtggcatcatcaagaggaggacagacctccgtattcacgtcagctgcagaatgcttcagaacacctgggtcgacaccatgtacattgctaatgacaccatccacgttgctaataacaccatccaggtcgaggaagtccagtatggcaattttgacgtgaacatttccttttatacttcctcatctttcttgtatcctgtgaccagccgcccttactacgtggacctgaaccaggacttgtacgttcaggctgaaatcctccattctgatgctgtactgaccttgtttgtggacacctgcgtggcatcaccatactccaatgacttcacgtctttgacttatgatctaatccggagtggatgcgtgagggatgacacctacggaccctactcctcgccgtctcttcgcattgcccgcttccggttcagggccttccacttcctgaaccgcttcccctccgtgtacctgcgttgtaaaatggtggtgtgcagagcgtatgacccctcttcccgctgctaccgaggctgtgtgttgaggtcgaagagggatgtgggctcctaccaggaaaaggtggacgtcgtcctgggtcccatccagctgcagacccccccacgccgagaagaggagcctcggtaggtggtcgctctcagaccccactgtccaccggggcgcagacccctgactcggggacttgggatgttcctcttggtgtcatattccaactcagattgagccctacattgtgctgcacctggtcatacggagttgaatcagacctggttcccgcctcccccaaggctcatggtccttggaggacccgttgcagggcgaggtcaagagagttctgacctggatggcccatagacctgacgtcccagaatccatgcttctcatctgcaaaatgaaaatgtcaatacttacttcttagcactgttgagagggttacttacataaaggaattttggtgaaactgc

SEQ ID NO: 287739 - DNA, 1000 bp, Homo Sapiens; identical to SEQ ID NO: 222036

SEQ ID NO: 287740 - DNA, 1000 bp, Homo Sapiens; identical to SEQ ID NO: 116801

SEQ ID NO: 287741 - DNA, 1000 bp, Homo Sapiens; identical to SEQ ID NO: 222037

SEQ ID NO: 287742 - DNA, 1000 bp, Homo Sapiens
gttatcaaagtgtttgttgctacatcttctgggtccatagcgattaggaagaaacagcaagaagtagtgggttttttggaagcgaataaaatcgactttaaggaattagatattgctggagatgaagacaacaggaggtggatgagagagaatgttcctggagagaaaaaacctcaaaatgggattcctttgcctccccagatcttcaatgaggagcagtactgtggggattttgactctttcttctctgcaaaagaagagaatattatttattccttccttggtttggctcctcctccagactcaaagggatcagagaaggctgaagaaggtggagaaactgaggcacaaaaagagggcagtgaagatgtgggcaacctccctgaagcccaggagaagaatgaagaagaaggagagacagccacagaagagacggaagaaatagccatggagggtgcggaaggggaagccgaggaggaggaagaaactgcagaaggagaagagcctggagaagacgaagattcctaggccttttcatgcttcatttcttccacttctccagaaaatggaagctatgaagcaacatttcaaatgtctctccacaaaccaaactcaacagaatactttggcttgaagccggcacacccagggttactgaggacttatgctgcctgacctggttagatgtacatggaggtatctcccgaatcatacaaaattaaatgtgaagaccgtttatgcataccttcatgtgcctgacagtcttggcttttgaagatttttttttcttttttgctctgcatagctagaccatcttattaataatactctgaaaaaaatgatttcaaggcatggaagttctctgtgatacaacaatagtatttcttcaaatgcgccttatgctacttatctcagaaacaggttttaaaatgaagtgctttccagagaaccatcatataaataaagattaatagaaaaataaaaaaaaaaaaaaaaaaaa

SEQ ID NO: 287743 - DNA, 1000 bp, Homo Sapiens; identical to SEQ ID NO: 222039

SEQ ID NO: 287744 - DNA, 1000 bp, Homo Sapiens; identical to SEQ ID NO: 116802

SEQ ID NO: 287745 - DNA, 1000 bp, Homo Sapiens; identical to SEQ ID NO: 222040

SEQ ID NO: 287746 - DNA, 1000 bp, Homo Sapiens; identical to SEQ ID NO: 116803

SEQ ID NO: 287747 - DNA, 1000 bp, Homo Sapiens
gtggagaggttgcggagtctgcacagaagtgcacacacctcattgccagcaaagtgactcgcaccgtgaagttcctgacggcgatttctgtcgtgaagcacatagtgacgccagagtggctggaagaatgcttcaggtgtcagaagttcattgatgagcagaactacattctccgagatgctgaggcagaagtacttttctctttcagcttggaagaatccttaaaacgggcacacgtttctccactctttaaggcaaaatatttttacatcacacctggaatctgcccaagtctttccactatgaaggcaatcgtagagtgtgcaggaggaaaggtgttatccaagcagccatctttccggaagctcatggagcacaagcagaactcgagtttgtcggaaataattttaatatcctgtgaaaatgaccttcatttatgccgagaatattttgccagaggcatagatgttcacaatgcagagttcgttctgactggagtgctcactcaaacgctggactatgaatcatataagtttaactgatggcgtctaggctgccgtgcatgtcgactcctgcggtgcggggctggctgtctggctggcgaggagctgctgcgcttccttcacatgctcttgttttccagctgctttcctgggggatcagactgtgaagcaggaagacagatataataaatatactgcatctttttaagatgtgcaattttattctgaggaaacataaattatgttttgtattatatgactttaagagcccacattaggttttatgattcatttgccaggtttttaaatgttttcacaaaactgttacgggacttcaactagaaataaaatggtgtaaataaagaccttgctatctctaaattatggatgttaaagatttgaaatgttttgtactttgattatttttatttcttatactctgttttcttttatattgatatcttgcccacattttaaataaatgtacttttgaactt

SEQ ID NO: 287748 - DNA, 1000 bp, Homo Sapiens; identical to SEQ ID NO: 116804

SEQ ID NO: 287749 - DNA, 1000 bp, Homo Sapiens
gtggcacagaaaacaaagtgaatttgttagcataattattcctattcttatttcttcattttaagtcattgcaatggaaagtaatattataaaatggtaattacaacatattatcagtcacagttttctttccaattaaacacttaacttttgttattccctgtatataaatatataacacacattttctagattcacaaatttaaataaattactcaaaaaatgaaaattgattttgtaaacttttatttttactctttacgttgagttgatcaattttccatactaagattttcattcagaatcaaaattaagaaagttggactgaaaatatgaaaaatgcttaactattgttctcttcctataattctctaattataacatagtaatttacatgtagttggacatgtacactcaagtctaagaatatatgagtggatcatttaccgccccccgccccacaacatctataaggggcaaaaagtctttttctaataagtattcttctatggtagtacctacagatctgcccttcttcttctaaagggtaagtcataatctgtgtaatactacaatttatgggatgctcactatgccctgtttctcttctaaacaatttacatgtaatgtctcattcctcacaataacccttgtaaagtgggcatgattaccatgatttttatagttgaagaacctaagacacagagaccaaggcccatgagctcatagggctgaggcaggatttggaatcaggccatgtcttctccagagcccacatccatcctttctctatattgcctcccacagatgtgctaaaatttatttaactaatcctttatcctctatttgtgttgtctcccattttttattattacaatattactgtggtgaacatgcttaaaaatacattccttggatatctgacaacgtgtttctgaaaaacagattttcataagtaataataaaaataataataaaaaagttttggtatggtaaaaaa

SEQ ID NO: 287750 - DNA, 1000 bp, Homo Sapiens; identical to SEQ ID NO: 116805

SEQ ID NO: 287751 - DNA, 1000 bp, Homo Sapiens
gcttcctcctatgtggacagtgctctgaagcccttattccagcttcagagcggacacaaggataagctcaaacaagcaataattcagcagtggctagaaggcactctcagtgaaagcactcataagtactatgaaaccgtgtcagatgtattaaactctgtgaagaagatggaagagagcctgaaaaggctgaaacaagccagaaaaaccactcccgccaaccccgtcggtcccagtggtggcatgagcgacgacgacaaaatcaggctgcagttggccctagatgttgagtacttgggagagcagatacaaaagttgggactacaagcaagtgacataaaaagcttctcagctctcgcagagcttgttgctgctgccaaggaccaggcaacagcagagcagccttaagcatcttggaagatcccgaggttagattcttaagcaagagaagagttggacttccaggctgaaggggagaaagtgactctgttctcttagcaaccgtctgtagcaaagaagtgcttccagcatcactccagcaacacgcccatgcgtcttctctcagcgtatttgggtcttctttgcccaaaagaacacaaaagcctttttccattgtatggaagatagtttttaagacatttgaaactttctactatagtttacagaacaaattattttatttttattgtaaatcttagtgtggaagagctgatttctaaaatatgattaaagtaaatatatacctatgaatatcaagagtcgtctccctgagcctgtagttggaagtgacgactgtaatggaatgatgtcttgtatagaaatgcccttctctgaaataaagagaactcctgggctttctaaagaggctgcgggaagccatcctccactcccactgtgtgtgagagcagtgcttctgatcctgctgtcaccccgacctctggcaggagccggcgccagtaggaaagacctccttcctaaataaaagaagtgtctcccaaaa

SEQ ID NO: 287752 - DNA, 1000 bp, Homo Sapiens
gcatttccaggcattatggattatctgactccagaaaaagaacgcgtacaggaagatcttggcctgctgcaataccacatttgaggagaagaagaggtcgtcttccaagaagagcactccagactcagaactcagaaattgtaaaagatgatgaaggcaaagaagattatcagtttgatgaactcaacacagagattctgaataacttagcagatcaggagttacaactcaatcatctaaagaactccattaccagttattttggtgctgcaggtagaatagcatgtggcgaaaaataccgagttttggcacgtcgggtgacacttgatggaaaggtgcagtatcttgtggaatgggaaggagcaactgcatcctgactgtaggactgaacattatgttcactgcactctgattttctgtaggtacagttcaaagccctaaagggagtctggcttttactatctttcttaaaaaaaaaaaaaaagagtcaaaaaaattcaaaaaaggggatgatactagccttaacatgtacctgtcaatgttatggatattgtcataaaaaggtatcttttaaaaatcagaacagagacttaattttttaaatcttaagatttgtagaatgtttctaggataggatattaaaaatgattgaaacccatgcatggtgttagacaatttttctaattattccattgagtcagttttttgtgattagtgattatcagagcaaacatcatgtagatagcacaagtatttggagaaacgttgtttgttttgattagtgattatcagagcaaacatcatgtagatagcacaagtatttggagaaacgttgtttgttttgttaccaaaatgttggaaaaatttatttcaataccttttagatttcataaagtgcagtgtatataatgcctactgaaagactgtaaaatattgaaattttctttcaagcaaagtgtaaaaaaatatattgagcctgtaaattgcaaaaaaaaaaaaa

SEQ ID NO: 287753 - DNA, 1000 bp, Homo Sapiens
atacctgtactatgatgggcttctgttctctgctgagggccaataccctactgtggggagagatggcacaccagatgcttttgtgagaaagggatggtggagtgagagcctttgcctttaggggtgtgtattcacatagtcctcagggctcagtcttttgaggtaagtggaattagagggccttgcttctcttctttccattcttcttgctacaccccttttccagttgctgtggaccaatgcatctctttaaaggcaaatattatccagcaagcagtctaccctgtcctttgcaattgctcttctccacgtctttcctgctacaagtgttttagatgttactaccttattttccccgaattctatttttgtccttgcagacagaatataaaaactcctgggcttaaggcctaaggaagccagtcaccttctgggcaagggctcctatctttcctccctatccatggcactaaaccacttctctgctgcctctgtggaagagattcctattactgcagtacatacgtctgccaggggtaacctggccactgtccctgtccttctacagaacctgagggcaaagatggtggctgtgtctctccccggtaatgtcactgtttttattccttccatctagcagctggcctaatcactctgagtcacaggtgtgggatggagagtggggagaggcacttaatctgtaacccccaaggaggaaataactaagagattcttctaggggtagctggtggttgtgccttttgtaggctgttccctttgccttaaacctgaagatgtctcctcaagcctgtgggcagcatgcccagattcccagaccttaagacactgtgagagttgtctctgttggtccactgtgtttagttgcaaggatttttccatgtgtggtggtgttttttgttactgttttaaagggtgcccatttgtgatcagcattgtgacttggagataataaaatttagactataaacttgaaaaaaaa

SEQ ID NO: 287754 - DNA, 1000 bp, Homo Sapiens; identical to SEQ ID NO: 222041

SEQ ID NO: 287755 - DNA, 1000 bp, Homo Sapiens; identical to SEQ ID NO: 222042

SEQ ID NO: 287756 - DNA, 1000 bp, Homo Sapiens; identical to SEQ ID NO: 116807

SEQ ID NO: 287757 - DNA, 1000 bp, Homo Sapiens
agaccgtctactttgactttcaagtgggcgatgagcctcccattctcccagacatggggaacagggtcacagctctcacccagatggagtccgcctgcgtgaccatccatgaggctctgaaaacggtgattgactcccagacgcattaccggctgcgggaggcccaggaccgggcccgagcggaagaccttaatagccgagtctcttactggtctgttggcgagacgattgccctgttcgtggtcagcttcagtcaggtgctactgttgaaaagcttcttcacagaaaaacgacccatcagcagggcagtccactcctagccccggcatcctgctctagggcccctcatgccccaggctggagcagctctcctaggtcacagcctgctgggctgggtcgcgtagcccagggtggaggcagaacgatgctgctgtggtagccctttgcctttcatgcccatgcttgattcttgcacctcagcagctgaaggtctcagagaccagtaatcagaaggcatccgactgcattaagtgtgcagcgctgaaaagacatttacaactaggccagggattagccactgtgggagggtggacaggcaatggttcagtggcctggctgttggcaggaactccaagtgcccaggcctcttgggcagcttagggccctgcctctgtttcatgatgcatgggtcatttgtcttgggtgtcctatcccatatggagaagaaaggggctctaagttctggctcttctttctttggggttctctgtacctgaggaaaccaggccctgggtgactttgcagatctgctcaccctcggtgagcaacagtgtcagccatgcaagcaggacagaatggtgactgggtgcccttggtgagctgtgtatttcctaggaggtagaaaactgtgggaaactgtggctaataaaaactaagtgtgagcgtcctggagaaaaaaaaaaaaaaaaaaaaaaaaaaaaaaaaaaaaaaaaaaaaaaaa

SEQ ID NO: 287758 - DNA, 1000 bp, Homo Sapiens
atcctcatcgggagcagctttcctctgtctggtggtcggaggatgaccaaggtggtgcgtgacttcctgaaggcccagcaggtgcaggcacccgtggagctctactcagactggctgactgtgggccacgtggatgagttcatgtcctttgtccccatccccggcacaaagaaattcctgctactcatggccagcacctcggcctgctacaagctcttccgagagaagcagaaggacggccatggagaggccatcatgttcaaaggcttgggtgggatgagcagcaagcgaatcaccatcaacaagattctgtccaacgagagccttgtgcaggagaacctgtacttccagcgctgcctggactggaaccgtgacatcctcaagaaggagctgggactgacagagcaggacatcattgacctgcccgctctgttcaagatggacgaggaccaccgtgccagagccttcttcccaaacatggtgaacatgatcgtgctggacaaggacctgggcatccccaagccattcgggccacaggttgaggaggaatgctgcctggagatgcacgtgcgtggcctcctggagcccctgggcctcgaatgcaccttcatcgacgacatttctgcctaccacaaatttctgggggaagtccactgtggcaccaacgtccgcaggaagcccttcaccttcaagtggttgcacatggtgccctgacctgccaggggccctggcgtttgcctccttcgcttagttctccagaccctccctcacacgcccagagccttctgctgacatggactggacagccccgctgggagacctttgggacgtggggtggaatttggggtatctgtgccttgccctccctgagaggggcctcagtgtcctctgaagccatccccagtgagcctcgactctgtccctgctgaaaatagctgggccagtgtctctgtagccctgacataaggaacagaacacaacaaaacacagcaaaccatgt

SEQ ID NO: 287759 - DNA, 1000 bp, Homo Sapiens
tgctgatcagctctgccagcatgctaaccctcggggtcattgccatcgaccgctactatgctgtcctgtaccccatggtgtaccccatgaagatcacagggaaccgggctgtgatggcacttgtctacatctggcttcactcgctcatcggctgcctgccacccctgtttggttggtcatccgtggagtttgacgagttcaaatggatgtgtgtggctgcttggcaccgggagcctggctacacggccttctggcagatctggtgtgccctcttcccctttctggtcatgctggtgtgctatggcttcatcttccgcgtggccagggtcaaggcacgcaaggtgcactgtggcacagtcgtcatcgtggaggaggatgctcagaggaccgggaggaagaactccagcacctccacctcctcttcaggcagcaggaggaatgcctttcagggtgtggtctactcggccaaccagtgcaaagccctcatcaccatcctggtggtcctcggtgccttcatggtcacctggggcccctacatggttgtcatcgcctctgaggccctctgggggaaaagctccgtctccccgagcctggagacttgggccacatggctgtcctttgccagcgctgtctgccaccccctgatctatggactctggaacaagacagttcgcaaagaactactgggcatgtgctttggggaccggtattatcgggaaccatttgtgcaacgacagaggacttccaggctcttcagcatttccaacaggatcacagacctgggcctgtccccacacctcactgcgctcatggcaggtggacagcccctggggcacagcagcagcacgggggacactggcttcagctgctcccaggactcaggtaacctgcgtgctttataagcctctcacctgtcgcgttttccctgtgttgcgtttcccccgtgtcgcgtttcccctgtgcaggctcaagagctggcggaggggcatttcccacggtg

SEQ ID NO: 287760 - DNA, 1000 bp, Homo Sapiens
gaagaaacaggcagccaagtcgaaagaggagctagctcaggaaaagaagaaggagctggaaaagcgtctgcaggatgtcagcgggcagctgagcagcagcaagaagcccgcccggaaagagaagcccggctcagcaccctcagggggcccgtccaggctcagcagcagcagctcctccgagtctgggagcagcagctccagcgggtccagctctgacagcagtgactcagaatgaactggcttcggacagaacaggacagatggatgtcgcacacgccgagactctgccgtacccctctgtggttcatattactacttctgttccatggtgtgcaggtctgcttcttaattcagtgttatgatatcttccagtttttgctttcataggtcagagatctatcttgtgtgtgcgttagacttgatgagaaggtgtgaactctgcagaaagtctcttcttcatcactgaattcagtcacttggagatgacaacttcaaatgctaacccgatgaccccagaaaaccgtgtgagattcgtaccgaagaaccttgtggaatccctttgcttaggcccaacctggtcgatagctcgagaaagaattttttccaaggaaatgtctcggatatgggtactgtatttgaaagctgttagctttgtcaacacgcattgtccttgtcatttgggccccgagctctgaccctcgtgtctgacgcggccacctctttctggaggggctgaggacagatgtgcctgcttgtggagaccaggctgggcctaagcgaagggtcatcgcagccccagcccggagcgtggagcccttggggggtggtcgggtgggatgtgcgttctccgctcgtggtgatgtcaggagctcctcggagggaacagagcggctgtgtatgcagcctgcaggtttccatacactgaagcttttacctcaactttaaaaaaaaaaaagaagaaaagattaaaaaaaaaaaaaaaaaactcgaggcatctatg

SEQ ID NO: 287761 - DNA, 1000 bp, Homo Sapiens
acacacacaatctatatatgtatatacaatgctatatagatatgtatttattatatcataaactacagtaggtaactttaaggatttcttcctatccttgtacaatgacatgaatgtctttctttgaaaactgcaatgtatgtatgtttcaaggttatttaacagtgtactatggttttatatcttgacttgccttgtacatctttcaattctggaatatctgtgtctaagcacaatatcttcacactgtgctgtattgctgctgaactaaatgcacttttccccacatatggggcactggcttcaaacaattcagttcagtatcattacttttaatctcatctttcctttcttggtagttgttaatacagttatggaaaagaggcacattgcatagaagccattggggagttcagtggaagttctgtaagatgtgcatgtactatttgatgcgttttctttgcttcactgcttttaatacttagcagtattgttggtctaagtcaatttgattattgaggagtctcagagcaaggtgcgttctagatgtcatcctaaaaaacacttcatatataattaatcactattttgtataattacatattgctgcttgtgtgttttttttttttttccatttagttgggcgttgtgttttacacaaaaccatttttgaattaaggctatgatattaagatagaaatttggactgttgttctgcttttcctggcactcaaattcatgactagttttgaggtcaaacctatgttcgtaatgagagattttataaggatcaactaagaaatggaaggcaggtgaagatataaaaccctagaatgcttaaatgtgctgtaaaactattgtagatgtcactggattttaccaagtaatatcctttcttttttttttccccccatctgctgtggcttttcagttaaaattttgtttataaaaggaatttgtttattacagctctacctaaaaaaaaaaaaaaaaaaaaaaa

SEQ ID NO: 287762 - DNA, 1000 bp, Homo Sapiens; identical to SEQ ID NO: 116809

SEQ ID NO: 287763 - DNA, 1000 bp, Homo Sapiens
aaagccaaatcccactcaaacctttcaacaaaaatgagcacgctttcctaccgcccctcagataatgtaagctcatccaccaagaagcctgcaccatgttttgaggttgagtgacatgttcgaaacctgtccataaagtaattttgtgaaagaaggagcaagagaacattcctctgcagcacttcactaccaaatgagcattagctacttttcagaattgaaggagaaaatgcattatgtggactgaaccgacttttctaaagctctgaacaaaagcttttctttccttttgcaacaagacaaagcaaagccacattttgcattagacagatgacggctgctcgaagaacaatgtcagaaactcgatgaatgtgttgatttgagaaattttactgacagaaatgcaatctccctagcctgcttttgtcctgttattttttatttccacataaaggtatttagaatatattaaatcgttagaggagcaacaggagatgagagttccagattgttctgtccagtttccaaagggcagtaaagttttcgtgccggttttcagctattagcaactgtgctacacttgcacctggtactgcacattttgtacaaagatatgctaagcagtagtcgtcaagttgcagatctttttgtgaaattcaacctgtgtcttataggtttacactgccaaaacaatgcccgtaagatggcttatttgtataatggtgttactaaagtcacatataaaagttaaactacttgtaaaggtgctgcactggtcccaagtagtagtgtcctcctagtatattagtttgatttaatatctgagaagtgtatatagtttgtggtaaaaagattatatatcataaagtatgccttcctgtttaaaaaaagtatatattctacacatatatatatatgtatatctatatctctaaactgctgttaattgattaaaatctggcaaagttatatttactttaaaataaaataattttattgc

SEQ ID NO: 287764 - DNA, 1000 bp, Homo Sapiens
gcagtctgcctgcctcggggacactagtgacagtataaagggcaaaggaaaaccgagtatctggccttcacgtaaatcctggccacattcaccaaccaaagggggacagtgattttcaaaaccagctcccatgtgctgagaacaccccagctgcatttcttttgcaagattcctttccactccaaccagaagtgaatatttgagacaaacggcctattggctattttcccatgccagttttggaagtggggaaaactatggtggaaatttgtgggcttggggacagaaatgccactcaccaacccagggcaaagaacacaaaccctccaggcctcagtttcttcacctgtaaaatggggtgaagctgtgatgtgcctactcccaaggacacgacacacagtagggacctgccctgtacatgctagttcaacagaaaggaatggcctttcaccttctcctggtggcaggcaagcagatgtcctctgcggagataccgccagctccccaggacgcagactgactcctgtttgctcgctggaccaaccccaggcagaaggtggaaggtgggaacagaggtttagctgcaggacatgtattcccattgcaccgagacctaactgccgctcagagtgtagaccgagatggtgcagatgcctgcagtgccattaaaatgtgggtgaaggtgacatcaggattatgtgccccaggccgggctcagtggctcacacctgtaatcccagcactttgggaggccaaggtgggcggatcacctgaggtcaggagtttgcgacaagcctgccaacaagctgaaaccccatctccactaaaaatacaaaaattagttgggcatggtggtgagcacctgtaatcccagctactctggaggctgagataggaggatcacttgaacccgggaggtggaggttgcagtgagctaagatcacatcactgcactccagcctgggtaacagagtgagactgtctcaaaaaaaaaaaaaaa

SEQ ID NO: 287765 - DNA, 1000 bp, Homo Sapiens
cacctatgatgtacccccaccccgcctatccgatgcctttcatcaccaccattctgggagggctgtacccatccaagtccatcctcctgtcaggcactgtcctgcccagtgctcagaggttccacatcaacctgtgctctgggaaccacatcgccttccacctgaacccccgttttgatgagaatgctgtggtccgcaacacccagatcgacaactcctgggggtctgaggagcgaagtctgccccgaaaaatgcccttcgtccgtggccagagcttctcagtgtggatcttgtgtgaagctcactgcctcaaggtggccgtggatggtcagcacctgtttgaatactaccatcgcctgaggaacctgcccaccatcaacagactggaagtggggggcgacatccagctgacccatgtgcagacataggcggcttcctggccctggggccgggggctggggtgtggggcagtctgggtcctctcatcatccccacttcccaggcccagcctttccaaccctgcctgggatctgggctttaatgcagaggccatgtccttgtctggtcctgcttctggctacagccaccctggaacggagaaggcagctgacggggattgccttcctcagccgcagcagcacctggggctccagctgctggaatcctaccatcccaggaggcaggcacagccagggagaggggaggagtgggcagtgaagatgaagccccatgctcagtcccctcccatcccccacgcagctccaccccagtcccaagccaccagctgtctgctcctggtgggaggtggcctcctcagcccctcctctctgacctttaacctcactctcaccttgcaccgtgcaccaacccttcacccctcctggaaagcaggcctgatggcttcccactggcctccaccacctgaccagagtgttctcttcagaggactggctcctttcccagtgtccttaaaataaagaaatgaaaatgcttgttggca

SEQ ID NO: 287766 - DNA, 848 bp, Homo Sapiens
cagtctcaatgggggcactggggctggagggcaggggtgggaggctccaggggaggggttccctcctgctagctgtggcaggagccacttctctggtgaccttgttgctggcggtgcctatcactgtcctggctgtgctggccttagtgccccaggatcagggaggactgggtttcagaagctgccagaggaggagccagaaacagatctcagccccgggctcccagctgcccacctcataggcgctccgctgaaggggcaggggctaggctgggagacgacgaaggaacaggcgtttctgacgagcgggacgcagttctcggacgccgaggggctggcgctcccgcaggacggcctctattacctctactgtctcgtcggctaccggggccgggcgccccctggcggcggggacccccagggccgctcggtcacgctgcgcagctctctgtaccgggcggggggcgcctacgggccgggcactcccgagctgctgctcgagggcgccgagacggtgactccagtgctggacccggccaggagacaagggtacgggcctctctggtacacgagcgtggggttcggcggcctggtgcagctccggaggggcgagagggtgtacgtcaacatcagtcaccccgatatggtggacttcgcgagagggaagaccttctttggggccgtgatggtggggtgagggaatatgagtgcgtggtgcgagtgcgtgaatattgggggcccggacgcccaggaccccatggcagtgggaaaaatgtaggagactgtttggaaattgattttgaacctgatgaaaataaagaatggaaagcttcagtgctgccgataaa

SEQ ID NO: 287767 - DNA, 1000 bp, Homo Sapiens
cttgcagaatctgaatgtgtctcctgagacaagcatcgtgatagagttcacagtcttaaaagtctgcattttcaggtggggcaaggtggctcatgcctttaatcccagcattttgggaggctaaggcagggagatggcttgagaccaggagttcaagaccagcctgggcaacatagtgagacgccccccccccccatctctacaaaaaatttaaaaaattagccatggtggtgtgcacctgtggtcccagctactccagaggctgaggtgggaagatcatttgagcccaggaggctgaggctgcaatgagctataattattgcaccactgaactccagcctgggccacatagcaagaccctgtctccaaaaaaaaaaagaaataaaagacgaagaatagggagaaaaacttctctcatatcatttatttggtccttcagtatttctgattacttagtctaattttgcacaaaatcaactgtattagtccattcttgcaaagaaatacctgagactgggtaatttataaagaaaagaggttggattggctcacggttctgcaggctgcacaggaagcatggcagcatctgcttctggggagacctcggggagcttttgctcatggtggaaggcgaagggggagcaggcgtcttgtggcaggagaaggaccaagagaggagaggaagagccgcacacttttaaacaaccagatctcgtgagaagctactccctccgcagcaccaagcgggggatggtgctcaaccattcatgagaactctgtccccatcattcagtcacctccccccaggccccaccgccgattctgaggatgacaattccacatgagatttgggcggggacacacatccaaactatattgtcaaccttctacacagccaatgacttaacagcctcattagaagttacagaaactaaagcaataaagttcggacaatgcagagaggtcaccttccttctatggccttgaagaaaccctggag

SEQ ID NO: 287768 - DNA, 1000 bp, Homo Sapiens
gtaatactgagactttgttgactcaaaacttgctagttactgcctacctgagtagaatcttatttatgaactcctgtgtattgcaatggtatgaatctgctcatgtggagactggctataaactgaaaagtgtattccaaattgcagaacacatcacacatttaatccaaataataaatggctgtttctaaagtttcccagtatatataaaatacatcaagtctgtcttgtgacagtttcatctgaacttaacttaaaaacaactgttaatgttctagttgtgcaaagcagtttgcctgtggataagatgacctgtgtaataatctttgttagtagtcttaaagctgctgccatagtcctccaagaagaaagcaccaagacaacatttcatatgactataatgcatgtactatataagctgatctggctttgaaagatgtgagttggcaagttcctcacatagagtcattgtattccacctgtccttcaatttagttttttctgagcttctttgcagcctttgatgtgtttttaagaaagctgaatgcacaagaggatctgtgacactgacatggctgtggtgtgcatactgtgtagttacatagcccttccaattctgggtccatttgcactagcaaattaaaatatgctttgattcatacttaaacctgaaagcaggaatgcctacattaattcctacattaaaaacagccatctacccttgattatctagaaagacttggtaatgatggtcagttccttttagatttcagaaaatcaaatgatgacctaaatttcccttaatttgcaaatacagtagtaattaaggtacatctctaaagtggagcacttacaccaggctctaagattcactttgaggtggaacttaaaaccagtgtactgtatgtatgcattggtaatagctacttttgcttcatagcttcataccaacaaaatatatttattagaatagtatgaaagtactgaaggagttgaaaga

SEQ ID NO: 287769 - DNA, 1000 bp, Homo Sapiens
taccaaggccattccactgtttgggaactccctgaagcctgacagtctccggttccagctggagacgtcactgaagcggctgcagtgtccccgagtggacctcttctacctgcatatgccagaccacagcaccccggtggaagagacactgcgtgcctgccaccagctgcaccaggagggcaagttcgtggagcttggcctctccaactatgcagcctgggaagtggccgagatctgtaccctctgcaagagcaacggctggatcctgcccactgtgtaccagggcatgtacaatgccatcacccggcaggtggaaacggagctcttcccctgcctcaggcactttggactgaggttctatgccttcaaccctctggctgggggcctgctgaccggcaagtacaagtatgaggacaagaatgggaaacagcccgtgggccgcttctttgggaatacctgggcagagatgtacaggaatcgctactggaaggagcaccactttgagggcattgccctggtggagaaggccctgcaggccgcgtatggcgccagcgcccccagcatgacctcggccaccctccggtggatgtaccaccactcacagctgcagggtgcccacggggacgcggtcatcctgggcatgtccagcctggagcagctggagcagaacttggcagcggcagaggaagggcccctggagccggctgtcgtggacgcctttaatcaagcctggcatttggttactcacgaatgtcccaactacttccgctaggcccatcgtttctcaggctgcccaaggctcttctgtaacatcttttgttactcacattttctttaatttagaactgcctcagtaaattcttagggatggaagtatttggacaaaaacctaatagaagagtcaccaccaaatgaagaataaaactcccagggtgctgtgaaaaaaaaaaaaaaaaaaaaaaaaaaaaaaaaaaaaaaaaaaaaaaaaaaaaaaaaaaaa

SEQ ID NO: 287770 - DNA, 1000 bp, Homo Sapiens
cagagggtgaggccctggagggcgagtgccaggggctggaggcacggaatcgcgagctgaaggaacgggcagagtccgtggagcgcgagatccagtacgtcaaggacctgctcatcgaggtttacaaggcccggagccagaggacccgtagctgctagaagggcaggggtgtggcttctgggggctggtcttcagctctggcgccttcatccccctgcctctaccttcattccaaacccctctcggccgggtgcagtggcttatgcttgtaatcccagcactttgggaggccaaggcaggaggatcgtttgaggccaggaggtcaataccagcctgggcaacatagtaagaccctgtctctattaaaaaaaaaaaatcaacccttcttccccaccaaaccacccaactcctctctactcttatccttttatcctctgtctctgcttatcacctctcttgcgtatttctggatctccttccctcctttctcgtccaaatcatgaaatgtttggccttagtcaatgtctatgcccgtcacataacagccgaggcaccgaggcccacagggaagcagctgggagcttggaaacctggtctcttgaatttcaaacctggtttcttacaggtggttgtctggggtgggtggagtggcgacaggatagagctgaaggactatgcaaatgaggaagtaagtcagggcgggctttgagaaggggacccatatcctacaggcaaaaagcaggctaggtgaccttgggacactacgctaagggagggaggctaaaggcggccaggtttgcagtgcgggaagatgagcaggccagtgggaggaggggcagggcagggctgtagttggtgactgggtgttcattttagctctaagaaaaaaaatcagtgtttcgtgaaggtgttggagaggggctgtgtctgggtgagggatggcggggtactgatttttttgggaggttatgagcaaaaataaaacgaaacatttcctctg

SEQ ID NO: 287771 - DNA, 1000 bp, Homo Sapiens
gtgaaaatgagtaattaaagcattttaatcagggaggctctgtgatcacatttgtgttttattttattttactttattatttatttgtttatttttgagatggagtttcgctgttgtcacccaggctggagtgcagtggtgtgatctcggctcactgcaacctccacctcccggattcaagtgattctccagcctcagcctcctgagtagctgggattacaggcacacaccaccatgcccagctaacttttgtatttttggcggagacagggtttcaccatgttggccaggctggtctcgaactcctgacctcaagtgatccgcctgcctcagcctcccacagtgctgggattacaggcgtgagccaccgcacccggcttgcaatttagaaagggcacttggcaaccactatgtgaagggtgattggagaaggacaagactgtggaatgggcaataaggaaggaggagtttggagaatgactccaaaggtttgagcttggctagaaccggtaagatggtgacattgttgatcaagactgggaatataagagagaagcagatttggagagatcaattttgaacattttagacatgattttctattggtcagacattgatgtggagatgtaaacacatgtagggttggtgagaaggaaagatgagaacaaaagcaacattgggttaagggaactcgcttaagaaattttaagctatttaatcttgggaactgaagccagtcatgtaaacatactataccaatctagtccctaacagtgttttttctcttgtggcagaaagaattgctgttcctctttggaatctccttcccagacaccttcaaagtcttattgacacagtaaagggaggccaaccactactaacaagttctagaagatataggatcttctatagtaggttaatggaaaatacaaaaacaaacaaacatacaatgaaactgcctcctctcaacccattttcttaacaaattcaattttcaaaa

SEQ ID NO: 287772 - DNA, 1000 bp, Homo Sapiens
aagggaaatgcatagagggttcctataaaggaccagtgaagatgccttcgcaagcccctacaggaaatttctatccacagcccctgctcaattccagcatgtgtctagaggacagcagatacaactggtctttcattcactgtccagcttgccaatgcaacggccacagtaaatgcatcaatcagagcatctgtgagaagtgtgagaacctgaccacaggcaagcactgcgagacctgcatatctggcttctacggtgatcccaccaatggagggaaatgtcagccatgcaagtgcaatgggcacgcgtctctgtgcaacaccaacacgggcaagtgcttctgcaccaccaagggcgtcaagggggacgagtgccagctatgtgaggtagaaaatcgataccaaggaaaccctctcagaggaacatgttattatactcttcttattgactatcagttcacctttagtctatcccaggaagatgatcgctattacacagctatcaattttgtggctactcctgacgaacaaaacagggatttggacatgttcatcaatgcctccaagaatttcaacctcaacatcacctgggctgccagtttctcagctggaacccaggctggagaagagatgcctgttgtttcaaaaaccaacattaaggagtacaaagatagtttctctaatgagaagtttgattttcgcaaccacccaaatatcactttctttgtttatgtcagtaatttcacctggcccatcaaaattcaggtgcaaactgaacaatgaggacgcatggacacaggaaggggaacatcacacaccagggcctgttgtggggtggggggaaggggaagggatagcattaggggatatacctaatgttaaatgacgagttaatgggtgcagcacaccaacatggcatatgtatacatatgtaacaaacctgcatgttgtgcacatgtaccctaaaacttaaagtataattaaaaaaaaaaaaagaaaaa

SEQ ID NO: 287773 - DNA, 946 bp, Homo Sapiens; identical to SEQ ID NO: 116810

SEQ ID NO: 287774 - DNA, 1000 bp, Homo Sapiens; identical to SEQ ID NO: 116811

SEQ ID NO: 287775 - DNA, 1000 bp, Homo Sapiens
gaatgaccaagagagtgggtctccagtgagagaaatgcctatgaaagagggtttccctttttgctcttttgaacaccctccccactgatccttgggacccaacgccgcattgcctcttgcagatgaggttttgccttgggctgcttgggtacttcagaccaggactgagtctgacacagctttcatgaggttacagaaaagggctacagatttgggaagctgtgtgtaatggtcttgagacaatatctccatttggcccaccctggcttctctaaaaagcaacgacagcaacagacaaacaaaaagctcccacctcccaccccgttagctgtcctcctccttcactgtgatgtggttgcggtctctgtaggtgtgtgtgccacccttgtcctctgtcctctggggatgtgcccttcccacgtgtgtcaggttcccactctttcgtggttcctaacgtgaagtgctgtgatgtttctgccctgcctaaggaacgtatcaagctctctcagtgtttcagtgttggagattgaggctgtgccacatcttctgccatcctaaggggacatgatggttctgtgattcccagagagctggcagattgtgacaatctccaggagaacctacagattggaagcagcccacacctgatgtggactcctgtcccgggactcactcttcattcagaagactggtggcccacgtgccaggaccaccccacctctcttgctgccttttctcctgtcctgatggggttctgggagggagacctgtcgctgatgagatgaagaatgtggggatcgagcagccttcttctttgggacccctcgatatcccatggaatgctcgcacgttctcaaagactgagtcacaagcccctaccccttccttgctgtggttagtatcttgttctgtgattggttagcaatgttgactacccacgtagtgaatcttttgtctgcaatttagagaatgtgtaaacaaataaaaggctttaaaactc

SEQ ID NO: 287776 - DNA, 1000 bp, Homo Sapiens
gttcctacgcttccctccagtccttgccgcacgcgtaggcatctccacgctggaggggggcctgccaggactcctgtctctgggtgaggccgcatccttcaaggcccatgtgggctgtgcgtttctcagaccctccttctgtccctacacctgctccttggaccccccagtctgtggccaccctgaagaatgtgcagaaacacttgtgtggcctgtccctgtctctctgacagccttccatttgtgaagtgccctgtggccccctccccagcacctctgtctgccatgcgcttcttcctcccaggctaccctgagcctttcctggcccagtcctcaccacagtccacagaagccacaaacaggctcatagccaagctgtgacctggtcctgaccatctggggcacgagggcctgggctggccctgctaggctggagaagccctgtcacctgtgcacatcttgctggtggaggcatggcccactgtgcaggaccccaccctcgggggctttcggctcccacactgatgattctccccagcatccacaccgggcctggcgctacgtactcaggcccccagctctcgtgtcctggaggaagagctagctccagacatgggttgatcacctagaggagctctggctaaggcacagttttctagaaataaaacatttattcgggtttggaaaggccccttggattcctggctggggacaatgatgacctggaccctggccagaagagccctggccctccagcaaggcagcacctgctctgatgcacctgtgcacccctggccctcccagccacctgggagcccgaagcttagcctgtaggtggccaagccagtccctactcttgggctgcggccacgtgaggctccgcatcagcagccaggggcgagcactagtggacaaagccagcaaatgcggcgttcctgtgagcagataccctcaaccagccagctgtcaaaagtatttcaagataaaatccaggccaagc

SEQ ID NO: 287777 - DNA, 1000 bp, Homo Sapiens
taaaaaaataaacattgtcttggagggttaaaaaatagaaaggtgtatgtgtatagattcacatacacatatgtatatacaggctgacttgatctagaacattaaatccgccctgcaagttaaccccccattgcaatggttgccttaaggtgtttgctagttgtgtacatagtgtggttaatcattagctacactgcttcccacttgattagagcaatgggaagcatactgtggcctaccagcatctggaagtgtgtgctcgatctgtatgtgtgcagaggtggtgtggatgtgagcgtgcatgaaggaaaaaaagctgctactcctagtaggccaaacgctcaggttaaacaactgacgagtgttactgtagggtgtttttttgtttttttgttttttttcttctatcaaattgctacttttgttgtggaagacaaaagcatttccatttcaacgagtttgtcagctttattaatgttgggcaaaaattgatatgtcatgaaaatgaaacagatctatagttttgggacaaaattataaaatgaaatgtgtaggtaacctatttatatactgctataaagtattttttgaagagagatatgcaaagaagctattacctacataagaggtatatttaaagattttttttttttcatcctggtgccaggaatataaaaaagagtggatatatttaaccataacatactgtgattcatcaaacagcacaaactttcatttcatggagtttatctgttgacattgatttaaactgtcacttgttttatcatgtgggaacataagttatgtggtcaaaaatataaggattttgaattaatgttgattcaagttgtattgtcttattgtattgtcttttcaaagtgctgccagttgaaaagggaagcattatgtttacaaatctgttttgaaatgtttgccaaaattttggtagtgtctttaataaagatgtttgtctccagcatccagaaaaaaaaaaaaaaaa

SEQ ID NO: 287778 - DNA, 1000 bp, Homo Sapiens
atcagtgtttagtatgttgttctaaccagtccagaaaaaaaaataagctgtttgaattacatctgggcaatcaggagataattcattatggctgagttgaagacttaaggtgtaatttcattacagtccattagtaaagtgtattattggtgccattttcaaaaaaattaatttattttaccagcagtattcatagctgtggttatgttattttttatttaaaaactttatattaaagtcatttgtaatgttattgtatagttattgtgtagcacatatggtttgcactgtatagtagcttttaaagaaaatagtcacaatacagaaaagcattttagaaatagcttcaaaagcacttgtgtatcttgattttttcttatatgctgttgcagatatatgtatatgctaaaatataacttgcaaagatgttctaaatacacatgctataagttcgccttaagatttcaattcttggataatcaggctctgtttgcactttatattttagcagatacagtctcttagtcactaggctttgcatttgtatgtagctgtatgtttccgtccattttcttaatcctgaacctgtatgttaaatgaagatggcaatttttttcttgtatagtacttgtattttctttcgctgatgcagctctgtctcaatttttaaacctttgctgttaaatgcaatactttataaagaatgaacaaaattactggaagcagtattgtaagtaatgaggtagtattaatcagttttatcttttgaaaggcacagtctaaatcgaaaccctaaactcaatgctgcaagtatgaatttaattcatatataagatctatttaaatataagagtagcaatactgcacctggtgatcacaaagataatgttctacttctgatagaaataatttctcaacaaatgttgttactatgcatgtatatggatggaataaaattccagattgttggagaaaaaaaaaaaaaaaaaaaaaaaaaaaa

SEQ ID NO: 287779 - DNA, 1000 bp, Homo Sapiens; identical to SEQ ID NO: 116814

SEQ ID NO: 287780 - DNA, 1000 bp, Homo Sapiens; identical to SEQ ID NO: 116815

SEQ ID NO: 287781 - DNA, 1000 bp, Homo Sapiens; identical to SEQ ID NO: 222044

SEQ ID NO: 287782 - DNA, 1000 bp, Homo Sapiens; identical to SEQ ID NO: 118351

SEQ ID NO: 287783 - DNA, 1000 bp, Homo Sapiens
aattgcaaacaaaatcatctttaatgggccagcattctcatggggtagagcagaatattcatttagcctgaaagctgcagttactataggttgctgtcagactatacccatggtgcctctgggcttgacaggtcaaaatggtccccatcagcctggagcagccctccagacctgggtggaattccagggttgagagactcccctgagccagaggccactaggtattcttgctcccagaggctgaagtcaccctgggaatcacagtggtctacctgcattcataattccaggatctgtgaagagcacatatgtgtcagggcacaattccctctcataaaaaccacacagcctggaaattggccctggcccttcaagatagccttctttagaatatgatttggctagaaagattcttaaatatgtggaatatgattattcttagctggaatattttctctacttcctgtctgcatgcccaaggcttctgaagcagccaatgtcgatgcaacaacatttgtaactttaggtaaactgggattatgttgtagtttaacattttgtaactgtgtgcttatagtttacaagtgagacccgatatgtcattatgcatacttatattatcttaagcatgtgtaatgctggatgtgtacagtacagtactgaacttgtaatttgaatctagtatggtgttctgttttcagctgacttggacaacctgactggctttgcacaggtgttccctgagttgtttgcaggtttctgtgtgtggggtggggtatggggaggagaaccttcatggtggcccacctggcctggttgtccaagctgtgcctcgacacatcctcatccccagcatgggacacctcaagatgaataataattcacaaaatttctgtgaaatcaaatccagttttaagaggagccacttatcaaagagattttaacagtagtaagaaggcaaagaataaacatttgatattcagcaactgaaaaaaaaaaa

SEQ ID NO: 287784 - DNA, 1000 bp, Homo Sapiens; identical to SEQ ID NO: 116816

SEQ ID NO: 287785 - DNA, 1000 bp, Homo Sapiens
atatggtaaaggcatttgagttaattttgcattatatctaggaaccatattatttaaaatttgaatcctattaatgctgagagatcctaagagctagtatgttgtaaaacctgccacctgaataaaatgaaaaaaaaaagtgtttttttgagacagagtcttgctctgttgcccaggctggagtgcagtggtgtgatcttgggtcactgcaaactccgcctcccaggttcacgccattctcctgcctcagcctcccgagtagctgggaccacaggggcccaccaccgcgcccggctaattttttgtatttttagtagagacggggtttcaccgtgttagccaggatgttctcgatctcctgacctcatgatccgcccgcctcggcctcccaaagtgctgggattacaggcgtgagccaccgtgcccggccctaaaatgaaattattaatgttggttctgaaacagcctcttagcattcagattgtattttaaatacttaaacacaccaattgtagaaagcaaccctttatttttagcaagtttggtttactcttctcccatgagattttgtctttctacattaactagtaagacataaagatttgaaactggaactatattatactttttaaccaatctctgtggcttcactcatgaaatttacttcagttaatatgagactgggggttaagttgtaactaatatgcaaaattgctttgtatatttggtgattttgtaatgtaagtgaattgattcttatttcactgatactattaatcatgcagtgtacaattcaaaatcatgcaatgtttcactttagaattggatttgaagaactcgactttatgtgatcatggtattggtatacatgtggggtggagaacttattttttcattttgtcacaataggtatatactgacaaggcttcaggaaaaaagttgttagaagattttttaatgtataataaagtccatgatttttgtacagtgttttttaatg

SEQ ID NO: 287786 - DNA, 1000 bp, Homo Sapiens
atactaacacagagtttgtaatagttgttgtggacagtacagacagagagaggatttctgtaactagagaagaactctataaaatgttagcgcatgaggacctaagaaaagctggattgctgatttttgctaataaacaagatgttaaagaatgcatgactgtagcagaaatctcccagtttttgaagctaacttctattaaagatcaccagtggcatatccaggcatgctgtgctctaactggcgagggattgtgccaaggacttgaatggatgatgtcacgacttaagattagatgatctctactgacctcttctcatagattttgtataaatgaagtgctggactttacctgaaagctgcaaaaattaatggtttagatatatttataataaactgatttaaactttttctataagaagaaaaattaagaccacttatttgaaaacaaagatgaagtctcaccttccagtttgctttctcattagttttttccaaagtaagttattgaagctgtgattgacatttttctcataatgaatcctctcaggacattgtgtagcctatggtaagtacaaagggagaggaagacattttgaattttaagagctttattatcagtttaaccctccctagttgaatgttattttcttcttgttccattaagtcagaatacaaatcagcacagatattcgaatgtttccaatattttaaaatgtaatgttacttatgaaaagtattttgcttaaggttgtgtgtgtattgtgtatatacctcaagttcaagttaatggcattgatttatgttccagacaaaaataacacaaataataatatccttcgttataaccacaatgagataagtattggcattagtgttcagtgccattttatactttctctctgtgttctctgtattgtactaaccaacctcccaaatcgctgagctgcttgtttaaaaaaaaaaaaaaggaaaaggaaaaagcaaaaaaaaaaaaaaa

SEQ ID NO: 287787 - DNA, 1000 bp, Homo Sapiens; identical to SEQ ID NO: 222045

SEQ ID NO: 287788 - DNA, 1000 bp, Homo Sapiens; identical to SEQ ID NO: 116818

SEQ ID NO: 287789 - DNA, 1000 bp, Homo Sapiens
agaatccatctgtgaggtgacaggcaaggatgaaagacaaagaaggaaaagagtatcaaaggcagaaaggagatcatttagttgggtctgaaaggaaaagtctttgctatccgacatgtactgctagtacctgtaagcattttaggtcccagaatggaaaaaaaaatcagctattggtaatataataatgtcctttccctggagtcagtttttttaaaaagttaactcttagtttttacttgtttaattctaaaagagaagggagctgaggccattccctgtaggagtaaagataaaaggataggaaaagattcaaagctctaatagagtcacagctttcccaggtataaaacctaaaattaagaagtacaataagcagaggtggaaaatgatctagttcctgatagctacccacagagcaagtgatttataaatttgaaatccaaactactttcttaatatcactttggtctccatttttcccaggacaggaaatatgtccccccctaactttcttgcttcaaaaattaaaatccagcatcccaagatcattctacaagtaattttgcacagacatctcctcaccccagtgcctgtctggagctcacccaaggtcaccaaacaacttggttgtgaaccaactgccttaaccttctgggggagggggattagctagactaggagaccagaagtgaatgggaaagggtgaggacttcacaatgttggcctgtcagagcttgattagaagccaagacagtggcagcaaaggaagacttggcccaggaaaaacctgtgggttgtgctaatttctgtccagaaaatagggtggacagaagcttgtggggtacatggaggaattgggacctggttatgttgttattctcggactgtgaattttggtgatgtaaaacagaatattctgtaaacctaatgtctgtataaataatgagcgttaacacagtaaaatattcaataagaagtcaaaaaaaaaaaaaaaaaa

SEQ ID NO: 287790 - DNA, 1000 bp, Homo Sapiens
gcaggctctgcatgaatctttgtgcacttgcacctctttttcacatgggccacagtttcagtacttcagcctcagtggggttcctgatgtttatctagggtgttactcaagcccagtttgagattttggagtctcctgtgatcacatcttgtctcggctgtaggaatcaacagaaggagacgtcctctacataaaagctccatgtgaaaagctactcctagtcttaacatttgcagtccttgtgtcactgtcttctggtcctgatgtagtcccactgtttctagaagtctcttttaagcattatttttgaaaaaaaaaatatttttatagatgaatactcaggctaacctagtggatgtgatcttggaacttccatgattatccacttaaagatcaaagtattatatgctgtgtgctttttaggtgtttgttagtactgtgaaggcaaaaatgctttctacattgacattcattcctattttactgggcacctatgaatgtatgctgtgtgctagaaatagactaaaacatattcctatagcatgttagtgtgtttgcatgtttgctgaaaatcctttgtgtataaaccagtttgtaaggttctctgggttaggtagggactctgcagtttcttcctgtcaaaatctctcctaccaagatggtgttccactgtccagcccagcatgagtagcaggtagagcacagctttactggctgtttgtatgctttggtttagtgcaatgtgtggtagattacttatcagaaaacatatatgtcatctctagaacgaagaaaaagcatagtagttcaattcccagtgtgtccctttgattttttttttttaatagtaaaaataagaatctgtactgacttttcacttggccattctggttttaaaggacaagctacaagctctgtgtttctgtactgatgtgtcacttattaaatacttttgtaccatgagtaaaacttcaggtgtttcgcaagaaccaccattctc

SEQ ID NO: 287791 - DNA, 1000 bp, Homo Sapiens; identical to SEQ ID NO: 222048

SEQ ID NO: 287792 - DNA, 1000 bp, Homo Sapiens
cagaccccatcccctctgtagccggagccgagacagccgacagcgaactccgcggcctcggagccggcggcagcggcgactcccctcagcctccgccgcctcgcccgccggtaccccggcgccaaccccgggagtcaggccctttgggcaggggagctcggaggctcaggatggcggatttcgacgaaatctatgaggaagaggaggacgaggagcgggccctggaggagcagctgctcaagtactcgccggacccggtggtcgtccgcggctccggtcacgtcaccgtatttggactgagcaacaaatttgaatctgaattcccttcttcattaactggaaaagtagctcctgaagaatttaaagccagcatcaacagagttaacagttgtcttaagaagaaccttcctgttaatgtacgttggctactttgtggctgcctttgttgctgctgcacattaggttgcagtatgtggccagttatttgcctcagtaaaagaacacgaagatcgattgagaagttattagaatgggaaaacaataggttataccacaagctgtgcttgcattggagactgagcaaaaggaaatgtgaaacgaataacatgatggaatatgtcatcctcatagaatttttaccaaagacaccgatttttcgaccagattagcatttactttatttatagagactttccaagtatgttgtctttccaatggtgccttgcttggtgctctcctggtggtgacataacattggttctacagaatcgtgtggtgttttttttgtttttgttttttttttttttttaaataaccgcatgttctaagtgtgcatttttgtcaatctttgcaacagttatttcatacagatgtttaatacttaagttattgtgctcttttctgttatgtattctgattttcaaggattacttttttgtattatcaaaaaaatacatttgaacttagcataaaaaaaaaaaaaaaaaaaaaaaaaaaaaaa

SEQ ID NO: 287793 - DNA, 1000 bp, Homo Sapiens
ctactgagaagagagccaaagagcggcaggagctggagaagagaatggctgaggtagaagcccagaaagcccagcagttggaggaggccagactacaggaggaagagcagaaaaaagaggagctggccaggctacggagagaactggtgcataaggcaaatccaatacgcaagtaccagggtctggagataaagtcaagtgaccagcctctgactgtgcctgtatctcccaaattctccactcgattccactgctaaactcagctgtgagctgcggataccgcccggcaatgggacctgctcttaacctcaaacctaggaccgtcttgctttgtcattgggcatggagagaacccatttctccagacttttacctacccgtgcctgagaaagcatacttgacaactgtggactccagttttgttgagaattgttttcttacattactaaggctaataatgagatgtaactcatgaatgtctcgattagactccatgtagttacttcctttaaaccatcagccggccttttatatgggtcttcactctgactagaatttagtctctgtgtcagcacagtgtaatctctattgctattgccccttacgactctcaccctctccccactttttttaaaaattttaaccagaaaataaagatagttaaatcctaagatagagattaagtcatggtttaaatgaggaacaatcagtaaatcagattctgtcctcttctctgcataccgtgaatttatagttaaggatccctttgctgtgagggtagaaaacctcaccaactgcaccagtgaggaagaagactgcgtggattcatggggagcctcacagcagccacgcagcaggctctgggtggggctgccgttaaggcacgttctttccttactggtgctgataacaacagggaaccgtgcagtgtgcattttaagacctggcctggaataaatacgttttgtctttccctcaaaaaaaaaaaaaaaaaaaaaaa

SEQ ID NO: 287794 - DNA, 1000 bp, Homo Sapiens
ctgctgagaggcctcagggcctggctgtcctgggcatcctaattgaggtgggtgagactaagaatatagcttatgaacacattctgagtcacttgcatgaagtcaggcataaagatcagaagacctcagtgcctcccttcaacctaagagagctgctccccaaacagctggggcagtacttccgctacaatggctcgctcacaactcccccttgctaccagagtgtgctctggacagttttttatagaaggtcccagatttcaatggaacagctggaaaagcttcaggggacattgttctccacagaagaggagccctctaagcttctggtacagaactaccgagcccttcagcctctcaatcagcgcatggtctttgcttctttcatccaagcaggatcctcgtataccacaggtgaaatgctgagtctaggtgtaggaatcttggttggctgtctctgccttctcctggctgtttatttcattgctagaaagattcggaagaagaggctggaaaaccgaaagagtgtggtcttcacctcagcacaagccacgactgaggcataaattccttctcagataccatggatgtggatgacttcccttcatgcctatcaggaagcctctaaaatggggtgtaggatctggccagaaacactgtaggagtagtaagcagatgtcctccttcccctggacatctcctagagaggaatggacccaggctgtcattccaggaagaactgcagagccttcagcctctccaaacatgtaggaggaaatgaggaaatcgctgtgttgttaatgcagagaacaaactctgtttagttgcaggggaagtttgggatataccccaaagtcctctaccccctcacttttatggccctttccctagatatactgcgggatctctccttaggataaagagttgctgttgaagttgtatatttttgatcaatatatttggaaattaaagtttctgactttaaaaaaaaaaaaaaaaa

SEQ ID NO: 287795 - DNA, 1000 bp, Homo Sapiens; identical to SEQ ID NO: 222049

SEQ ID NO: 287796 - DNA, 876 bp, Homo Sapiens
gcgcagaagcggcggcggtggtggcttgtggtgcggcctcaccatacaggaacagggcagacgttagcgtgagtgatcactctcaatcccggggacctggtggccttagtctttcaggtggaacggtgtgcgacatgggaaagaaaaccaagcggacagctgacagttcttcttcagaggatgaggaggagtatgttgtggagaaggtgctagacaggcgcgtggttaagggacaagtggaatatctactgaagtggaaaggcttttctgaggagcacaatacttgggaacctgagaaaaacttggattgccctgagctaatttctgaatttatgaaaaagtataagaagatgaaggagggtgaaaataataaacccagggagaagtcagaaagtaacaagaggaaatccaatttctcaaacagtgccgatgacatcaaatctaaaaaaaagagagagcagagcaatgatatcgctcggggctttgagagaggactggaaccagaaaagatcattggggcaacagattcctgtggtgatttaatgttcctaatgaaatggaaagacacagatgaagctgacctggttcttgcaaaagaagctaatgtgaaatgtccacaaattgtgatagcattttatgaagagagactgacatggcatgcatatcctgaggatgcggaaaacaaagagaaagaaacagcaaagagctaaaggaggggatggtctctgtcatttctctttgtacataatacattcacctccctgcctcctctcctttctacccacccctttctatcctaaacacatccataaaaaatgtgcttatcactgtgctccacaaaaaaaaaaaaaaaaaaaaaaaaaaaaaaaaaaaaaa

SEQ ID NO: 287797 - DNA, 1000 bp, Homo Sapiens
tgaaaaccaaccaggtggccattgcacagaccctggagtgcaaggagtcaggccgacagttctgcatcgctgttacccatctaaaagcacgcactggctgggagcggtttcgatcagctcaaggctgtgacctccttcagaacctgcaaaacatcacccaaggagccaagattccccttattgtgtgtggggacttcaatgcagagccaacagaagaggtctacaaacactttgcttcctccagcctcaacctgaacagcgcctacaagctgctgagtgctgatgggcagtcagaacccccatacactacctggaagatccggacctcaggggagtgcaggcacaccctggattacatctggtattctaaacatgctctaaatgtaaggtcagctctcgatctgctcactgaagaacagattggacccaacaggttaccttccttcaattatccttcagaccacctgtctctagtgtgtgacttcagctttactgaggaatctgatggactttcataaatacttgcttttgtctttttaatcacaggagtctatttttttttttttttttttttttttgagacagagtctcgctctgttgcctaggctggagtacagtggcctgatctcggctcactgcaagatccgcctcccgggttcatggcattctcctgcctcagcctccagagcaactgggacaacaggcgcccgtcaccacgcccagctaattttttgtatttttagtagagacggggtttcaccgtgttagccaggatggtctcgatctcctgaccttgaatcacaagagtcttaacagggaatgtttcaggaaacaaataggataagacaatgccagaggaaggatagaaacatgggaagtttctatcatttcattttctgcgtttccagcatgcccttggaaaagactccctttagtccctttttcaattaaaacctatggtgaaaaaggcgtttgcactccaaaaaaaaaaaaaaaaaaa

SEQ ID NO: 287798 - DNA, 1000 bp, Homo Sapiens
tgttaaatagaataggtttaaatgactagtcaaatgaattattttctccttgttaaataaattaaatcttactttcttttaatgaccaaccttaggtaaaacaaaaatattgtaatcctagaaattatcctccagctttctcacctgaaaatctattgaagtgatccctggtcatcctaataatgggatgagggaagtttccagcagatttcaggctgttcttaaagtttttgttggtcattttctcaatagtacatgaaatcaagatgcttatgagcatggaaatgtatttaaagtttttgcttgtgtcctcctcagtcagaatagaaaagtaactgaaatactcttacctttctgtccttgataaaatagtaaagaaaaccaaacaaacccaggcctgatgggaaaaatgattcctttattctagcaattactttctgttggtatgggaaatgttattaatttctattactaaagttcatatcacaaaatgatatttaataataaccttggggtaaatcatgaatttttttttctacgtgtgagtataaaagacaaaagttgaacagcatggaatcttcattgccaaattattagtgaatgtatagttcaggtattctttgagacacacagtatcattaatttccgaattgtatttcagtgttattttttgtttgtgaccactaagcttctgtcttaatacaaagctgttaccttctacagaatttaagtctgaagatgtaaagagagaacaggccttgtgtaacagaagatactcttttttatgctccttactgtgatcacagaaaaattaaaaatccaagtgctctctagatttgttgataaacattttatgcttgcatttaaacttgaaatgtatgagcagaatgagacaatcagttaaatcagaaatgagaagtattataatgtaaaggccttgttttgctgtagcaataaaatgaccaagtgcaatgacttgatttaataaaatccggaattc

SEQ ID NO: 287799 - DNA, 1000 bp, Homo Sapiens; identical to SEQ ID NO: 116820

SEQ ID NO: 287800 - DNA, 1000 bp, Homo Sapiens
ccacatgtcggagcctcagcaccagcagcggctaggggagatccagcacatgagccaagcctgcctcctgtccctgctgcccgtgccccgggacgtcctggagacagaggatgaggagcctccaccaaggcgctggtgcaacacctgccagctctactacatgggggacctgatccaacaccgcaggacacaggaccacaagattgccaaacaatccttgcgacccttctgcaccgtttgcaaccgctacttcaaaacccctcgcaagtttgtggagcacgtgaagtcccaggggcataaggacaaagccaaggagctgaagtcgcttgagaaagaaattgctggccaagatgaggaccacttcattacagtggacgctgtgggttgcttcgagggtgatgaagaagaggaagaggatgatgaggatgaagaagagatcgaggttgaggaggaactctgcaagcaggtgaggtccagagatatatccagagaggagtggaagggctcggagacctacagccccaatactgcatatggtgtggacttcctggtgcccgtgatgggctatatctgccgcatctgccacaagttctatcacagcaactcaggggcacagctctcccactgcaagtccctgggccactttgagaacctgcagaaatacaaggcggccaagaaccccagccccaccacccgacctgtgagccgccggtgcgcaatcaacgcccggaacgctttgacagccctgttcacctccagcggccgcccaccctcccagcccaacacccaggacaaaacacccagcaaggtgacggctcgaccctcccagcccccactacctcggcgctcaacccgcctcaaaacctgatagagggacctccctgtccctggcctgcctgggtccagatctgctaatgctttttaggagtctgcctggaaactttgacatggttcatgtttttactcaaaatccaataaaacaaggtagtttggctgtgca

SEQ ID NO: 287801 - DNA, 1000 bp, Homo Sapiens; identical to SEQ ID NO: 222051

SEQ ID NO: 287802 - DNA, 1000 bp, Homo Sapiens
taaggattttttattaaccattacagattttacaaacagctagttatatggtaaacagattattatgcctttttgcaattctgaatatgattctagtatttgtgtagatgtatttggtactttttcccctaattccaacactagtttatatatatagcgaataaatctagttgtataaatttttaaatgccgtcagtagaaagcacacaaggttatgatttttttaattactggcttctgatttctttcacttctgatccttttcctttttctcagatgtagctgagtcttgatcattttaagacaacgatgggtagaattttgagattaatgttaattttccctttttgttaatttcagtcccctctcactatgcttttgtccagaaggatcaagaattctaccatcccttgggtctttgtgtataaacaatgttaaataaaggtagactcagtctttaagatattagacagtttttttagtccatgggattgtaaatataaacattaactttcctataagaatattttggctttgtaatctatagcctcaaattggtatttattatggattcactagacaaacagctgtttccttattgtcttttttctttagtgtttctgatttgctatcagtagctgtttttaaagccgtccaaggaaaataattatttacagtttttgaagtcacttttgagccctcatcaagctctcattgtgatgggagggatacctttttgttgttaaaagcctattattgttaaaggccttttatggaaaccaacttggaaaacaaccttaaatgtggatgtatcagatttggtttatccagccatgggagagaaaacaaacctaagtttactttacttgtacatatacactacaatggatagtatatttgctgtaaactacaatgtaaaacctcaataaaagtgcgctgtacttcttaatgtttattaaaagatgtatttttacaaaaaaaaaaaaaaaaaaaaaaaaaa

SEQ ID NO: 287803 - DNA, 1000 bp, Homo Sapiens
ggaggacagcgcacgtgggcaccaacatcctcacggccgtgtcctacctgaaagggctctggatggagtgtgtgtggcacagcacaggcatctaccagtgccagatctaccgatccctgctggcgctgccccaagacctccaggctgcccgcgccctcatggtcatctcctgcctgctctcgggcatagcctgcgcctgcgccgtcatcgggatgaagtgcacgcgctgcgccaagggcacacccgccaagaccacctttgccatcctcggcggcaccctcttcatcctggccggcctcctgtgcatggtggccgtctcctggaccaccaacgacgtggtgcagaacttctacaacccgctgctgcccagcggcatgaagtttgagattggccaggccctgtacctgggcttcatctcctcgtccctctcgctcattggtggcaccctgctttgcctgtcctgccaggacgaggcaccctacaggccctaccaggccccgcccagggccaccacgaccactgcaaacaccgcacctgcctaccagccaccagctgcctacaaagacaatcgggccccctcagtgacctcggccacgcacagcgggtacaggctgaacgactacgtgtgagtccccacagcctgcttctcccctgggctgctgtgggctgggtccccggcgggactgtcaatggaggcaggggttccagcacaaagtttacttctgggcaatttttgtatccaaggaaataatgtgaatgcgaggaaatgtctttagagcacagggacagagggggaaataagaggaggagaaagctctctataccaaagactgaaaaaaaaaatcctgtctgtttttgtatttattatatatatttatgtgggtgatttgataacaagtttaatataaagtgacttgggagtttggtcagtggggttggtttgtgatccaggaataaaccttgcggatgtggctgtttatgaaaaaaaaaaaaaaaaaaa

SEQ ID NO: 287804 - DNA, 1000 bp, Homo Sapiens
tgaataagtttactaaatctggtctcaagtcacagtttgcttactgcatgctgatccgaattgccagtcgcttactaaaagaaactgaggatgggcatttgcaggctcctttagctgcaccatgaagtttacagtccgggactgtgaccctaacactggagttccagatgaggatgggtatgatgatgagtatgtgctggaagatctcgaagtgactgtgtctgaccatattcagaaagtactgaagcctaactttgctgctgcttgggaagaggtgggagatacctttgagaaagaggaaacctttgccctcagttctaccaaaacccttgaagaggctgtcaacaatatcatcacatttctgggcatgcagccatgtgagaggtccgataaagtacctgagaacaagaattcccattcgctctatctggcaggtatattcagaggtggctatgatttattggtgaggtccaggctggccttagccgatggagtgaccatgcaggtgactgtcagaagtaaagagagaacacctgtagatgttatcttagcttctgttggataaatgcttactggacaagaggaaactgatgcacactacatggtcagtgggcttttaggctagtggcatcagtttcccagaatcagacttttgaagatgaatgactttggagaagcaaattaaacatttggccctgagccagcagatcaagcaaatgtctatctttgcgcatgggttgtttttttttttttttctttttattctacttggtcagctttgggacgatagtgcagctttgggtgatcttgaaaatcaaatactatcctatactccagctgcttaacttcattttattctttaatgtgtacctgaaagctcctggcaatgctggaaaatttttatcccagaggggtgggggggaggggggaggggaagccagagtccacttttgtcacaattcatttttattaatagaaaataaacacttattccagtttc

SEQ ID NO: 287805 - DNA, 1000 bp, Homo Sapiens; identical to SEQ ID NO: 116825

SEQ ID NO: 287806 - DNA, 1000 bp, Homo Sapiens
caggccattgagctccataaagagaaggttgtttgtattgctgctggactgaggcatgcagtagctgctacagcgagtggcatcgtgttccagtgggggactggtttggcatcatgtggacgacggttgtgccctgggcagactcttccattgtttttcacagcaaaggaaccaagcagagtgacaggtctagagaattctaaagcaatgtgtgttcttgctggctcagaccactcagcttcattaacagatgcaggagaggtgtatgtttggggaagcaacaagcatgggcaactggctaatgaggctgctttccttcctgtgccccagaaaatagaagcacattgtttccagaatgaaaaggtcactgccatctggagtggatggacacacctggttgctcagacagaaactggcaagatgtttacctggggccgagcagactatggtcagctagggaggaagttggagacttatgaaggctggaaactagaaaagcaagattcatttctcccctgttcaagaccaccgaacagcatgccttcgtctccgcattgcttaactggagcaactgaggtctcttgtggctcagagcataatttggcaataattggtggagtgtgttactcttggggctggaatgagcatggcatgtgcggagatggcactgaagccaacgtctgggccccaaagccggtgcaggctctgctgtcatcgtcaggactccttgtgggctgtggggctggccactccttggccctctgccagctgccagctcaccctgcattggtccaggaccccaaggtcacctacctttccccagatgccatcgaggacactgaatctcagaaagccatggacaaagagagaaactggaaggaaagacaatcagaaacttcaacccaaagccaatctgactggtccagaaatgggggactgtgatagagaatctttaataaagtggcttttcccaccaaaaaaaaaaaaaaaaaaaaaaaaa

SEQ ID NO: 287807 - DNA, 1000 bp, Homo Sapiens; identical to SEQ ID NO: 116828

SEQ ID NO: 287808 - DNA, 1000 bp, Homo Sapiens
ttgggacgtttttctgcctgtttatttttttttctaattctctggtcatcgcggcagtgatcaaaaacagaaaatttcatttccccttctactacctgttggctaatttagctgctgccgatttcttcgctggaattgcctatgtattcctgatgtttaacacaggcccagtttcaaaaactttgactgtcaaccgctggtttctccgtcaggggcttctggacagtagcttgactgcttccctcaccaacttgctggttatcgccgtggagaggcacatgtcaatcatgaggatgcgggtccatagcaacctgaccaaaaagagggtgacactgctcattttgcttgtctgggccatcgccatttttatgggggcggtccccacactgggctggaattgcctctgcaacatctctgcctgctcttccctggcccccatttacagcaggagttaccttgttttctggacagtgtccaacctcatggccttcctcatcatggttgtggtgtacctgcggatctacgtgtacgtcaagaggaaaaccaacgtcttgtctccgcatacaagtgggtccatcagccgccggaggacacccatgaagctaatgaagacggtgatgactgtcttaggggcgtttgtggtatgctggaccccgggcctggtggttctgctcctcgacggcctgaactgcaggcagtgtggcgtgcagcatgtgaaaaggtggttcctgctgctggcgctgctcaactccgtcgtgaaccccatcatctactcctacaaggacgaggacatgtatggcaccatgaagaagatgatctgctgcttctctcaggagaacccagagaggcgtccctctcgcatcccctccacagtcctcagcaggagtgacacaggcagccagtacatagaggatagtattagccaaggtgcagtctgcaataaaagcacttcctaaactctggatgcctctcggcccacccaggtgatgactgtcttagg

SEQ ID NO: 287809 - DNA, 1000 bp, Homo Sapiens; identical to SEQ ID NO: 222052

SEQ ID NO: 287810 - DNA, 1000 bp, Homo Sapiens; identical to SEQ ID NO: 222054

SEQ ID NO: 287811 - DNA, 1000 bp, Homo Sapiens; identical to SEQ ID NO: 222055

SEQ ID NO: 287812 - DNA, 1000 bp, Homo Sapiens
tttccatgaaagaatattagtttccagtaaattttagtgatggctcactcacttttctattttggaattacatagttatgtaagtaaaatttttaaaaatcataaagggagcaccattgtacagtctagcataaacagcaaattttaaagaggacatatttaagttcataatcatatttttcagtaaatattgctcagtgaactggaaaactttaatagaaaaatgtctgcagttttgtgattgttaatttggttaaaccgatattttatattatttaagttaggtaacattttatattactttcatatgaataaaagtaatccatgcattgtagagtctataaaatgttgagtttttttagatgatataaactttgattctgggcactagtgctagtagatattactaccctcctgaggaaatcagaaatgatttaaccccagtggaatacattaattcttaaagcggctcttttcagtagtgtgacttttagaaagtgtctcagtagttaaggaagctaacagtcttagatctacttttaaaacggatggccttcttaagaataaagcaaaaggtgattttctacataatttttgctttccaaaagtgatgatatgctctcctacagcaacatatgagaagaaaaaaggcttatctagattcgaaaattaacagcaattatagtaatatatcccctccttctaaatagtaaaaagctctgattgtacaagaattacctgtgctagtcaagttgttgtttttccttgaacaactttggaaaaatggatttgacagtacataatcagttctactaaccaaagcttgtatttggaaatttactttttgtacaaattgaattatataatgcttaaaatactttgtcactttataagcaaaatgcatagtacttaatttgtttatactgtaaagtatatgttaaatgcttttatcactttgagaataaaaagttactaatgcaaaaaaaaaaaaaaaaaaaaa

SEQ ID NO: 287813 - DNA, 1000 bp, Homo Sapiens
tggcccaggccctgggctgtatgcacggggctccatcccagctggcctccctcagcctggcccactgctcttcattgaagtcacgcccagagctggagcatcaggcctcaggtaccaaggacgcctgtccagagccacagggcccctccctgctcacgctgcgggccctgcaggagttggacctcacagcctgcagcaagctgactgatgccagtttagccaaggtgctccagtttctccagctgaggcagctgtcccttagcctgttgccagaactcacagacaacggcttggttgctgtggccaggggctgtcctagcctggagcacttggcgctgagtcactgcagccgactcagtgacaagggctgggcccaggcagccagctcctggccaaggctgcagcatctcaacctgtccagctgcagtcagctcatagagcagacactggatgctattgggcaggcgtgcaggcagctccgggtgttggatgtggccacgtgccctggcatcaacatggccgccgtcagacgcttccaagcccagctgccccaggtgtcctgtgtccagtcccgcttcgtgggaggggctgacctgaccctaacactctgaggccagaccctctaggactgggggtggggccaatccagggcagcccagagggaacatcctgccacaccgcctggcagtagcctctttccagctacacgtcgctgccacaggcccctggaaatgctacctacgtgttgccgccacaggctcctgctctctggccaagccctgggtgggaggccaggcccccagcgggcagggtctggtgctgggaggagcagagcctctgcctcttgcctgccctcctctcagacctaaggccgggctccacctactcctgtgggactctcccagcaccctgtgtgcactgagcttcagcagctgagcctaggtctgtgctgtaaatcctaagattaaacattccagatagtaaaaaaaaaaaaaaaaaa

SEQ ID NO: 287814 - DNA, 1000 bp, Homo Sapiens
tatctgctgggacatgcctgaacacactcaccgggcacacggaatgggtcaccaaggtagttttgcagaagtgcaaagtcaagtctctcttgcacagtcctggagactacatcctcttaagtgcagacaaatatgagattaagatttggccaattgggagagaaatcaactgtaagtgcttaaagacattgtctgtctctgaggatagaagtatctgcctgcagccaagacttcattttgatggcaaatacattgtctgtagttcagcacttggtctctaccagtgggactttgccagttatgatattctcagggtcatcaagactcctgagatagcaaacttggccttgcttggctttggagatatctttgccctgctgtttgacaaccgctacctgtacatcatggacttgcggacagagagcctgattagtcgctggcctctgccagagtacaggaaatcaaagagaggctcaagcttcctggcaggcgaacatcctggctgaatggactggatgggcacaatgacacgggcttggtctttgccaccagcatgcctgaccacagtattcacctggtgttgtggaaggagcacggctgacaccatgagccaccaccgctgactgactttgggtgccggggctgcgggttttgggtgcaacctctgcggcagccgactgcatgaaccaaagttctcacctaatggtatcatcacgcagtgcacaatcatttatctatgttttgccaggggccagggctcggggtgggggagggcttgttttattgacatacaacgcagcatgctaatggggtacaccattgacttcatttgtacttagttatgttggtcagtgttagaggatgcattttgggttcatctttcttgagtggagtattggttttaagtaaagaaagttaaatgatccattaatctgctaattggttgcctatgaaatcacattgtctgttattaaagctttttaccataaaaaaaaaaaaa

SEQ ID NO: 287815 - DNA, 1000 bp, Homo Sapiens; identical to SEQ ID NO: 222057

SEQ ID NO: 287816 - DNA, 1000 bp, Homo Sapiens
cagccgtcctatgtatggagctgtcacttcttttttacactccctgatcattcagaatgaaccacgatttgctatgtttggaccaggtttggaagaattgaatacctctttggtgttgagcttgatgtcttcagaggaactttgcccaacagctggtttgcctcagaggcagattgatggtattggatcaggagtcaattttcagttgaacaaccaacataaattcaacattctaatcttatattcaactaccagaaaggaaagagatagagcaagggaagagcatacaagtgcagttaacaagatgttcagtcgacacaatgaaggtgatgatcaacaaggaagccggtacagtgtgattccacagattcaaaaagtgtgtgaagttgtagatgggttcatctatgttgcaaatgctgaagctcataaaagacatgaatggcaagatgaattttctcatattatggcaatgacagatccagcctttgggtcttcgggaagaccattgttggttttatcttgtatttctcaaggggatgtaaaaagaatgccctgtttttatttggctcatgagctgcatctgaatcttctaaatcacccatggctggtccaggatacagaggctgaaactctgactggttttttgaatggcattgagtggattcttgaagaagtggaatctaagcgtgcaagatgattctcttttcagatcttgggaactgaaaccatttgaaatttattactaaggtcgtgatgtgaatatttgctcagtcagcccaccttgtcctgcctttttgcagataggctttcatttggacagctataactgctgtgttttttatattatttttactctttaccataaatcaattacaagaaaagagtttcagtcctagtatttagccccaaaatgaacctttaaacatttttttggtaatttttatattttctgtctttttaaaaatattaaattctggaaaaaacaaaaaaaaaaaaaaaa

SEQ ID NO: 287817 - DNA, 1000 bp, Homo Sapiens
gacttctctcaaaaaagatgctcaaaccaagttatccaatcaaggtgatcagaaaggttctacttatagtcgacacaatgaattctctgaggttgccaagacattgaaaaagaacgaaagcctcaaagcctgtattcgctgtaattcacctgcaaaatatgattgctatttacaacgggcaacctgcaaacgagaaggctgtggatttgattattgtacgaagtgtctctgtaattatcatactactaaagactgttcagatggcaagctcctcaaagccagttgtaaaataggtcccctgcctggtacaaagaaaagcaaaaagaatttacgaagattgtgatctcttattaaatcaattgttactgatcatgaatgttagttagaaaatgttaggttttaacttaaaaaaaattgtattgtgattttcaattttatgttgaaatcggtgtagtatcctgaggtttttttccccccagaagataaagaggatagacaacctcttaaaatatttttacaatttaatgagaaaaagtttaaaattctcaatacaaatcaaacaatttaaatattttaagaaaaaaggaaaagtagatagtgatactgagggtaaaaaaaaaattgattcaattttatggtaaaggaaacccatgcaattttacctagacagtcttaaatatgtctggttttccatctgttagcatttcagacattttatgttcctcttactcaattgataccaacagaaatatcaacttctggagtctattaaatgtgttgtcacctttctaaagctttttttcattgtgtgtatttcccaagaaagtatcctttgtaaaaacttgcttgttttccttatttctgaaatctgttttaatatttttgtatacatgtaaatatttctgtattttttatatgtcaaagaatatgtctcttgtatgtacatataaaaataaattttgctcaataaaattgtaagcttaaaaaaaaaaaaaaaaaa

SEQ ID NO: 287818 - DNA, 1000 bp, Homo Sapiens; identical to SEQ ID NO: 116829

SEQ ID NO: 287819 - DNA, 1000 bp, Homo Sapiens
tcacatagattctgtgcttgcaaccctgatttaatgcgagaacttggccttagtcctgatgctgtctatgtactgtgctactctttgattctactttccattgacctcactagccctcatgtgaagaataaaatgtcaaaaagggaatttattcgaaatacccgtcgcgctgctcaaaatattagtgaagattttgtagggcatctttatgacaatatctaccttattggccatgtggctgcataaaaagcacaattgctaggacttcagtttttacttcagactaaagctacccaaggacttagcagatatgggggttacatcagtgctggtcattgtagcctgagtatacaatcaagcttcagtgtgcaacctttttttcttttgccattttctattttagtaatttccttggggaactaaataattttgcagaatttttcctaattttgtttatcacgttttgcacaaagcagagccactgtctaacacagctgttaacgaatgataaactgacattatactctaaaagatggtgtatttgtgcattagatttgcctgaaaaactttatccatttccattctttatacaaataccatgtaatgtgtacatatttaactaaagagatttatagtcataattattttattgtaaagattttaactaaagtttttccttttctctcaaactgagttctgaaatttatttgattctgatctgaaactattgtcttcgtaaaagttagatctgacttcagacagaaaccaataccagcttccttttcctttaaactttgaagagtgttgatttgttactatattactatgcaaaactggcagttatttttataatataaatttataatttgattttttattttaaaaactgggttaatcaagtctcggtaagtcctttaaaccatttaggatttttaaaacatcaaaatttatgatttacattcataggaataaaataaaatattattagaactctggtaaa

SEQ ID NO: 287820 - DNA, 1000 bp, Homo Sapiens
gcgggagtgcggcaacgcccactaccagcgggcggacttcgtcctggccgccaactcctacgacctcgccatcaaggctatcacctccagcgccaaagtggacatgacgttcgaggaggaggcacagctcctgcagttgaaggtgaagtgtctgaacaacctggcggcctcgcagctgaagctcgaccactaccgcgcagccctgcgctcctgcagccttgtgctggagcaccagccagacaacatcaaggctctcttccgcaagggcaaggtgctggcccagcagggggagtacagtgaggccatccccatcctgagggcagccctgaagctggaaccttccaacaagacgatccacgcagagctctcaaagctggtgaagaagcatgcggcgcagcggagcacggagaccgccttgtaccggaaaatgctgggcaaccccagccggctgcctgctaagtgccctggcaagggtgcctggtccatcccatggaagtggctgtttggggcgactgctgttgccttggggggtgtggcactctctgtggtcatcgctgccaggaactgaccacctaggtggctgccaccccctctgcacaccatggaccctgccctgcgctccccaactcccccaggctccctgtccactgccctccctggtctggccccctcctccgggttaggggagcaaggattgggggtcgtgcagcccagccagcaggagggactgaggccctctaggaggaaagcccagagggagggggccctcattccttcagacccagttttcccccaccctccttaccccgctgggctaggtctccgccagggctggcctcagtttctcctcaacaggcctgggggcagcccttcccctgcctagtccccgcctgagtgccagccccccaccccgcctgccgccccctgtccaggttccctccccgccacagtgaaataaagcatcccaccctgcagtttcaaaaaaaaaaaaaaaaaaaaa

SEQ ID NO: 287821 - DNA, 1000 bp, Homo Sapiens
agcctccgaggaatccaccctctttctagaacactggttaaggcttctgtttatcacacataggcccacacacagactcaccaactttgcaatagaaatactggtgcctgcagagcagcactaacagtggcaggtgctgtactaggctctgtactggccacacttactattgacagtcaccccgtaaggttcacaaaccaccccattgaacagatgaggaactgaggctcaaggaggttaagtaacatttccagggttatataaactagtaaatggcagagctaagagtcaaatccaggtctatgtgatcctcagagattggaggccaggatggagaattggttgagtagccaaggaaggtcagtgtgaaaagcttgctatggcaaatatagcgaaatctctccactgccttctgtccaccaacatttagtgccagcctaggcacaacttgtcctggtccaagtccttattctgcttgccccaacttacctgcagacactccttttgctaccactcaaggaaggaagtcaccagtggccttagtgcaggaaactcagccctggtggccctgcagaacaatgcatctgacatgtgcgatgcatccccatggagagacagcattgctccccagccctccagaaaccttgagcagatccagggatcagtgagaggagtggtgtgtacccctaaatcctcccaccccagcactgcccatctgtaaaatcttgtaaagcccagtttcctgtgtgcatgtcatggaccagtgagctggagatggctgaatcttccaagagaaacaaggttggataagcgcttccttttttttagcccaggagaggtggatgtttgtctgagaaaacaatggcctcaagggaggggccttgggcccaccctcacagggggtctctgtgtgatctcttgggatttctccttgtttttgtgagtacctgggaagtgttgtttgttttcttattttctttttaattaaaaaacaaacaaa

SEQ ID NO: 287822 - DNA, 1000 bp, Homo Sapiens
atcgggttcacaggctccacagaggtgggcaagcacatcatgaaaagctgtgccataagtaacgtgaagaaggtgtccctggaactgggcgggaagtcacccctcatcatctttgctgactgtgacctcaacaaggctgtgcagatggggatgagttctgttttcttcaacaaaggagagaattgcattgcagcaggccgactctttgtggaggactccattcatgatgagttcgtgcggagagtggtagaagaggtgcggaagatgaaggtgggcaacccgctggacagggacaccgaccacgggccgcagaatcaccatgcccaccttgtgaagctgatggagtactgccagcatggcgtgaaggaaggggccacactggtctgcggcgggaatcaggtccctcggccagggttcttctttgagccaactgttttcacagacgtggaagaccacatgttcatagccaaggaggagtccttcgggcctgtcatgatcatctctcggtttgctgatggggacttggatgccgtgctgtctcgggccaatgccacggaatttggcctggcttctggtgtcttcaccagggacatcaacaaggccctgtatgtcagtgacaagctccaggcaggcactgtgtttgtcaacacgtacaacaagaccgacgtggccgctcccttcggaggattcaaacagtctggatttggcaaagatctaggagaggcggctctgaacgagtacctgcgggtcaagacagtgaccttcgaatactgaagaaaggtctttgtgagaagaaagtccctgcccctccctcgtggctggggccccctccctcttgagcctgggtgcacagcacctcccacctggggggctagtggaagccctcctgcctgcacaccatgtctgcatcttggacgccctctgtccagtcagaagcagcccttggctgggtgaggtgtgcccctcccagggagaataaagcttctgaagagagaccgtc

SEQ ID NO: 287823 - DNA, 1000 bp, Homo Sapiens; identical to SEQ ID NO: 116830

SEQ ID NO: 287824 - DNA, 1000 bp, Homo Sapiens
gtgacctcccaggcctcttccccgtgtacgtcaacacctcacccagcctaaaggctgagtttacatgatcagagttaggggatccttcagtctgttgattttttttctaaaccttttttttttaatatacatatatatatatatatatatatatatatatatatatatatatatatatatatatatatatatagtgggggtggggcaagggatcagaaattcaaataattcttttctgcttcaatgccagcagaaggtcccccaggtagacatggagaagcactttgttttaaataggagggtttcatagttgcatctgaagccacctggttctgttaaactgtatcgtgcaggttttgggtttggcattattcatgtttctgatcaattctatgcaactctcatagttcctgttactttttagcattagctgccaaatgacttcaaaaggctggggtgggtgacttgactgtgagactggattataacatggacaaatcttattttgcttaatgtgtttgtgtgtgtgtgtgtgtgtgtgtgtgtgtgtgtgtgtgtatgtatatatatatatataaatatctttcccaatatgccccgttgacagtgtttaaattccagactaggactgctgatctgcacaatttaattatgtggttattcgagcacttaatttcactcaaggttcattgggctctgctctcctccctgccattacgggagctgtggacagagctccctcacttcaagattcctagtgtttttgcacaacaggttgtccaagtgagaaagactgagttgcgtgtctgtaaatgtctgcgcagggtgcacatgctgcgaggtctccatcctccgggcctgtccctcccagatgggctgggcctttgggccctcctcagagtatgcctgggtacaaacctcactgttcagatgggctgtaagttctcacttcaaagctatggaatggattttagcacctttaaaaaaaaaaaaaaaaaaa

SEQ ID NO: 287825 - DNA, 1000 bp, Homo Sapiens
tgttgcttgctgtgtgaagcttcgagcattgacagatttctttaggaaaagagaccacttgcaacaagggtctgcgaatttcatatatgacgattttttgcagggcactatggcaatttgaatgcttagaattttaaacctgaagagacactgtgaattcttttgtttggaagaagtgaactggactactttaaaacttttaagggttttctatgttcttcctacctgttaaacctcttccctttctgtgtgtttttattttagcagatagttcaaagcaataaaagatttcttttttaatttgaggtattactgcttttggaaaagttattttataaatatgtgcatattgtcataaaatattgtatgattaattgatttaaataatgcttagccttaattttagataatgtaaatttagaggaatgtactttacaagatagattgtataagaagccaaataatgaaagcctagggaaaaaactaatttatacttatctgaaggttacaaattagacttttaaattttctttgtagttggtggtgtttgagggttggctagaaatgaaagcctggattttgtgccatgtttgtaatatagtttgttccttgatcaaataatcagagaaaagaaacttaaagatctttgtctgtgaagaagaaaattatctccctagttcaatctgtagtgaaataagactacagaaggcattgttttttccttttttattttttgtattatatatttttcttaaatatgttttattgtcttctctaagcaaaaagttcttaataaacatagtatttctctctgcgtcctatttcattagtgaagacatagttcacctaaaatggcatcctgctctgaatctagactttttagaaatggcatatgtttttgatgatatgtcaacattcaaaattgtcctaattaaattgttgtttaaatgtaatgtcaactctttataaacttaaaaataaacaagtaattaaccactca

SEQ ID NO: 287826 - DNA, 1000 bp, Homo Sapiens; identical to SEQ ID NO: 116831

SEQ ID NO: 287827 - DNA, 1000 bp, Homo Sapiens; identical to SEQ ID NO: 222059

SEQ ID NO: 287828 - DNA, 1000 bp, Homo Sapiens
cagatgataaccaagcgccagatcacccagaacacagattaccgcttaaaccccatgttaagaaaagcctgtaaagctgacattcctaaattctgtcacggtatcctgactaaggccaaggatgattcagaattagaaggacaagtcatctcttgcctgaagctgagatatgctgaccagcgcctgtcttcagactgtgaagaccagatccgaatcattatccaggagtccgccctggactaccgcctggatcctcagctccagctgcactgctcagacgagatctccagtctatgtgctgaagaagcagcagcccaagagcagacaggtcaggtggaggagtgcctcaaggtcaacctgctcaagatcaaaacagaattgtgtaaaaaggaagtgctaaacatgctgaaggaaagcaaagcagacatctttgttgacccggtacttcatactgcttgtgccctggacattaaacaccactgcgcagccatcacccctggccgcgggcgtcaaatgtcctgtctcatggaagcactggaggataagcgggtgaggttacagcccgagtgcaaaaagcgcctcaatgaccggattgagatgtggagttacgcagcaaaggtggccccagcagatggcttctctgatcttgccatgcaagtaatgacgtctccatctaagaactacattctctctgtgatcagtgggagcatctgtatattgttcctgattggcctgatgtgtggacggatcaccaagcgagtgacacgagagctcaaggacaggctacaatacaggtcagagacaatggcttataaaggtttagtgtggtctcaggatgtgacaggcagtccagcctgacctttctgcacactccagacaaacttcccagacaagctcctttgtgcctctacgtggagagggtgtggaaagttatcacattaaaagatggaggatttaaaaaaaaaaaaaaaaaaaaaaaaaaaagaaaaaaaaaaaaaaa

SEQ ID NO: 287829 - DNA, 1000 bp, Homo Sapiens; identical to SEQ ID NO: 116832

SEQ ID NO: 287830 - DNA, 1000 bp, Homo Sapiens
gactactccaattgtcacaactgttccaaccgtcacgactgttcgaacgagcaccactgttccaacgacaacgactgttccaacgacaactgttccaacaacaatgagcattccaacgacaacgactgttccgacgacaatgactgtttcaacgacaacgagcgttccaacgacaacgagcattccaacaacaacaagtgttccagtgacaacaacggtctctacctttgttcctccaatgcctttgcccaggcagaaccatgaaccagtagccacttcaccatcttcacctcagccagcagaaacccaccctacgacactgcagggagcaataaggagagaacccaccagctcaccattgtactcttacacaacagatgggaatgacaccgtgacagagtcttcagatggcctttggaataacaatcaaactcaactgttcctagaacatagtctactgacggccaataccactaaaggaatctatgctggagtctgtatttctgtcttggtgcttcttgctcttttgggtgtcatcattgccaaaaagtatttcttcaaaaaggaggttcaacaactaagtgtttcatttagcagccttcaaattaaagctttgcaaaatgcagttgaaaaggaagtccaagcagaagacaatatctacattgagaatagtctttatgccacggactaagacccagtggtgctctttgagagtttacgcccatgactgcagaagactgaacaggtatcagcacatcagatgtcttttagactccaagacaatttttctgtttcagtttcatctggcattccaacatgtcagtgatactgggtagagtaactctcccactccaaactgtgtatagtcaacctcatcattaatgtagtcctaatttgttttgctaaaactggctcaatccttctgatcattgcagagttttctctcaaacatgaacactttagaattgtatgttctctttagaccccataaatcctgtat

SEQ ID NO: 287831 - DNA, 1000 bp, Homo Sapiens
tgttttctgtaggtttatttgttgcatactttgacttaaaaataaatttttatattcaaaccactgatgttgatactttttatatactagttactcctaaagatgtgctgccttcataagatttgggttgatgtattttactattagttctacaagaagtagtgtggtgtaattttagaggataatggttcacctctgcgtaaactgcaagtcttaagcagacatctggaatagagcttgacaaataattagtgtaacttttttctttagttcctcctggacaacactgtaaatataaagcctaaagatgaagtggcttcaggagtataaattcagctaattatttctatattattatttttcaaatgtcatttatcaggcatagctctgaaacattgatgatctaagaggtattgatttctgaatattcataattgtgttacctgggtatgagagtgttggaagctgaattctagccctagattttggagtaaaaccccttcagcacttgaccgaaataccaaaaatgtctccaaaaaattgatagttgcaggttatcgcaagatgtcttagagtagggttaaggttctcagtgacacaagaattcagtattaagtacataggtatttactatggagtataattctcacaattgtattttcagttttctgcccaatagagtttaaataactgtataaatgatgactttaaaaaaatgtaagcaacaagtccatgtcatagtcaataaaaacaatcctgcagttgggttttgtatctgatccctgcttggagttttagtttaaagaatctatatgtagcaaggaaaaggtgctttttaattttaatccctttgatcaatatggcttttttccaaattggctaatggatcaaaatgaaacctgttgatgtgaattcagttattgaacttgttacttgtttttgccagaaatgttattaataaatgtcaatgtgggagataaaaaaaaaaaaaaaaaaaaaa

SEQ ID NO: 287832 - DNA, 1000 bp, Homo Sapiens; identical to SEQ ID NO: 116834

SEQ ID NO: 287833 - DNA, 1000 bp, Homo Sapiens; identical to SEQ ID NO: 222062

SEQ ID NO: 287834 - DNA, 1000 bp, Homo Sapiens; identical to SEQ ID NO: 116835

SEQ ID NO: 287835 - DNA, 1000 bp, Homo Sapiens
accagtgctgatgatgccgtcatgctgctggcctgagacagtatcccagctacaacaggacgacaccgggttcaggaatatgtggctatcaccttgagcactgacagtggccttccaggctagttgccttccaaacgcaggtagccgacctgcaggagggcctacaaacgggcccagcaagagctgggcaacagctggcttgtgaaatgagacaccttgaccaatatgctttgggtggacggtctcctacatgttcagtggaggccaccaggagcatccatgagcggggaaggggtccacacccttacatggcaagttgatacgatggggtgcttggtggatgggccatggaggtccgtgagctggaactgggcacacgccatcccagagggctcaggatgccccaggaaggaaagaagggcaacagactacacgattggacgtgtgtggttgactgggatgaagttggagggaggggcagggccttgcaggggattggtactgatcccagggaggaagtgttggggcttcatgaactaggatgaaaggaggcccctgagccatgacaaggggcacatccaggatttccgccaccctgaatttagtagagctagtaggccctggtcgtcactctgggcagggatgccgtcagccttgagggtcgccacccacctgtgtgttgccctctgtcctggcagggaaacatacaccccttgtctcaccaccaaccttgcttgtgtagtcagcagggctggccctgccccaaggactcactgcatgtacccggacccctaggcctggcctttgcagcatagttgggagcttctggattccatctgcacctgtgagccccatgctggctgtgcactgcgcgggcctgagactgctggatacaatgttgggcaacaactcagccagcctgatggcagcctcagaggcttactctaacccatcccagaataaatggagacttcatgtgttcattgtttcattcactcaa

SEQ ID NO: 287836 - DNA, 1000 bp, Homo Sapiens
ttggcccacgttgaactccatggtgcctgagagagactagttaagggttggtcttctgtatcctctgctgttgagcctctggtaagctttcatctcccatgaactcatttccccataaatgaaatgggtaaataatgccccatttgtagaagtgggtcatcatgactgaggtagcttccagataggccagagtagagtgtagagtgtgccccgtgacatccctccatcttctcctccattatcatctagcagggtcagactgggaaacctggttggccacgccacaccatgaccgaggagccaactgggacttctggctgtttgacatcctcatgttcccgttggtcttccggagaatagtgctaccctcacatcccctggagcacagccttcctgaaatgccctcaccccatgcctttgccattgtgtgctctcagatttcttccactgtttgacaccctccttagagggctgctcttttttttccagagataatcctagccatcctctccactcccacggctggggacaatggccacttactacctgtgcactttgccactcgggacacctgggtggtttctcttaggactttgcccacctccttctcatggcacttgctgtggaaaatgcctggctggcctcgtggggcctgtctcacttttccaggagacatgacccactaacgtggcaactttaacccaaaggcccctcagacatgttacagcaaatctggagccacagacaggttccctccattggcagcccattgtgtttgaaattccatgtcgggtttacttggaatgaaagatacttgaattattgtgcgcctgtgagcgcccagcttctgtttcatagtcttaacaggtggccattgtcgtgaaacgagtgatgcctgaagatctcagtgatgtttgaaccttctgtgtaactttttattaagtctttgtatctctcgactgattaataaagaagagaaacacgaaaaaaaaaaaaaaaa

SEQ ID NO: 287837 - DNA, 1000 bp, Homo Sapiens
tgccgtgtccgagccattggtgctgatcccagcagcacccttgtttcccagcagctctggggtctagcccagcagctggtggacccagcccggccaggagatttcaaccaagcagccatggagctaggggccacagtgtgtaccccacagcgcccactgtgcagccagtgccctgtggagagcctgtgccgggcacgccagagagtggagcaggaacagctcttagcctcagggagcctgtcgggcagtcctgacgtggaggagtgtgctcccaacactggacagtgccacctgtgcctgcctccctcggagccctgggaccagaccctgggagtggtcaacttccccagaaaggccagccgcaagccccccagggaggagagctctgccacctgtgttctggaacagcctggggcccttggggcccaaattctgctggtgcagaggcccaactcaggtctgctggcaggactgtgggagttcccgtccgtgacctgggagccctcagagcagcttcagcgcaaggccctgctgcaggaactacagcgttgggctgggcccctcccagccacgcacctccggcaccttggggaggttgtccacaccttctctcacatcaagctgacatatcaagtatatgggctggccttggaagggcagaccccagtgaccaccgtaccaccaggtgctcgctggctgacgcaggaggaatttcacaccgcagctgtttccaccgccatgaaaaaggttttccgtgtgtatcagggccaacagccagggacctgtatgggttccaaaaggtcccaggtgtcctctccgtgcagtcggaaaaagccccgcatgggccagcaagtcctggataatttctttcggtctcacatctccactgatgcacacagcctcaacagtgcagcccagtgacacctctgaaagcccccattccctgagaatcctgttgttagtaaagtgcttatttttgtagttaaaaaaaaaaaaaaaa

SEQ ID NO: 287838 - DNA, 1000 bp, Homo Sapiens
gatatttattccatgcctactctatgctaggcactgtgctagatggtatgaaaacttattaggaacctttttgtttttgagaccattgcattctggctggtttgtgctggtttaacgacatctaagaaggtttagaaatggtgagaccaaaacaataactgttaatgatggacagcattattaggaaccctgtagtatgatatttaacaatataggcttcaagaagggctggtcctaagagggggcagaaatgaatgaccaggttaaatccctctacatgtggtttctgtttgaaaaaaagaaaactgacatttgaacaggacttttaatttgtttaaaactctggtaattacttgtaacagtagaaaatagaagtcattcttattttagaaaaagtgacagaagcagtccagtaagattatatgtttctgtttctggtaaataccatatatgatcctcgaaatgataatatctccagaatattgttttcacccaaatttgagtagatattttaaacacctaacaaagtaaagggctaaaagccattcagatagcagtaaaacattctgtatgatgtgcaataaaacatccaagatcttttttgaaagttttatttataatatacatttttgtatgagaaaggtgattggtacagggtgcctattttagtcatggatcaaaatttgtgtaacttgcagggctttctttctttttcttcaaatttacaagggttcattttggaaactacattttaaactttggaatcaaattgtttcttatttgggaggataatgtatatacattggtattatgttaaataataaaattgttctaatttggtgccatttcctgaatcacaactgtatttttgtatctcaagctattttcatatgttatgtgtcaatgtatcatctctcagaaaggttttacaatccaaacattatatgttctctgtgtaactgaatttcacttatcttttataaaccagaaacattaattg

SEQ ID NO: 287839 - DNA, 1000 bp, Homo Sapiens
tttattaaatcatccaaccaaagcataggaaacattgacccagaacctgacttaatggttttgaagatttactatgcaatagggtaactttgagtttcagcaaatgtctttaggttgaaggaattacctatgtcatgaaggacctgtctgtggtttttcaatggagtctttaagcatgatcttttttctgtctagtacttgttttcattctggccagcagttctacattaaatcaccttgtcaagggctctgtttacatctatacattttgaagatgaaatttttagccttaaagtttatattctcaagtccttttacaatcagtgtgtctcctgaactagcacacaggctgtagaaacagtcttagaaatcattgaaagatttgattatgaaagaatagcaaaattatatttcttgacatataaaaagttggtttaatgcctttatttctctttaaggaccagaaccaggaatactatatcgaaaaattagtctgtggatttaacactgacttagcatatagcttaaagttgctcttttggtttttaacttcctccatacataagcttcaaggacaataagatgttaaaaaggaggaaataattatttttattttgacactgtgacagttttggtaactaggatcctagggagggaaatgtttgcctgttgaacttctttctgttatgagaggatttagttaggtcattaagatgttgatcacacagcttcaatcacaatatgccaagtataacctggtttcgttagaggtgtctacagtccagatgttcttcgtaataaaagcaaagtttttgaacctctgagtccaaagcaggctggttggcataatatgtaatttgaaaaataaaatcttatcttgcagcactatcagtatgttgaatttattatgtatattatttctaatatccgaaactaaatacttgattttttaatatgtgtgtttattttatgatattgctattaaatttttattatctac

SEQ ID NO: 287840 - DNA, 1000 bp, Homo Sapiens; identical to SEQ ID NO: 116836

SEQ ID NO: 287841 - DNA, 1000 bp, Homo Sapiens; identical to SEQ ID NO: 222065

SEQ ID NO: 287842 - DNA, 1000 bp, Homo Sapiens
cttggaggcacccccaggggcagcccatttctcaaagtccagaaaattagggtcccagaagggggcagcagcaggctgggagttaggagggagagcagggtgccggccctgccaccaagttgagagctggaggggaggtggggagagaacatcacagagcagccagccctggttcactcctggcagtttcttctcaagctccttccctaggagcatggtggcacgtgcctgtggtctcagctacttgggaggctgaggcgggaggatcgccagagcccaggagtttgaggctgcagtgagctatgagggtgcctctgtgctccatcctaggcaacagagtgagacgctgtttaaaaaggaaaaaatccttccctagagctagtatcctaaagctgcagagctagcccagacctcattggtttccttgtccttggggtgcttttcctgaatctttgggggtgaagggagtgttgctcccagtccagaggcctgattctgttcggactgggttctcaagacacgaccaggttctcaagacacgagtccccttgttcctccccattaaagggggtttgtcagaagcaagaacagcccctctccccagtcacagcctgaagggaggccccgagagcttcctccttccccccacctgctccttaccttctctgccctgctttttagaactgcagttcattgttttaagggattgggggagggagcctggggacacaaaccttttatacaatacaaagctttgcttttttttttttttttcttccttttccctttctcggttctcttctctcctctgaatggctgaagacccctctgccgagggaggttggggattgtgggacaaggtcccttggtgctgatggcctgaaggggcctgagctgtgggcagatgcagttttctgtgggcttggggaacctctcacgttgctgtgtcctggtgagcagcccgaccaataaacctgcttttccaaaaaaaaaaaaaaaa

SEQ ID NO: 287843 - DNA, 1000 bp, Homo Sapiens; identical to SEQ ID NO: 116837

SEQ ID NO: 287844 - DNA, 1000 bp, Homo Sapiens; identical to SEQ ID NO: 116839

SEQ ID NO: 287845 - DNA, 1000 bp, Homo Sapiens
gttttgaaatatttgccattgttgtttaaatacctatcactgtggtagagcttgcattgatcttttccacaagtattaaactgccaaaatgtgaatatgcaaagcctttctgaatctataataatggtacttctactggggagagtgtaatattttggactgctgttttccattaatgaggagagcaacaggcccctgattatacagttccaaagtaataagatgttaattgtaattcagccagaaagtacatgtctcccattgggaggatttggtgttaaataccaaactgctagccctagtattatggagatgaacatgatgatgtaacttgtaatagcagaatagttaatgaatgaaactagttcttataatttatctttatttaaaagcttagcctgccttaaaactagagatcaactttctcagctgcaaaagcttctagtctttcaagaagttcatactttatgaaattgcacagtaagcatttatttttcagaccatttttgaacatcactcctaaattaataaagtattcctctgttgctttagtatttattacaataaaaagggtttgaaatatagctgttctttatgcataaaacacccagctaggaccattactgccagagaaaaaaatcgtattgaatggccatttccctacttataagatgtctcaatctgaatttatttggctacactaaagaatgcagtatatttagttttccatttgcatgatgtttgtgtgctatagatgatattttaaattgaaaagtttgttttaaattatttttacagtgaagactgttttcagctctttttatattgtacatagtcttttatgtaatttactggcatatgttttgtagactgtttaatgactggatatcttccttcaacttttgaaatacaaaaccagtgttttttacttgtacactgttttaaagtctattaaaattgtcatttgacttttttctgttaaaaaaaaaaaaaaaaaaaa

SEQ ID NO: 287846 - DNA, 1000 bp, Homo Sapiens; identical to SEQ ID NO: 220848

SEQ ID NO: 287847 - DNA, 1000 bp, Homo Sapiens; identical to SEQ ID NO: 222068

SEQ ID NO: 287848 - DNA, 1000 bp, Homo Sapiens
gacccggctgggcaagcagggccggcgagtcgtggtcatcacccagaacatcgatgagctgcaccgcaaggctggcaccaagaaccttctggagatccatggtagcttatttaaaactcgatgtacctcttgtggagttgtggctgagaattacaagagtccaatttgtccagctttatcaggaaaaggtgctccagaacctggaactcaagatgccagcatcccagttgagaaacttccccggtgtgaagaggcaggctgcgggggcttgctgcgacctcacgtcgtgtggtttggagaaaacctggatcctgccattctggaggaggttgacagagagctcgcccactgtgatttatgtctagtggtgggcacttcctctgtggtgtacccagcagccatgtttgccccccaggtggctgccaggggcgtgccagtggctgaatttaacacggagaccaccccagctacgaacagattcaggtttcatttccagggaccctgtggaacgactcttcctgaagcccttgcctgtcatgaaaatgaaactgtttcttaagtgtcctggggaagaaagaaattacagtatatctaagaactaggccacacgcagaggagaaatggtcttatgggtggtgagctgagtactgaacaatctaaaaatagcctctgattccctcgctggaatccaacctgttgataagtgatgggggtttagaagtagcaaagagcacccacattcaaaagtcacagaactggaaagttaattcatattatttggtttgaactgaaacgtgaggtatctttgatgtgtatggttggttattgggagggaaaaattttgtaaattagattgtctaaaaaaaatagttattctgattatatttttgttatctgggcaaagtagaagtcaaggggtaaaaaccctactattctgatttttgcacaagttttagtggaaaataaaatcacactctacagtaaaaaaaaaaaaaaaaaa

SEQ ID NO: 287849 - DNA, 1000 bp, Homo Sapiens
ctgcaggaaatcccactaaagcatagttgtatactatctttaactggtttttcacgatggggcactaggaatctcgacattaatcttgcacagaggacttctacagagtctgagaagatatcatcatgctgaatctgatcatactgttttttaaaagtttaaggataagacatgtgtatatgtaacaaaacacattgcatctagaaatcaaaacttgaaagtatttccagggattaggattagaaggaatattagaggaaacttgaaatctgagtttaaaaagattttacctttttgattgctgcagaaatgtcctatgcactctttgcaagagcacacaacaaatgtcagataccaatttttgcaaattagatttaatcttattaaatgtttttatcttactctttctgtacagatatatcaaatcacatgaaatatttaaagtttgaaaattataattacctataaagctgtgaaaaatagaagtataatttgaaaaaacatttcacttatcagagatttttatatttatacaaaagattactaaatgaaggattgctaaatgtttttggttcaattacataaaaattaatattctgggtctgatctgtcagagaataaatatcaaatctaaatttaatgtagagatacatactatttctccatatgaattttaagatattttagtgcttcaagactgctgaaagcaatccagttgctcctgtgctagatggtagccagagaattttatagtaatggaggttagcccttaatctcttcattgcatttcatttctgtaaatcagattaagtccttaatattattttaaattaaaatttgtgtgtaattgccattaaattttcaaaatgtaatttaaaaggattaaatactcatttaataatttaaaataattattgtataatatctacatttggagaattttgaactatcaagcatatactgtatacagttagaaagttattaaatgaacattttactc

SEQ ID NO: 287850 - DNA, 1000 bp, Homo Sapiens
tctcctctctgggccttggcttgggaccaggtacgaaggatccccaagcccttcaggcctgagatcagagccagatcagccttaagtcacctcccatccaagaacttggcctaaaaatactcccctatttctaaccctcaggacggatctgatattaaatgccttccctgggaggaagggtgctttccccctccctagaggtgcccattccataccctgggagactgaggagagcattggctgaagcccagttcctttcccatccatccccaactccaataatcccccactcctcgcaggtctcagtgtcatgctgtcttggggcagggtgaaagggtagtggcagcagggcgcccactctggagatcctcaaaaaaggccctcctctgtggctggcagcctctgacctttccctgggcttcaaaggaaggctatggagtttgctgtgggccctgcaaccttcccagccactcctgctgcactaaggacttaggatccttttatcacaaatcgggattctctcccccaccccgaattctgtctgcttaaactggaatacacaggagcccttcctggcctggatggtgtctcccagcttccccgcccagcttgcccaccccatagttggtgagatgccaagtttggtctgagttgtgaccccttcagagtagatgcccggcaggctggggttggcccctggagggtcaggggaccatcttcttattccctcttttctcattcctccaacttcctcccctccttcaattatttttttgtaaagttgatgccttactttttggataaatatttttgaagctggtatttctatttcttttggattttttttaatgtaaggttgttttgggggatggagttagaaccttaatgataatttctttcgtttggtgtaggttttagagatttgttttgtggagaggtttttttcttttgatgtaataaaatttaaaatggaaatgaaaaaaaaaaaaaaaaaaaaaaa

SEQ ID NO: 287851 - DNA, 1000 bp, Homo Sapiens; identical to SEQ ID NO: 222071

SEQ ID NO: 287852 - DNA, 1000 bp, Homo Sapiens
tagcagctgctgatgagctttcgaaacaagatatttttatccgtgtcatcgacctgtttaccattaaacctctggatgtcgccaccatcgtctccagtgcaaaagccacagagggccggatcattacagtggaggatcactacccgcaaggtggcatcggggaagctgtctgcgcagccgtctccatggatcctgacattcaggttcattcgctggcagtgtcgggagtgccccagagtgggaagtccgaggaattgctggatatgtatggaattagtgccagacatatcatagtggccgtgaaatgcatgttgctgaactaaaatagctgttagctttggtcttttggcctctttaccctgtgtttatgtttgttccaaaaccatcatttaaatctctactgtcacattttgtttcttaaaagcaaagccagctaacaccttcattcatccctagttcggaaattcaagctaactacttaccctttaaactgtcactgcatatgcaagtaccgctctaatttttggatcattaaggggagttacacaacttttaagtgaaaaaaataggtaacaaaacaaccacctgatagtaagttttctgataagactatagataagtggtagaggtaatcaattcttccgaagtgtttccttcgtgaataactggtagaggtaatagttttttcaatgtatttccttcatgagtaaagaaaatgtggattgaagtatagattccagtagcctagtttccacagcacgataacaccatgacgcctactgctgttcccaccttgggattctgtgtgctgccatcccacctgcagctgccctggaattcccttcgctgtttgccttcatctccctccacgtttgagaggctgtcaggcagcagcgaaagcttgttaggatgtcctgtgctgcttgtgatgagagcctccacactgtactgttcaagtcaatgttaataaagcatttcaaaaccaaaaaaaaaaaaaaaa

SEQ ID NO: 287853 - DNA, 1000 bp, Homo Sapiens; identical to SEQ ID NO: 116844

SEQ ID NO: 287854 - DNA, 1000 bp, Homo Sapiens; identical to SEQ ID NO: 116845

SEQ ID NO: 287855 - DNA, 1000 bp, Homo Sapiens
ttcttggcaccttcaggtctctggttttctcattcatgccaatgcttgtgggctggggttggcgttctgaccccacagggactggtggctggttccagggctcgtcccggcatttcatgtcttcccacggggttgagtcgggccataggggtgagcagctgcctggaagagttctgggaagtataaccctccattttttcttgttttataatctctttgtttaataataagtagaagaaataatttaaatgaactgcttagccctgctctgaagaaccttttttggaattagattttagttgattttttaaagaatacagcccaacacttgttttttacattttaagagttgtagaagttgttcctaacttggggactggacctaccctctaggagggagttgttaatggggctcttttagcccactgatgcttacttaggccggagagcaggggacacggtgctaggttccctcgtgcagtgcctggtgctctcaaattgtctcaaaaggaccaagaggaaaagagtcggaggggtagaccctgcagccctgttgagaagaaagattccagtgaagttgctgatggtatggctgtggtctgggacttgcggtgtctcggcatacccctctcctcttcccacctcctcctggctatgttctgcagcctcccagagtagaaaactactttgttacttaaggttgttcaccttgtaccagtggttatttgagtttgttcctattacaccaatccttacttgaggtggttcggattacagtttccaaatgcattctgggattgcctattccagagagggtacagaaaaagcacacagatggcttgtctcaggagtgttgaatgtgtgccccgctgctgtctggggggatgggagtgggctctggggtcatatgtgaacatccccttggatgatttgcggttgcttagaataaaacttgctactagcaaaagaaaaaaaaaaaaaaaaaaaaaaaaaaaaaaaa

SEQ ID NO: 287856 - DNA, 1000 bp, Homo Sapiens; identical to SEQ ID NO: 116846

SEQ ID NO: 287857 - DNA, 1000 bp, Homo Sapiens; identical to SEQ ID NO: 116847

SEQ ID NO: 287858 - DNA, 1000 bp, Homo Sapiens; identical to SEQ ID NO: 116848

SEQ ID NO: 287859 - DNA, 1000 bp, Homo Sapiens
caagatatcagccagatgtgaagtttatccaggttgatatctgtgcagaagaattggggaataatgtaaagcccgctgttactttgctaggaaacatacatgctgtcactaagcagcttttagaggaacttgataaaacaccatggcagtatcctccagagagcaagtggtggaaaactctgagagaaaaaatgaagagcaatgaagctgcatccaaggaactagcttctaaaaaatccctgcctatgaattattacacagtattctaccatgttcaagaacaactacctagagactgtttcgtggtaagtgaaggagcaaatactatggacattggacggactgtgcttcagaactaccttcctcgtcacaggcttgatgctggtactttcggaacaatgggagttggtttgggatttgctattgcagctgccgtggtggctaaagatagaagccctgggcattggatcatctgtgtggaaggagacagtgcatttgggttttctggcatggaggtagaaaccatctgcaggtacaacttgccaatcatactgttggtagtgaataacaatggaatttaccaaggttttgatacagatacttggaaagaaatgttaaaatttcaagatgctactgcagtggtccctccaatgtgtttgctgccaaattcacattatgagcaagtcatgactgcatttggaggcaaagggtattttgtacaaacaccagaagaactccaaaaatccctggagcagagcctagcagacacaactaaaccttctcttatcaacatcatgattgagccacaagccacacggaaggcccaggattttcattggctgacccgctctaatatgtaaataaagacgccagttggtggtcttgagttttctctttcttgcaagatgaaattttattttccacagcaaaattactctactgttaaaattgtgcaaaataaaataaacatttaaaatgacattttacagtaaaaaaaaaa

SEQ ID NO: 287860 - DNA, 1000 bp, Homo Sapiens; identical to SEQ ID NO: 116849

SEQ ID NO: 287861 - DNA, 1000 bp, Homo Sapiens; identical to SEQ ID NO: 116850

SEQ ID NO: 287862 - DNA, 1000 bp, Homo Sapiens; identical to SEQ ID NO: 222073

SEQ ID NO: 287863 - DNA, 1000 bp, Homo Sapiens
atatccttctatctgtgtctggaaatcccttggagacagtgaaaacattttgcgcttctccaaatttcgggtgcatgaatccatgaggatctccaccatgacatctcatgattatgctctgcctgtatttgtctacacaaggctagggtacagagatgaacctttatttttcctttctaagcaagatctagtcagcaccataggagaaagtgctgccttgggagctgcaggcattgttatttggggagacatgaatttaactgcatccaaggccaactgtacaaaggtgaagcagtttgtgagttctgatttagggagctacatagccaatgtgaccagagctgctgaggtatgcagccttcacctctgcaggaacaatggcaggtgcataaggaagatgtggaacgcgcccagttaccttcacttgaaccctgcaagttaccacatagaggcctctgaggacggggagtttactgtgaaaggaaaagcatctgatacagacctggcagtgatggcagatacattttcctgtcattgttatcagggatatgaaggagctgattgcagagaaataaagacggctgatggctgctctggggtttccccttctcctggttcactaatgacactttgtctactgcttttagcaagttatcgaagcattcagttgtgagataattgagtttaaagggaattgtgtggcctctagcctagtcatttaaagaaggatgtaacttataacattttttttctcttatgaattctattgagagatattataagtagacattatgtatgtcacttaacataaacagaaacattattttatttgcctccagtctggctaggaaaccagatctggggtaaagtcaatgtacacttcctccttattggaatatttaagttgcatttaaactaaaactagtataatttagtcttttcatgaatgtacatacataaaattatacataaaaatattaaattattcatttcaaaaaaa

SEQ ID NO: 287864 - DNA, 1000 bp, Homo Sapiens
gccccccaagcggaggaggcggaacccctcagagtcaggctctgagccctcttcctcacttgattcagttgaaagtgggggtgctgcccttggaggacggggctccccttcctcccatcttcttggagcagatcatggccttcggaaagccaagaaaccaaaaaagaaaactaagaagagaagacacaagtcgaatagtcctgagagtgagacagaccctgaggagaaagctggcaaggagagcgatgagaaagaacaagaacaggacaaggacagggagctccaacaggcagagctccctaaccgttccccaggctttggaatcaagaaggagaagacaggctgggacacgtcagaaagtgagctgagtgagggtgagctggagaggcggcggcggacactcctacagcagctggatgatcaccagtgacccaatgagctgttctctgcctcgggtctgtgtgaggccatggctcctgggccaccctcaccgtctgcctcagacttcttctttagtctggtctgtgtccactttttctaaagtaaccccacccccagcacaccattgttggcacctctcaaggttgctcttggtgttcaagggtcccctactccctggactagtgcagtccttgccctcagccccagaccagagatgggtggtatatgccatgtggggtgggtgatgccagtagataaaagtgtgagagaaggggtctccagggaagagtcacaggctgttggacgcagcctgggtggcagagggcagggtcatcaccctctagcatcagtgcctgctcctgcctgccctggccctgaggctccaccacttcttcctccacccaggacctaatgtacgtgtgttttgttttttgttttttaaataacaatatttataacatggaaaaaaaaaaaaaaaaaaaaaaaaaaaaaaaaaaaaaaaaaaaaaaaaaaaaaaaaaaaaaaaaaaaaaaaaaaaaaaaaaaaaaaaaaaaaaaaa

SEQ ID NO: 287865 - DNA, 1000 bp, Homo Sapiens
tcctgaggcccctcaacctgaaggccctgctacaagcagttcacttcaggagcaaaaacctctgaatgtgattccaaagtcagcagagaccttgcgccgggagaggcccaagtcagagttgcctctgaagctgctgccgctaaatatatcccaagccctggaaatggcattggaacagaaggaattagaccaggaacctggggcaggacttgacagtctgatccggactggttccagctgccagaacccaggatgtgatgctgtttaccaaggccctgagagtgatgctactccatgtacctaccacccaggagcaccccgattccatgaggggatgaagtcttggagctgttgtggcatccagaccctggattttggggcatttttggcacaaccagggtgcagagtcggtagacatgactgggggaagcagctcccagcatcttgccgccatgattggcaccagacagattccttagtagtggtgactgtatatggccagattccacttcctgcgtttaactgggtgaaggccagtcaaactgagcttcatgtccacattgtctttgatggtaaccgtgtgttccaagcacagatgaagctctggggggtcataaacgtggagcagagctctgtcttcttgatgccatctcgggttgaaatctccctggtcaaggctgacccaggatcctgggcccagctggagcaccctgatgcactagctaagaaggctagggcaggggttgtgttagagatggatgaggaagaatctgacgattcagatgatgatctgagctggacagaggaggaggaagaggaggaagcaatgggggaatagtgacaccagacagttgatgtctagataggacctcaatgattcccttagaatcttagataccaggatattgttggccatgtggcatcattgagcagcaggaggctgaaggaggggagaacaaaattgtccaaaccatgctgtttttttcccttaaataaatct

SEQ ID NO: 287866 - DNA, 1000 bp, Homo Sapiens; identical to SEQ ID NO: 222074

SEQ ID NO: 287867 - DNA, 1000 bp, Homo Sapiens
gccctgaccgccgacgccgaggctgccgcgggctcccaggccgagggccgccgccagcttgcctccgaggggctgcctgccctcgcccagggcgctgagcgggtctaaaaccacagccccagattgctggttcgcgccctcctcatctcgctcatccctgggcgcgcctcccaccttccacccccaactcccttccagggttcgcctcatctgaggcccagataatggtgagaggccaggagaccttgtctggaaggccctggaaggagaagcaccaccttacccattcgggccagtttctccctcttcacccctgcgcctccacccctaccccgcacatccaactgcactaaactgcctctgctctcttgtcttcagacagccctgacagcacgctccagccctctgggaactgaatccaacacgtccaacacttggcactgaactgaagcaatgcattctatcagaactctgggccgtctaactggcagctgctccaggggctgccagggactgctcactctgcagagccaacgggcttgccaggccgactgcagcagctccagcttccagttgccttagggacagagacaaaggaaatgaagagacctcagacatcttttccctccctctctctttcagcagggagctagcaggacactaggaccagtctgtgggatagaatgaacttaatgggggacggaagggggaggagtgctcaacggggagggaaatgatctatgactccaaccgtatgattttcttgcctccccagttttcatcccagtggtaacgcctgatttttggtagctatgccatcttctgctgaggattaccattactgggtgtatcaccccagtacttccaaatgcctctcctctattgattcagttgttattgcagtgtctgcttcatccgtggaacttgaggctcagatgccccctgctctgtaaccctggggaatgtcagaggcaggtaataaaggttgtttaaacaataa

SEQ ID NO: 287868 - DNA, 1000 bp, Homo Sapiens
aagttgtctacttttttgatcctagggtgctccttttgttttacagagcagggtcacttgatttgctagctggtggcagaattggcaccattacccaggtctgactgaccaccagtcagaggcactttatttgtatcatgaaatgatttgaaatcattgtaaagcagcgaagtctgataatgaatgccagctttccttgtgctttgataacaaagactccaaatattctggagaacctggataaaagtttgaagggctagattgggatttgaagacaaaattgtaggaaatcttacatttttgcaataacaaacattaatgaaagcaaaacattataaaagtaattttaattcaccacatacttatcaatttcttgatgcttccaaatgacatctacagatatggttttgtggacatctttttctgtttacataaatttatccacttaaaatgtgataatgtggagacaaagcaagatttgattacataaacttttctctgcattggtcttttcactatcttatttgctaacttttcttatttttcttcaacctccccaccctccattttttggatattaaacagggaaagcttgctacattataaagattgttggcaccatttattttacacaaaggctaaaggttaacttttggaaatgatgagctacttttatatatgtgtttactcatgctttgtgatatttctggatcattccagtcataaagacttattacatgtactatttcttgctacctgtgaaaaggtatattttaaagaatgtataaccaacagtccatttactttttattagtatgtagaggatttgtatctaattcatgaatgtagttttacagtagtttgtcattgtaaatggagcaaagtacattatcttctaaaatgtacattatgtaagaattgtaaatatacttaagtaatttgtatgccaaaaaattacaataagtcaataaagatctcacctctgaaaaaaaaaaaaaaa

SEQ ID NO: 287869 - DNA, 1000 bp, Homo Sapiens
taacacataaacacatacatgtctgactgttgcagaactgttcgagctcctaattcagtgttaccttgttttagtcgcagcaaccctctcccctaccccttgcccgcccacgtttttctcactcttccgggttgtgcaataactctcccagccagtggtcctttccacagcctttctgtcccttaaaacacctgcaactgggggagaaatgggacccatgggagggggagtcgtcatcccttacacaagaaatagccactttccttttgttgtcattcttgtgatcctgggtgggtttctgtggcactcttttagaacatgtagcatcatcttagaggtctatttttaaaaaatgtgttgaagaggaaaaaaccattctcacgatggggcttaagtcattgtccaggaataagattggcgtggtgcccatgacatcaccgtcactctgcctaaaagcactctagagctacttgttcacgtggagaggaaggatattttgcgaagcaacagccgcaggtggagagccctgttcacctgatagggtctagctgtgacagtaaatataataccgctgtttccttgggtacagatttgagtgttcatgtgatgagactgtaaacctcatttttcggttcctctgtttaaaaaaacatctgaaggatgaactaaggctgctggtgccctgagcaactgataatgcaaatgtggacaaagtgtctgttttctactctagcctgttcatatggaccaaatttcaacaaggaactcaaggaaaatttgtacctgccgtatttatgctttcatgtaaaaaagggttggggggaggggtgtctttttgcttttggtgaactttttttcaaaatcatttttccactgtttctgtctggttttaaaacaaattacagttttgtatggattttttaaatgtacattttggaacaaatgatcaaatattttctgaaataacaataaaaggcagaaaattatcagaaaaaaaaaa

SEQ ID NO: 287870 - DNA, 1000 bp, Homo Sapiens
ccagtgttttcaacacgttagaattgataacaggtatttttcttttgttaccaggccttgttcatcaaaacaggtgacagtgagtaaccaaatgcagaccagttctatgcaggataatgataaattcccttctagctctattgtaaattgttgtacagatgtcatatttcaattactaagtttcagcagcttattcttgtacaaatgtttaaaatatggcttttctaattggatattgtattttttttaagtcttcttgaaggcactctaattgctgctaaatgatgttgcttctttgctaaaaaattaaatgacctagaaggtgcaagttgactgtacatcatagatattaaaaagcagacagtcattaacaatcaagatgtaaaagtgatccatgttggacataattgagtttttaaatcagtttattgggttctagggctgtagaacacatagatactagatttttaatttgttcatggttattctacatttctagaaagttcttatcagcaagatggtcccataagcaaatttcttgtggtttgtacagatttgttaaaatgtgaacgttttctaactgcctcgtagggtagaaaccaatatttttcaggatgctgtatttcactcctgtaaggactttttctttattgtcacattcataatgctgatacttacatgtaagttgttcatgttgcagaaaaaggttatacgtaccacggattctctttaatattgtacagttaaactgtatttctgatgttgcaagccattttgttttttcattgtacatagacacattgtctctttaaaatgctgctgaaattgtagagagtatagccaaaacagtaataaacaatgacagttaaaatgtaaagactatgaaaattacattggaagggagctttcaagatggtaggatattgactaactgagctccttcacttaaaaatcagctgaataaattccttaagtatacttcaaaaaaaaaaaaaaaaaa

SEQ ID NO: 287871 - DNA, 1000 bp, Homo Sapiens; identical to SEQ ID NO: 222076

SEQ ID NO: 287872 - DNA, 1000 bp, Homo Sapiens
acggcacagtccgcaggtgaagatggcccccacaagttccccggcagagccacactgctggccggcagaggctgccctgggcacaggcgctgagcccacctgcagccaggaggggaaactgaggcctgagccgagaagggatggggaggctcaggaggctgcgagtgagactcagcccctgagctctcccccaacagctgccagctccaaggcccccagcagtgggagtgcccagccaccagagggtcacccaggcaagcctgagcccagccgggctaagtcccgccccctgcccaacatgccaaagctggtcatcccctccgccgccaccaagttcccccctgagatcaccgtcacgccacccaccccaaccctgctctcccccaaaggcagcatctcggaggagaccaagcagaagctgaagtcagccatcctttctgcccagtctgctgccaacgtgaggaaggagagcctatgccagccagccctggaggtcctggagacatccagccaggagtcctcgctggagagcgagacagacgaggacgacgactacatggacatttgaggggccactgcagccccaccgccacgccccaggggaccagccaggcctggaatgccccctgggcaggaccctgggcaggaccagaggcccacatggatgccactccccacacagcccccaggcctgcccagcccacctcctcatggcatcctccctgtacccaggtcaggctgtccacaccacatgggagcccagaggaggaggggcccgccttagccatgtgaaggtggattggtcgccatctgcacgccaggcggcatccttttctatgaagtgttgactttgtaaatctgcccacacccagctggccatatccacccctcgacgccgggatgagccggctctgcctgtgtcacagtggaggggtcctttagggccaggctcacccctcaccctttttttggttgcttttctaataaagatggaacagtt

SEQ ID NO: 287873 - DNA, 1000 bp, Homo Sapiens; identical to SEQ ID NO: 222077

SEQ ID NO: 287874 - DNA, 1000 bp, Homo Sapiens
ttcgccattgtttccaaagatcaaggaatgtcaataacattttaaaggaccaataaacagcctcctataaagtaaacctcttcccgtggaagcacactctactactaaagggaaggccctgggctctgatttgtcctttgcattgagaacggtgtggggatcagtgtgtgtgtatgtgatttgtttattgagttggctttgcttttttagtttttcttttaaaaataaaatccttccttcccatgttactaaattaatttatgtttttgagaggttgagtctcaaagtgtaaacaataaacctccattcataaggtggatgttgtaagcttgatggtggttgtgaaagtgatttagctttgaccacttttcatcctacagcttcaatatcaaactggttaggaaagcccagggggaagggagggggcaggggaggaggcaattctgaatgaatgaatggattttttgttgtttttgcatgtttaatatagaagttcccctcgttccttgggagatgatggcctttgaatatgcagacaacctttgaattgtgcctactaaattatagcaggggactttggcacccaaggagttctgactttctgggattataatagtaattcccagccatactctggactttattttgctaaccataactgagcaaatgtaaattactgctatattaatgttttaaagcactgggatagtctaattctaacttgtaattaattatgtttgccaattatctgtttgaaataaatttgtgtctgaacagctattgaaactgttaaattgtacagatattattcatgacagctttgtactgtggaatgtgcttaataaaaaacaaaaaagtttgacttttgtccagtaaattgctaagtaatgtcaataaatcgagtatgggtattatgcagtgcacctaatctggcttcatgcaattgttacttcagctactgattcaaagccaatactcttaataaagtgttgcaatactc

SEQ ID NO: 287875 - DNA, 1000 bp, Homo Sapiens; identical to SEQ ID NO: 222078

SEQ ID NO: 287876 - DNA, 1000 bp, Homo Sapiens; identical to SEQ ID NO: 116852

SEQ ID NO: 287877 - DNA, 1000 bp, Homo Sapiens
tttgcatgaagtcagatagccagaagaaattccattgctggttttcacgaaattcacttgtcttttgctaataaacacatggccctttcccagattattctctagccaagccccacctttgttacgttgaaatccctcatttattttcttctcaaaatgcccattatccaaatgcagaacctctgcatctccaagccagttatgctgaatttgtcaaacttagacacccttgacaactgcactcctactgtaggctcctgtgcatactgtcgtcttctgtgggggatggagaggttagtgtgatgaggtggtgtctgcccaggaggtttctttcaaacatcatggcctcccatccaatcaacatcatcaaattacatgtgtaatcaaggctctgtgccatgggggaaatgaatcatttagctaggccaggatctagtgaaagccacagagtttaaaaccatgaaagaagttgaaggcagcattcctcagctctgtgacttgtgaccctatttgaagtttcaggatttgggtgtcacaaaggattgtccctaatccttggccctggggtcttccgagtgagctggtttaatactctgagaatgagcagggagatccagagaatgaatccctgaccgcatcacctaaactgtcttccaaacatgagacaaagctgactgttcacactgattgcccagcacataccgtcttgccagtttcttcttttctcccagtctcctgttcatccattctgttctcccttggggtgggaatctatgatggaggttactggggaaacagctcagcagatttttggagaccaaaccaaaggtctcactaggaaatttatctgttttaaaacattgcttccttcctggctctgctaaattgaatgctcattgtttgttgttgttgttttttaattctaatgttcaaatcactgcgtgctgtatgaatctagaaagccttaatttactaccaagaaataaagcaatatgttcgt

SEQ ID NO: 287878 - DNA, 1000 bp, Homo Sapiens; identical to SEQ ID NO: 222080

SEQ ID NO: 287879 - DNA, 1000 bp, Homo Sapiens; identical to SEQ ID NO: 116853

SEQ ID NO: 287880 - DNA, 1000 bp, Homo Sapiens; identical to SEQ ID NO: 116854

SEQ ID NO: 287881 - DNA, 1000 bp, Homo Sapiens; identical to SEQ ID NO: 222083

SEQ ID NO: 287882 - DNA, 1000 bp, Homo Sapiens; identical to SEQ ID NO: 222084

SEQ ID NO: 287883 - DNA, 1000 bp, Homo Sapiens; identical to SEQ ID NO: 116855

SEQ ID NO: 287884 - DNA, 1000 bp, Homo Sapiens; identical to SEQ ID NO: 222086

SEQ ID NO: 287885 - DNA, 1000 bp, Homo Sapiens; identical to SEQ ID NO: 116856

SEQ ID NO: 287886 - DNA, 1000 bp, Homo Sapiens
acatttccacgatacactcggccagtcagacgatctcattcaccaccatcatgactaccatcatattctccatcatcaccaccaccaaaaccaccatcctcacagtcacagccagcgctactctcgggaggagctgaaagatgccggcgtcgccactttggcctggatggtgataatgggtgatggcctgcacaatttcagcgatggcctagcaattggtgctgcttttactgaaggcttatcaagtggtttaagtacttctgttgctgtgttctgtcatgagttgcctcatgaattaggtgactttgctgttctactaaaggctggcatgaccgttaagcaggctgtcctttataatgcattgtcagccatgctggcgtatcttggaatggcaacaggaattttcattggtcattatgctgaaaatgtttctatgtggatatttgcacttactgctggcttattcatgtatgttgctctggttgatatggtacctgaaatgctgcacaatgatgctagtgaccatggatgtagccgctgggggtatttctttttacagaatgctgggatgcttttgggttttggaattatgttacttatttccatatttgaacataaaatcgtgtttcgtataaatttctagttaaggtttaaatgctagagtagcttaaaaagttgtcatagtttcagtaggtcatagggagatgagtttgtatgctgtactatgcagcgtttaaagttagtgggttttgtgatttttgtattgaatattgctgtctgttacaaagtcagttaaaggtacgttttaatatttaagttattctatcttggagataaaatctgtatgtgcaattcaccggtattaccagtttattatgtaaacaagagatttggcatgacatgttctgtatgtttcagggaaaaatgtctttaatgctttttcaagaactaacacagttattcctatactggattttaggtctctgaagaactgctggtg

SEQ ID NO: 287887 - DNA, 1000 bp, Homo Sapiens
caccatgcttcccttgtcactgctgaagacggctcagaatcaccccatgttggtggagctgaaaaatggggagacgtacaatggacacctggtgagctgcgacaactggatgaacattaacctgcgagaagtcatctgcacgtccagggacggggacaagttctggcggatgcccgagtgctacatccgcggcagcaccatcaagtacctgcgcatccccgacgagatcatcgacatggtcaaggaggaggtggtggccaagggccgcggccgcggaggcttgcagcagcagaagcagcagaaaggccgcggcatgggcggcgctggccgaggtgtgtttggtggccggggccgaggtgggatcccgggcacaggcagaggccagccagagaagaagcctggcagacaggcgggcaaacagtgagcgcccacccagaccggctgctgcgccccctcctgccagggtggcgattccgctccacagtctcggacggatctgctcagaaaggaagaggcaggcgccagggggaacccccttcgtgttttgtgaccctcccttttaggtgaagcccctttttcttgctaaaaccggcaattctccggttagaaatgttacttggtgttttttggttttgtgaaacggccgtcccaaagctggctggattcctagaagagtctgtgttgaaggcatctttcaagccctcgctctggttctcagggcagcattttccaggcgggtttgttttgcatttcttggagcctctccgagcagcaaccagacgggagatttttattttaagctgttcatgctgggactgacagcctgcagggtttccttgggcgcggccccaaaattgccttcaaaacaaacccgggacggttgaaagccttcgaaccgtgcaggggatgcctcgggccctggcccttcgcttcctctcttgtgttatggaaataaaaacaaataaaactacacactgcacaaaaaaaaaaaaaaaaaaaa

SEQ ID NO: 287888 - DNA, 749 bp, Homo Sapiens; identical to SEQ ID NO: 116857

SEQ ID NO: 287889 - DNA, 1000 bp, Homo Sapiens; identical to SEQ ID NO: 222088

SEQ ID NO: 287890 - DNA, 1000 bp, Homo Sapiens
aaaacagccctgttatctcaggcatcattggcatcctctatgccacagaggaaggattcgcaccccctgaggacgatgagattgaagagcatcaacaagaagaccaggacgagtactgagggcggccgcagccctggctgactgcacggcttccccgtgcctccctccctgctccactcccacattatagtcctttcctaacacggtcggccgggtgctttgtgtcagtgctgcagcactggggagccaggcgaggggggcttgggggcatggggccggaaagcaggcagaagcccgtcctgggtggtgctggcccagttggtgggacccctgtccacacccaccctatttatttccgttgtctctctgctgtgtcgcccaacacttcccagggtgctgctgccacccgccccagccagccacctgctcctgacagccagcagctgtgtatttgacaaagtcattggtatatttttacttactggattctccttgcactttacctgttcttttccagagctgacagcacgggctccggcgcagtgtgcctggcttggcttcccttccccatggctgggggctggggtaggactcacccattctaatttattttgtcttttggcttctcagtagctaaggggaaggctgatgtcaggagagggagagggggctgaggaggtagtgctgtaggcccagggggtcagggaaagggaggggggcatgtgagggatggaaatgacctcctggcaccaggctcacccacccaaggccccctgccccagcactgaatcccagcgctgccctgaggcccccagccactccctccagcagcctggttcaccacacaaactctgcctggaccccattgtctgtctgcttcccacctgccctccccaccccctgcccctcgggcaccagcctgcatatgtgttcacttttatttaaataaacttgtgtggtaaaagtacatgccatgtgtccctcaactgaaaaaaaaaaa

SEQ ID NO: 287891 - DNA, 1000 bp, Homo Sapiens
ttttcctgggatttctgacaacacaaaagtagaaagtgcttggtatttctgtcttatacataggaaaacatttaaaataaatagtttttaattgtaggctcaacatctgttaccccatagctttttcgtatattgtttctttccctttgaatttctttttactgtcatctattattttaacaggagttaaaataactcctgttaaactttctgacaatatcataagaattcatattaaaggtgttattctttctggttgtgagattctagcacaaaggcctaaaatcatcaaattagatttccatttgtaaacaaattctaatgggcaaaatatcttgagagcagtttttatatggattatccataaaatgacctttacatatccctgcagagttggccttttgcccgtggtgtgctagtagctttggctgatgctaagctttcctggtatgcgccctatttttaagaagtaattgcttttgaattaagttatagcattactaattcatgttaatgactaggaaaccctctgtaatttacaagatttttcaaattggtggggagtgaataaatacaatttaaaagtcagaaatcagtttggcaaagtgtactttcttaatttctatttatgatgaagtatagtcataatttatttgtaatactactttatggtataccagtgaaagaactgtagtataaaaaagaggtattaatgttttatgaaatctcatgcatcagttcatagcataaaatctagctggacaactaagaagctatggtagcaaacagtgatgttgatggaatgagaatcatgaactttcatattacctcaaaggatttttttatcagtttttttcacacatcagaaaaaactgactgtataaacacttatcactgacctttttctatgtgtagttttgccttttatcttttcccaaatttttataaagagaaattaataaatattttattacaacattgtaaaaaaaaaaaaaaaaaa

SEQ ID NO: 287892 - DNA, 1000 bp, Homo Sapiens
tgaaaggttgagaaaggaatggtttgatatttaccacagcgctgtgcctttctacagtagaactggggtaaaggaaatggttttattgcccatagtcatttaggctggaaaaaagttgaaaacttaacgaaatattgccaagagattgttatgtgtttggttccagcctaaaaatgattttgtagtgttgaaatcatagctacttacatagctttttcatatttctttcttagttgttggcactcttaggtcttagtatggatttatgtgtttgtgtgtgtgtagtttatcctctctctcatctttatctagagattgactgatacctcattctgtttgtaaaaccagccagtaatttctgtgcaaccttactatgtgcaatatttttaaatcctgagaaatgtgtgcttttgttttcggatagacttatttctttagttctgcacttttccacattatactccatatgagtattaatcctatggatacatattaaaacaagtgtctcatacaacattgtatgtgagagaaatataaatatttacaacctgatattcgttgttgttttattgttaaaagtttattatgcaactctggaggtatagagggcatataagctatgggacatatgctgatcacaggctatattcatgaagttacttttgaccaacctgaaaactgataggattttgtttgtcatttggtaatttctactgcattcttaccatccttctctcacaaattttgatagcttgaagatctttttaattataattttgttgtatttgtttcctaggagcaagtgttcctgctgccagttctttcctctttaggcgtggttgagaaaaagcagaaactttacataaagctgtatttcttaatcatctttaatttgaaacttaagaaaatgaatttattctgttatatttatgtaacttatttcctggaagttatatctactagttttgtttgataataataaaattagctataccttgaa

SEQ ID NO: 287893 - DNA, 1000 bp, Homo Sapiens; identical to SEQ ID NO: 222089

SEQ ID NO: 287894 - DNA, 1000 bp, Homo Sapiens; identical to SEQ ID NO: 116858

SEQ ID NO: 287895 - DNA, 1000 bp, Homo Sapiens; identical to SEQ ID NO: 222091

SEQ ID NO: 287896 - DNA, 1000 bp, Homo Sapiens; identical to SEQ ID NO: 222092

SEQ ID NO: 287897 - DNA, 1000 bp, Homo Sapiens
aaggggggcattctctgtcaatgatgcactaacctcccaacctgatttccccgaatctgagggaaggtgagggagtgggaagggggatggagagctcgaggggacagtgtgtttgagctggagtgctgcgggcagcctttctcatggaatgacatgaatcaacttttttctttgtttcatcttttaagtgtacgtgcttgcctgttcgtgcatgtgttcataaactcaacactttaatcatggtttcatgagcattaaaaagcaaagggaaaaaggatgtgtaatggtgtacacagtctgtatattttaataatgcagagctatagtctcaattgttactttataaggtggttttattaacaaacccaaatcctggattttcctgtctttgctgtattttgaaaaacacgtgttgactccattgttttacatgtagcaaagtctgccatctgtgtctgctgtattataaacagataagcagcctacaagataactgtatttataaaccactcttcaacagctggctccagtgctggttttagaacaagaatgaagtcattttggagtctttcatgtctaaaagatttaagttaaaaacaaagtgttacttggaaggttagcttctatcattctggatagattacagatataataaccatgttgactatgggggagagacgctgcattccagaaacgtcttaacacttgagtgaatcttcaaaggaccctgacattaaatgctgaggctttaatacacacatattttatcccaagtttataatggtggtctgaacaaggcacctgtaaataaatcagcatttatgaccagaagaaaaataatctggtcttggactttttatttttatatggaaaagttttaaggacttgggccaactaagtctacccacacgaaaaaagaaatttgccttgtccctttgtgtacaaccatgcaaaactgtttgttggctcacagaagttctgacaataaaagatactagct

SEQ ID NO: 287898 - DNA, 1000 bp, Homo Sapiens; identical to SEQ ID NO: 116861

SEQ ID NO: 287899 - DNA, 1000 bp, Homo Sapiens
agactgaagaaagcaaagcaaaaactgtatagagagatttttcaaaagcagtaatccctcaattttaaaaaaggattgaaaattctaaatgtctttctgtgcatattttttgtgttaggaatcaaaagtattttataaaaggagaaagaacagcctcattttagatgtagtcctgttggattttttatgcctcctcagtaaccagaaatgttttaaaaaactaagtgtttaggatttcaagacaacattatacatggctctgaaatatctgacacaatgtaaacattgcaggcacctgcattttatgtttttttttttcaacaaatgtgactaatttgaaacttttatgaacttctgagctgtccccttgcaattcaaccgcagtttgaattaatcatatcaaatcagttttaattttttaaattgtacttcagagtctatatttcaagggcacattttctcactactattttaatacattaaaggactaaataatctttcagagatgctggaaacaaatcatttgctttatatgtttcattagaataccaatgaaacatacaacttgaaaattagtaatagtatttttgaagatcccatttctaattggagatctctttaatttcgatcaacttataatgtgtagtactatattaagtgcacttgagtggaattcaacatttgactaataaaatgagttcatcatgttggcaagtgatgtggcaattatctctggtgacaaaagagtaaaatcaaatatttctgcccgttacaaatatcaaggaagacctgctactatgaaatagatgacattaatctgtcttcactgtttataatacggatggattttttttcaaatcagtgtgtgttttgaggtcttatgtaattgatgacatttgagagaaatggtggctttttttagctacctctttgttcatttaagcaccagtaaagatcatgtctttttaaaaaaaaaaaaaaaaaaaaaaaaaaaaaaaaa

SEQ ID NO: 287900 - DNA, 1000 bp, Homo Sapiens; identical to SEQ ID NO: 116863

SEQ ID NO: 287901 - DNA, 901 bp, Homo Sapiens; identical to SEQ ID NO: 29878

SEQ ID NO: 287902 - DNA, 1000 bp, Homo Sapiens; identical to SEQ ID NO: 222098

SEQ ID NO: 287903 - DNA, 719 bp, Homo Sapiens
cagccttataagctgagggagtggagaggcccggggccaggaaagcagagacagacaaagcgttaggagaagaagagaggcagggaagacaagccaggcacgatggccaccttcccaccagcaaccagcgccccccagcagcccccaggcccggaggacgaggactccagcctggatgaatctgacctctatagcctggcccattcctacctcggaggtggaggccggaaaggtcgcaccaagagagaagctgctgccaacaccaaccgccccagccctggcgggcacgagaggaaactggtgaccaagctgcagaattcagagaggaagaagcgaggggcacggcgctgagacagagctggagatgaggccagaccatggacactacacccagcaatagagacgggactgcggaggaaggaggacccaggacaggatccaggccggcttgccacaccccccacccctaggacttattcccgctgactgagtctctgaggggctaccaggaaagcgcctccaaccctagcaaaagtgcaagatggggagtgagaggctgggaatggaggggcagagccaggaagatcccccagaaaagaaagctacagaagaaactggggctcctccagggtggcagcaacaataaatagacacgcacggcagccacagcttgggtgtgtgttcatccttgttaaaaaaaaaaaaaaaaaaaaaaaaaa

SEQ ID NO: 287904 - DNA, 1000 bp, Homo Sapiens
gccccccagtcacagtcaggggcaaggaatacccgctgggcaggattctcttcggggacagctgttatcccagcaatgacagccggcagatgcaccaggccctgcaggacttcctcagtgcccagcaggtgcaggcccctgtgaagctctattctgactggctgtccgtgggccacgtggacgagttcctgagctttgtgccagcacccgacaggaagggcttccggctgctcctggccagccccaggtcctgctacaaactgttccaggagcagcagaatgagggccacggggaggccctgctgttcgaagggatcaagaaaaaaaaacagcagaaaataaagaacattctgtcaaacaagacattgagagaacataattcatttgtggagagatgcatcgactggaaccgcgagctgctgaagcgggagctgggcctggccgagagtgacatcattgacatcccgcagctcttcaagctcaaagagttctctaaggcggaagcttttttccccaacatggtgaacatgctggtgctagggaagcacctgggcatccccaagcccttcgggcccgtcatcaacggccgctgctgcctggaggagaaggtgtgttccctgctggagccactgggcctccagtgcaccttcatcaacgacttcttcacctaccacatcaggcatggggaggtgcactgcggcaccaacgtgcgcagaaagcccttctccttcaagtggtggaacatggtgccctgagcccatcttccctggcgtcctctccctcctggccagatgtcgctgggtcctctgcagtgtggcaagcaagagctcttgtgaatattgtggctccctgggggcggccagccctcccagcagtggcttgctttcttctcctgtgatgtcccagtttcccactctgaagatcccaacatggtcctagcactgcacactcagttctgctctaagaagctgcaataaagtttttttaagtcactttgtac

SEQ ID NO: 287905 - DNA, 1000 bp, Homo Sapiens
tttttaaaaaactctccagataattttgatgtcacgagtcactagtatagactatctatctagtgagttgtattataagcgatgaaatactttaaaagctacccagtaactcttgggattaattttatgaaataaattctgagctgctgcttttgatatagtcagacttaagactgaaccccagtagacaggcaatagatatagaattctggttagctaattgaacttttgtgacctgtttaaaaacaaatcaaatttattgaacaaatgacaaggcacaaatactttcagaattgtatttcagttttgaagatttaaaaaaaatgtgaaaataaatatatattagtatcctttattttaaagtcaattgtaaaccagaagtactgttattttggtgattaaaatccaaaactttagctgtatttcagtaacaaaaacataccttactagactgtgatggctcacacctgtaatcccagtgctttgggaggctgaggtgggaagattctttgagcccaggagttcaaggctgcagtgaattctgatcgcaccactgaactccagcccgtatgacagagtgagaccctgtttctaaaaacaaaacaaacaaacaaacaaacaacgtatcttactgactaaactggaatggaaatcttataattagtgttgtatttttctgcaaaatagtgaattggtacttgggagacttctgttctttgttgaaaaaaattgcctttgttttgaaattatatcacctgtgttctgaactaaaatgatgggagttcattttgtatttactttgcagtaagtatcatgtaaatatgcaaatgttgaatgtaatatagattgtgtcctcattgagtttttgggtgatacagtttataaatataacaattatacaccctcatacattcgtctgattttgagcttgtaagatgagaactgctttttacacatttaataaaaaaaggtctctgaattaaaaaaaaaaaaaaaaaaa

SEQ ID NO: 287906 - DNA, 1000 bp, Homo Sapiens
gtggacagagcaccaataccggctgccccccatgggcaaggccttccaggagctggcgggcaaggagctgtgcgccatgtcggaggagcagttccgccagcgctcgcccctgggtggggatgtgctgcacgcccacctggacatctggaagtcagcggcctggatgaaagagcggacttcacctggggcgattcactactgtgcctcgaccagtgaggagagctggaccgacagcgaggtggactcatcatgctccgggcagcccatccacctgtggcagttcctcaaggagttgctactcaagccccacagctatggccgcttcattaggtggctcaacaaggagaagggcatcttcaaaattgaggactcagcccaggtggcccggctgtggggcatccgcaagaaccgtcccgccatgaactacgacaagctgagccgctccatccgccagtattacaagaagggcatcatccggaagccagacatctcccagcgcctcgtctaccagttcgtgcaccccatctgagtgcctggcccagggcctgaaacccgccctcaggggcctctctcctgcctgccctgcctcagccaggccctgagatgggggaaaacgggcagtctgctctgctgctctgaccttccagagcccaaggtcagggaggggcaaccaactgccccagggggatatgggtcctctggggccttcgggaccatggggcaggggtgcttcctcctcaggcccagctgctcccctggaggacagagggagacagggctgctccccaacacctgcctctgaccccagcatttccagagcagagcctacagaagggcagtgactcgacaaaggccacaggcagtccaggcctctctctgctccatccccctgcctcccattctgcaccacacctggcatggtgcagggagacatctgcacccctgagttgggcagccaggagtgcccccgggaatggataataaagatactagagaactg

SEQ ID NO: 287907 - DNA, 1000 bp, Homo Sapiens; identical to SEQ ID NO: 222099

SEQ ID NO: 287908 - DNA, 644 bp, Homo Sapiens
gctccctggggaacccagcaggcggcgaagatggcggagaacagcggtcgcgccggcaagagcagcgggagcggcgcggggaagggggcggtgtccgcagagcaggtgattgctggcttcaaccgccttcggcaggaacagcgaggcctggcatccaaagcagctgagttggagatggagttgaatgagcacagcctagtgatcgatacactgaaggaggtagatgaaactcgtaagtgctaccgcatggttggaggagtgctggtggagcgaactgtcaaagaggtgctgcccgctttggagaacaacaaggagcagatacagaagatcattgagacactgacacagcagcttcaggcaaagggaaaagaactaaatgaattccgggaaaagcacaacattcgtctcatgggagaagatgagaagccagcagccaaggaaaactcagaaggggctggggctaaggccagctcagctggagtgttggtctcctagggaccaaggcctttgcatttttttctaccctgactcccacttctaatttctctttattgttattattattattttctctgctattgtaatatttttttgttaattaaatgttttggtcagaatcttaaaaaaaaaaaaaaaaaaaaaaa

SEQ ID NO: 287909 - DNA, 1000 bp, Homo Sapiens; identical to SEQ ID NO: 222100

SEQ ID NO: 287910 - DNA, 1000 bp, Homo Sapiens
catttttttcctccagtttttaacaagatcacataactggcttatttttaacagctttgtcaaactacaatttacatgccgtaaaatgtacacactgtaattttataattcattgacttttagtaaattttctagcgttatgcatcgccacaatccagttttagaatatttccatgaccctaagaagtttcctcatgtctattaatattcccaatcctaggcaccactgagttgttttctgtctttataagtttttctttctacatcttatataaatggaatcataatacatgtagtattttgtgtctggcgtcttgcacttagcatggtgttcttgaggttcatctgttgtagtatgtattgatacttaggatttttttattgccgaatactattccattgcatggaaaagacctattttatttctaggttcaccagttgagggacatttggattgttcccacttcttgggctgttaggaataatgttgctctgaacatgtaaataaagatctttgtgttcacatatgtttttcattttctgttggggagattccctaggctagaaattgctgggccatatgaaaaatcaatagttagctttgtaagaaacagtcaaactgttttcccaacgtgacattttatattcccaccaggaatgtttaaaactagtgtcttcaaatcctcaccaacatccaggattgtgtctttatgattatagccatttttgtaggtacaaagtggcatctcatggtggttttaatttgcatttccataatatctaattaggttgagctttttttatgtgcttattggccatttgtttgactttgtttggtgaaatgtatacaaatcatttgctcatttttaatttgggttgtctgtcttgtcttctcattttattgagttaaatgagttcttaataatctctggcttacaagtccttaatttatcaaatatatgatacgtggacatttcctcataaaaaaaaaaaaaaaaaa

SEQ ID NO: 287911 - DNA, 1000 bp, Homo Sapiens; identical to SEQ ID NO: 116865

SEQ ID NO: 287912 - DNA, 1000 bp, Homo Sapiens
cattttgctcttcttgtgggaacacacacttcaaggaggagatagtgactttgagataggaacagtttaagatgcagtgtgagtctggcctgcgtgcggtgaggaggccccgccaagagactggtggacatctgactgtgggatgtgctctcaagtaggacgtcatcaggacagattctgaataggcatcatgagagtgctggtcagaaacggctgccactttttttaatttaattttattttttatttaaaggaaggaacaatagctaggtaagatttttatcagctttctctgtctgaatccagtttttcctctgtcagtcctggaagcttgaatagaattatattgttgaagccttcaggtcacaaactgtcttttgtaacctcctgtccctcctaaaacacgccaacccctgcagtcaaatcacattagtaatctgatttgctgacagtcctgccctgcctgctcctcgttttcccacatgtcctgcatccctcccccactggagtgatttcagtgaatcagacaaggaaggatgtgtaggatcactactgcattgcaataccctgttatcctcagcaacaaaacccacatttcatacatcctttgtgtactcaggataaagactgatgtttactctctgggcactgttgtaagataggttttgtcagagcataatcattgtctgcaaagtgtttggtgcgaggaagattattgctaattttgtgaaataaagagtctagccctctccttttaatgaacttaactctcgctggcatctgtagtatcattgggagcttaggcgcacatggaaatgagagcccggcgcatggattttaatgtttttctaacaactgtggagatttgagggaatgtgtggtgaatgtaaaatacctagtttacttgccagtctcttgtgtaaattacagtaaaacaaagtaaatgaaatttaaacaaaaaataaatttgatcacaaaatgccaaaaaaaaaaaaaaaaa

SEQ ID NO: 287913 - DNA, 1000 bp, Homo Sapiens
cagagaaggggactgggaccaaaggggtggggataatggggagccccattgctggccttgcatctgaataggcctaccctcacccacccacccagtttaattgtgcttagagcccaagaagattgggatctagcactaggaataaacctttcataaaagcaggcccagcgaggtcaatttgtcggggactctaggagggtggcctgggtggagacaagctcagtctaatcaaacaccagaaccctatcaagtcaaaagagctggggccaggcagctgaagtcacaggtttcagagatggtttgaaggcccagtcttctctcccagcctcagttggagccaaagctttgtcctttagccagcaccaagatagctatggatcttaagagcaccagatccagagggggttgggtttgctgaccttcatcatgcattcattcatacagcaaatatttactgagtgctttcatttgccagggactgcgttaggccctggggaaacatcagtgaataaaacacggtccctgcccacagtgcttagggcctactgagggaaagaagtaaccaggcaactacaaaacagtgataagtattaggatacagaagtacagagggcgctgtgggagcacaaaggaggggcatctggcatggactggggtggaaatggggatgtcagtttgaaagctgagacctggccaggtgcggtggctcactcctgtaatcccagcactttgggaggccgaggcgggcggatcaccaggtcaggagatcaagaccatcctggctaacacggtgaaaacccatctctactaaaaatgcaagaaaattagcccggcacggtggctggcgcctgtagtcctgtagtcccagctactcgggaggctgaggcaggagaatggtgtgaacccgggaggcggagcttgcagtggagccaagattgcgccactgcactccagcctgggcaacagagcgggactccatctcaaaaaaaaaaaaaaaaaa

SEQ ID NO: 287914 - DNA, 1000 bp, Homo Sapiens
tctaaacggtccttgccccatagccatcctgattgctgatagtgttttatgcagactcttgtgacttatactcaccacagaatggattgggacacagcagcataagtgtgctacttggcagctagtaagtttaaagcaggacctgccttaactgctcctggccacttggaagtttagggtagatcttgttttccaaagtttcggcaggtgcctggagggcaaataaaaaagcagcagtcagtcagtagtcagtgatggagagaacaagaggagagatgcctggcctctgcccaagaaattagctttgatggaagcctgagcaagtcacctggttattgtaacgtggagatctttgtaggtttagacatggctccctgtctccagtaaacatccagccattcagacaaagggggcctggagatacagagagcccaaataatgcctgctggattgtctcctgatgagtacatgtggactcacctgaggaagggaaggaagggaataatcttttatgtttcatttaccttatgaaaagtgttaaaacattgccaactcaaaataacattatttaatgcatgtgcaaagttaggtcttcccagttgtctcagtgctgaggaacctcatcagagaagcatggaagatgccaaaggatttttggaaggtaaagaaggctgaatagtgaccacatgggcctgttttcagggtcccagcttagttaagtcacccatgcacctggtcattgtgtctcccatgcacatccagcgtttctcagaagcagacccacccttaagttgacaggattgatggaacatgctctcctgctcaaggcacaacctctgggctggagtagaggactctggtgggaaggttttgctgctaatgtatttatggaatgaatgtatttcattcaaatctgtattcctctaggaaggattaaaattaaacttttttaaaatacaggaaaaaaaaaaaaaaaaaaaaaaaaaaaaaaaaaaaaaaa

SEQ ID NO: 287915 - DNA, 1000 bp, Homo Sapiens; identical to SEQ ID NO: 116867

SEQ ID NO: 287916 - DNA, 1000 bp, Homo Sapiens
accccattgggagaaaaacccagacgccaggaaaagaagaaacaacaaaggcaggagaacagccactttcagacttgaaaatgacaaaaccctcagttgagcctgagcccccggcgcgggggctgctacactacaggacacccagcatcggctttgactgcagactgttcacccacacgagccctgtgcttttggtgtaaataatgtacaatttgtggatgtcattgaatctagaggactttcccctttttatatttgtattaactttaacttattaaaaaaaaaaaaagaaaaagaaaaacgatttaaaaaaaaaaaaaaaagcaaccaaccccaacaacaaaaaagaatgttttggtattggagaagggatggtcagttagcctgtctgtcacacgacggaatggatactgggcccggggaccactttcatactcacgtcctcatccttggatacccaggggagggcgaaccgttttcgctcgtgtgtctgtacgcagcatgttgggatcgggagtttcggcacagactatcccatcaagccgttggctcctttcagctactacgttaccacgttcctaaaacgcaagctctccggaccagacggacacagggagaagctagtttctttcatgtgattgaaatgatgactctactcctaaaagggaaaaaacaatatccttgtttacagaagagaaacaaacaagccccactcagctcagtcacaggagagaacacagaaagtcttaggatcatgaactctgaaaaaaagagaaaccttatctttgctttgtggttcctttaaacacactcacacacacttggtcagagatgctgtgcttcttggaagcaaggactcaaaggcaaggtgcacgcagaggacgtttgagtctgggatgaagcatgtacgtattatttatatgatggaatttcacgtttttatgtaagcatgaaacacaggcagtatgagagaaagcaaggcccgtcatgctgtccgtac

SEQ ID NO: 287917 - DNA, 1000 bp, Homo Sapiens
tgctttcgtagcccctgctaagtgttgactttttaaaatataagtttattgtaaaagtgacatgaaaattacaacagatattccagaccaaaataatacaacaatcccagcatctgattgagtcagtgtttgctgtttcccctgcactttcctagttcttaagcatttgcgtatgtaaacattcatatttgcaataaaaaagtgagcttttatattctaaatttttacttaacttaattcaatgctttctactcatttttctatacttttttttttgaggcagagtctcattctgttgcccaggctggagtgcagtggcgtgatcttggctcactacaacctccaccttccaggcttaagcgattctcatgcctcatcctcccaagtaggtgggattacaggtgcccaccaccaagccctgcaaatttttttgtatttttagtagagacagtgttttgccatgttggccaggctggtctcgaactcctgacatcaggtgatccacctgcctcggcctcccaaagtgctgggattacaggtgtgagccaccacgccctgcctactctttgttttctttcctccccacccattttcccccgtcctgtcccctccttccagcctgagatgtaggctccaccttaactgtgctcagatacacaagtgagggctttttaacttgattatgccttttaaaaatactatgtatgtaaaatatttattcatctgcaatttggcttccctaacttaacattgcatcatgaaactctttggaacaacagctatctagatagctgactcattcttttggattgctacgtaatctcacttaatacagatgtatcatgattgattgaatcattgccttgttgatgggccttcagattatttccagttttttgccactgcaaacaataaacatccttgtacatactaaaaaaaaaaaaaaaaaaaaaaaaaaaaaaaaaaaaaaaaaaaaaaaaaaaaaaaaaaaaaaaaaaaa

SEQ ID NO: 287918 - DNA, 1000 bp, Homo Sapiens
acctgatccggggcacggtgctcacctaccagtgcgagcctggctacgagctgctaggctccgacattctcacttgccagtgggacctgtcttggagcgccgcgccgcccgcctgccaaaagatcatgacttgtgctgaccctggcgagattgccaacgggcaccgcaccgcctcggacgccggcttccccgttggctcccacgtccagtaccgctgcctgccagggtacagcctcgagggggcagccatgctcacctgctacagccgggacacaggcacacccaagtggagcgatagggtccccaaatgcgccttgaagtacgagccgtgcctgaacccgggggttcccgagaatggctaccagacgctgtacaagcaccactaccaggcgggcgagtctctgcgcttcttctgctatgagggctttgagcttatcggcgaggtcaccatcacctgtgtgcccggccacccctcccagtggaccagccagcccccactctgcaaagttgcctatgaggagctcctggacaaccgaaaactggaagtgacccagaccacagatccatcacggcagctggaaggggggaacctggccctggccatcctgctgcctctaggcttggtcattgtcctcggcagtggcgtttacatctactacaccaagcttcagggaaagtcccttttcggcttctcgggctcccactcctacagccccatcaccgtggagtcggacttcagcaacccgctgtatgaagctggggatacgcgggagtatgaagtttccatctgaaccccaagactacagctgcaggacccaggacgcccctcccctcctcattcgggcagagggaaatacgggacccggtctctgcctcctggctgccctcctccctggctgtgtaaatagtctccctatcccacgagggggctttgatggccctggagatcctacagtaaataaaccagcatcctgccgcccaaaaaaaaaaaaaaaaaaaa

SEQ ID NO: 287919 - DNA, 1000 bp, Homo Sapiens
ccaattgcaacaacagctaaactagtaaataaagtaattgagcttttaccagaaaaacatgggcaatatggtctagccttacacctcattgaagctgtggaagccatatctcttccttctttatgacacttacctactggaaatagtctaaaattatgattataacatgaagtagtgcatggttattttacatagtaagacctggaattttatgggaaaagtatgtctttttttttccttttgtaaaataaataaaagtatatacaacttttaaaaagtgcaaccctggctaaattccactcctttggttaatactgaagataaaatataaacaaatgtcaactctgttataattaatacagatgttttactgtttatttctaattcaaacacttaagtagctttattgttaaactttgctatttaaaattggttataatttagattatgttcttataagattctatatttcctatctaaaatgttgttgtaattcaatttaaatgtgttcatgtacagtccccatcagtagcgtatagaacaccccactctcctttagtaaatgttgagaaaatgcctttgttgtcatgctccaaatcccacactgggctgccacctgggagttctggataccgaaaggttcctttcccagaggttctgctgttgccatcagaggaggatgaccgtgcttgaggaggaagaatgggttcaagatcatcatattcatcagaaggggacactaaatagaacccttaacctgttgtacttgccaaaattgagaatcagagatgtgtaaaatgcagcaaattaattataatgtaagttaagatttgctttttgccaagttgcaaagttgtatccacatcaggtcactgtaaaaatgtattatcttgtaaaacttatgtaaaaaaaaaaaaaaaaaaaaggcaaagatactaaaaaaaaaaaaattttagtccgactttatttttcctacaagtgtttaggaaatgcttctggg

SEQ ID NO: 287920 - DNA, 1000 bp, Homo Sapiens
atccacgaacttcgacctactgaaaaggtggtgttggtatccaactatacacaaaccttgaacattttacaagaagtatgtaagcgtcatggatatgcttatacaagacttgatggacaaacaccaatctctcaaaggcagcagattgttgatggctttaacagtcaacactcttctttttttatttttttgttaagttcaaaagctggtggtgtaggacttaacctcattggaggatctcacttaattctctatgacattgattggaatccagccactgacattcaggcaatgtctagagtatggagagatggtcagaaatatcctgtacatatttacagactcctaactacaggtacaatagaagaaaagatctatcaaaggcagatcagtaagcaaggtctttgtggggcagttgtcgacctcaccaagacatctgaacatattcagttttcagtagaagaacttaaaaatttgttcacattacatgaaagttcagattgtgttactcatgatctgcttgactgtgagtgtacaggagaagaagttcatacaggtgattcgttggaaaaattcattgtctctagagattgtcagcttggtccacatcaccagaaatctaactccctgaaacctctttctatgtcccagctgaagcaatggaaacatttttctggagatcatttaaatcttacagatccttttcttgaaagaataacagaaaatgtgtcattcatttttcagaatataaccactcaagctactggcacatagtgaaagattacttctgacattccattgctcttcttttgaaaattagtatggtaattaaatgtactttttgaaaattaatagaattatttaaattacagtatatgttgcaaaatatatcacttttgatacaatagtcaaaattgagtggtttaatgttttgtaaatattaagtgtttaaatgaaaaataaagatgtgcttatatcattgtaaaaaaaaaaaaaaaaa

SEQ ID NO: 287921 - DNA, 1000 bp, Homo Sapiens; identical to SEQ ID NO: 222101

SEQ ID NO: 287922 - DNA, 1000 bp, Homo Sapiens
ttgcatgggttgatgagtggtatgacatgacaatggatgaagtccgagaatttgaacgagccactcaggaagccaccaacaagaaaatcggcattttcccacctgcaatttctatctccagcatccccctgctgccttcttccgtccgcagtgcgccttctagtgctccatccacccctctctccacagacgcacccgaatttctgtccgttcccaaagatcggccccggaaaaagtctgccccagaaactctcacacttccagaccctgagaaaaaagccaccctgaatttacccggcatgcactcttcagataagccatgtcggcccaaatctgagtaactttatataaatatctcatggggttttatattttcatttgttgttgttgtttttttttaagaatcttctgatagagaaaaagactgctttgtcactcaaacatgttccttcgacctttcagtgtgcatgtgactcagtaacttcacatagaatatgattccctaagtatgctacacagcatcatattagatgtaagatgtaagacttgcaaaggacagaaggaatcttctgtaaccacatagctgtatgccagagaggaagccttgttattgggcatttgatgaggtttggcatggacttcaaggataaatgaatgaaaactttgcaccacttttgttacaaggtacggtagaaaatagtgaagtcagtttcctctcatcaaatctaaaattctccaaaatactctcaggcataacatacttagctgttaaattttgaactgctaattactaatacttgaataccaatagttactgagattcctattttgtggttagtctgactcaggatttggagcctaattaactctaaacttttgaaaattttaatcatcaagctatagaggctccaagtgcaattaataataactcatttataccttccacagaatttaataaagattctacttgtttctgtcttttaaaaaaaaaaaaaaaaaa

SEQ ID NO: 287923 - DNA, 1000 bp, Homo Sapiens
acagtgaagagaacctacttttctggcttgcttgtgaagacttaaagaaggagcagaacaaaaaagtaattgaagaaaaggctaggatgatatatgaagattacatttctatactatcaccaaaagaggtcagtcttgattctcgagttagagaggtgatcaatagaaatctgttggatcccaatcctcacatgtatgaagatgcccaacttcagatatatactttaatgcacagagattcttttccaaggtttttgaactctcaaatttataagtcatttgttgaaagtactgctggctcttcttctgaatcttaatgttcatttaaaaacaatcattttggagggctgagatgggaaataaaagtagttaaataacatcagaaactgagttcctggagaactacagtttagcattcctcaggctactgtgaaaacacaaccgttatggtctttgtctccatttttatcaaggttttccatggttaagtttggagaaaataccacacaaaacaatgaattgccaaattgtttgttttattcaagactcattctacttgcaagcaaagtgtatttgtagtcctatgaacagtctcctcgtgtatctccagagactgcatgtgcaaagtaaaatgcttcatttgccacatagttgttgtaatatttaatccagtagcataacttatatctgtatttaaggacttttgtgcaatatggtcttaagaaataattgccaaaaaaatcggccatggtttgcattttttaacataatctaagacagaaaaaaagcaatttttactatgtaacaatggtattcaacattctatatactgtgtttagtacactaattttgaagccaatatttctgtacatgaaaaagagctatttatctctgtttgttggaaaatcctaatggggattcctctggttgttcactgccaaaactgtggcattttcattacaggagagtttactatgctaaaagcaaaaaacaaaaaaaa

SEQ ID NO: 287924 - DNA, 1000 bp, Homo Sapiens; identical to SEQ ID NO: 116869

SEQ ID NO: 287925 - DNA, 1000 bp, Homo Sapiens; identical to SEQ ID NO: 222103

SEQ ID NO: 287926 - DNA, 1000 bp, Homo Sapiens; identical to SEQ ID NO: 116870

SEQ ID NO: 287927 - DNA, 1000 bp, Homo Sapiens
gccagaatgtgtctctgaagaggctcgctcactcattcaacagctcttgcagttcaatcctctggaacgacttggtgctggagttgctggtgttgaagatatcaaatctcatccattttttacccctgtggattgggcagaactgatgagatgaacgtaatgcagggttatcttcacacattctgatcttctctgtgacaggcatctccagcactgaggcacctctgactcacagttacttatggagcaccaaagcatttggataaagaccgttataggaaatgggggggaaatggctaaaagagaacaattcgtttacaattacaagatattagctaattgtgccaggggctgttatatacatatatacacaaccaaggtgtgatctgaatttaatccacatttggtgttgcagatgagttgtaaagccaactgaaagagttccttcaagaagttcctctgataggaagctagaagtgtagaatgaagttttacttgacagaaggacctttacatggcagctaacagtgctttttgctgaccaggattggtttatatgattaaattaatatttgcttaataatacactaaaagtatatgaacaatgtcatcaatgaaacttaaaagcgagaaaaaagaatatacacataatttctgacggaaaacctgtaccctgatgctgtataatgtatgttgaatgtggtcccagattatttctgtaagaagacactccatgttgtcagctttgtactctttgttgatactgcttatttagagaagggttcatataaacactcactctgtgtcttcaacagcatctttctttccccatctttctattttctgcaccctctgcttgttccctcatattctgttcttccgactcctgctaacacacatgcaacaaaaaagggaagggagtgcttatttccctttgtgtaaggactaagaaatcatgatatcaaataaacatggtgaaacattaaaaaaaaaaaaaaaa

SEQ ID NO: 287928 - DNA, 1000 bp, Homo Sapiens; identical to SEQ ID NO: 116871

SEQ ID NO: 287929 - DNA, 1000 bp, Homo Sapiens; identical to SEQ ID NO: 116872

SEQ ID NO: 287930 - DNA, 1000 bp, Homo Sapiens; identical to SEQ ID NO: 116873

SEQ ID NO: 287931 - DNA, 1000 bp, Homo Sapiens
tttaccagtgttatttacttgtctactacaccggctggcggaatgtcaaatcttttttgacttttggcttaatctgtctatgcaacatgtatctctatgaactgcgcaacctctggcagcttttctttcatgtgactgtgggagcatttgttacactacagatctggctaaggcaagcccagggcaaggctcccgattatgatgtctgacaccatccttcagatctattgccttggcttcagggggataaggagggaacatatcataactgcactgtgatgaagaagctgttccccacagaggagaagctctgctttctttctctccaactttccttttttaaaatcagcatgatgtgcctgtgagcatggaagagtcctctcagaagaatgttggccatgagactatcattcagaggaggaggggatttctctcttcaaggccataacagtggaagaacagtcatatgccattggaagtcttggccagcagtcctgaatccttcctgaagagttcagaaaatagatgtggtattgctctgaggaccaggcaggaggaactctacaacctgagtttgcctttgtgaggcattagtatagaccaaataaaaagctgcagaaattggaaagtttatgttttaaataaatgactgtgataaatatcagattatttgcacatttatggtactacgagtttataaagtccaagatggtgtgaaattggttctttttacttttatatttttgcttgaatcttaactctggaaatcacctgatgtagaagaagactgtgatgagctcgtctgtggaacatcacaagtatcgaaaatacagtaatggatgtttcctttctaatccacatttattgtttcttttgaaatcacgtctaaaaaatatgactcagactatagccgttgtttcccaaacttcagtctctttagtactacttgtattattttcttaatatttatcttttaaattttaaagtttttttaaaaaaa

SEQ ID NO: 287932 - DNA, 1000 bp, Homo Sapiens; identical to SEQ ID NO: 222105

SEQ ID NO: 287933 - DNA, 1000 bp, Homo Sapiens; identical to SEQ ID NO: 116874

SEQ ID NO: 287934 - DNA, 1000 bp, Homo Sapiens; identical to SEQ ID NO: 116875

SEQ ID NO: 287935 - DNA, 1000 bp, Homo Sapiens
aatattggctggcatgcaacctgcaaaagaaaaatgcgaagcggccgggcacggtggctcatgcctgtagtcccagcactttggggggctgaggtgggcgaatcatgagatcaggagttcgagaccagcctggccagcatggtgaaaccccatctctactaaaaatacaaaaaattagctgggcgtggtgacgggcgcctgtaatcccagatactcaggaggctgaggtaggagaatcacttgaacctgggagatggaagttgcagtgaaccaagatcacgccactgcactccagcctgggcgatggagcgagactccaactcaaaaaaaaaaaaagaataaagaaagaaaagtgcgatgcccagtcaatcacaaataagatcatcctggtttaaatctactctcacatggatcacagtataaatttctatgtgctgtgttttgttcgtttgtattttgtagagatggggtctcgttttgtcgcccaggctggttttgaactcctggcttcaagcgatcctcctgtctcggcctcacaaagtgttgagactacaggcatgagccactgtgcccagcctgttctatgtttttaagctacacgagaattttttttttaattaattctcactgtttgttcagtctgtcttcatctaagtttgtgttgcagtttaaagttaaagtgacttttaaaggccacatcacctgagactagggtaatcatctttacttctggttcctgaaatcatatttttccagtggaccatcctccagtggctgtggttgttgagcatgctttcagaacacctatgtggcttaaaacttagtttatgttttgtgttcaacactacgtgtaatattttaaaactgtttaatgtgatgtgaatacatttatgtacatttatttttaaatttgtaaatagctttaaattgctatggcaatgtttcttttataaatcatcaaaataaacctttgtgaattgaaaaaaaaaaaaaaaaaaaa

SEQ ID NO: 287936 - DNA, 988 bp, Homo Sapiens
gggcttcaggacaattcgtgatggcgggggctggttccgccgctgtatcgggggcagggaccccggtggcggggcccacaggccgcgaccttttcgccgaagggctgctggagttcctgcgacccgctgtgcagcagctcgactctcacgtacacgccgtcagagagagccaggtagagctccgggaacaaattgacaacctagccacagaactgtgccgcataaatgaggatcagaaggtggccctggatcttgacccctatgttaagaagctacttaatgcccggcgacgcgttgtcttggttaacaacattctacagaatgctcaggaacgactgagacggctaaaccacagtgttgccaaggaaacagcccgcaggagagcaatgctggattcgggaatttacccccctggctccccaggcaaataacagatgagcctatggactcagtagcacaagtactgttccccagctgccttgtttcaacagacatgcaaagatcctaggagacagtccccatagaccttcagacattaaaaagggagccgtacagtttgtttgaagcacttcgtcttacccatttatgtaggggccccaggaaacctacacacagccagaatgaggttcccaaaggacttacattaattatggctcttgcttcctttcacaaatgagctgaggcctctacttttttttttttaagctgcatacttgaggcttaccttcttcaggactagttaaccagaggggcttcctttgtatgttacatgcctggttacatgggcctggacagcatgtcctctacctgtgacttctcattttcctgtttacactggggatttggagggggcaggcaaagtcaaagtgaatgacctctgtccacccacttttttattgcactggcttgaatacagtagcagtgttgatagaatcattttattcaataaatacttaaaatgaaaaaaaaaaaaaaaaaaaaaaaaaaa

SEQ ID NO: 287937 - DNA, 1000 bp, Homo Sapiens
cttctgcagagggtggacagctatcaaccacttaataactgagcaaagttatattgtgatactcaaattcacagcagagtagttttgagtaacagtaattaaatccttctaaatatttgaactaagtatattctagatttatttaatgggaaatacctttagataatattttctaaatttatgtaatactttaaacattcgtagcttgaatatgtgaggaactattcatggtcattcgcatgcataggatttgttctacaggtagattttaaaaacacgttaaagggccttaaggcattttgttattctgttaaaaaccacacacactcgtacatgcagacacctccaatgagatatagttaagagatggcattcaaaaaccctaaattattctagccaatttgtcataggcataggcaaggaaagctggccttgctaactatatagtagtatacacaagagaaatctttgaaggaggaaactgatgacagatatacagggcacttgaaggagactctgatgctagttatataagtgcattaacttaagacacggactctgtgggtaacctgttaggttttactaagaatttaggaaaaatttactcctctttatcacaagttttccaaacctccttccccaccctatctaaagtgttccttacctttcatgggcccagcgagggtagaattcagaatagagagttatactcctgcatacatgctctccctctcattgaaaggtttcttagtctagctctgctcatgaatgaacaaagaagcaggcatgtaaaatggatccttgtcctaacgtcactttcccaagtttcaaaagtcacattttcaggtatttaaggaatagtttgaagctaataccatcaggctcagagtttacatgcatttttacttaggaagtggtaaacgggtgaaagagggtttcaataaaattttaaataaaaacagcaaaaaaaaaaaaaaaaaaaaaaaaaaaaaaaaaaaaa

SEQ ID NO: 287938 - DNA, 1000 bp, Homo Sapiens; identical to SEQ ID NO: 116876

SEQ ID NO: 287939 - DNA, 1000 bp, Homo Sapiens; identical to SEQ ID NO: 222107

SEQ ID NO: 287940 - DNA, 1000 bp, Homo Sapiens
atccctggggcccagtcaccacctactgccactccctcagccctgtggagaacacagcagagaccagccctcaggtcctccccagctccaagaggaggcgcgttgaagggcctgccaagcctaacagagaggacgtctcctcgtcccaggaagaaagtctgcagctgaacagcatcccgcccacgcccaccctcacctccacagctgtgaagagcaggcagcccctgtgggggttgaaagagatggaggaagaagatggctcagagttggattttgcccagggtcagcccgtcgcaggcaccgagaggtcaaggttcttgggtccacaatatttccagactccacacaacccttcaggtcctggcctgggcaaccagctgatgcgactcagccttatggaagaggacgaggaagaagagttagaaatccaggatgagtcaaatgaagaacggcaggatacagacatgcaagcaagtagctactcttccaccagtgagcgcgggctggacctcttagattctacagagctggatattgaggatttctgacaggactctgggcccctccccagctccactccctacctcaagaatgtgaccatttggaaaaggcaaagagaaaaggagcaaaatgaagcattcccccaggcttcagccctgggctctgaggggaaagagttgggcattgtttttctaacctaacctttccctctggggtagagaagccgagagaccctgtcctccctaatgcactgtggcccagtccccttgcctttttcctgttctgtttggagtggagaagggcagcacctctgtgtttaatggaaatagcccatagtctcctggatttttggaacatctttctcagcctattttgtgtcctaatgattcgctcaataaacatgtttgaatccacacgttaaaaaaaaaaaaaaaaaaaaaaaaaaaaaaaaaaaaaaaaaaaaaaaaaaaaaaaaaaaaaaaaaaaaaaaaaaaaaaaa

SEQ ID NO: 287941 - DNA, 1000 bp, Homo Sapiens
ctgatttatttttctatgccaggcagtagagtctctctgcctctgaggagcaggctacccgcatcccactcagcccctccctacccctcaagatttgatgaaaattccaaccatgaggatgggtgcatcggggaagggtgagaaggagagcctgcctgctcagggatccaggctcgtagagtcactccctgcccgtctcccagagatgcttcaccagcacctgcctctgagacctcgctctctgttccagcaaccctggttggggggtcagacttgatacactttcaggttgggagtggacccaccccagggcctgctgaggacagagcagccaggccgtcctggctcactttgcagttggcactgggttggggaggaagagagctgatgagtgtggcttccctgagctggggtttccctgcttgtccagttgtgagctgtcctcggtgttaccgaggctgtgcctagagagtggagatttttgatgaaaggtgtgctcgctctctgcgttctatcttctctctcctccttgttcctgcaaaccacaagataaaggtagtggtgtgtctcgaccccatcagcctctcacccactcccagacacacacaagtcctcaaaagtttcagctccgtgtgtgagatgtgcaggttttttctagggggtagggggagactaaaatcgaatataacttaaaatgaaagtatactttttataatttttctttttaaaacttggtgaaattatttcagatacatattttagtgtcaaggcagattagttatttagccaccaaaaaaaagtattgtgtacaatttggggcctcaaatttgactctgcctcaaaaaaaagaaatatatcctatgcagagttacagtcacaaagttgtgtattttatgttacaataaagccttcctctgaagggaaaaaaaaaaaaaaaaaaaaaaaaaaaaaaaaaaaaaaaaaaaaaaaaaaaaaaaaaaaaaaaaaaaaaaaaaaaaaa

SEQ ID NO: 287942 - DNA, 1000 bp, Homo Sapiens; identical to SEQ ID NO: 116877

SEQ ID NO: 287943 - DNA, 1000 bp, Homo Sapiens
agaaaggctaccgtactgatgccacagtctctgtcttccttggcttcctcctcttcctcattccagcgaagaagccctgctttgggaaaaagaatgatggagagaaccaggagcactcactggggaccgagcccatcatcacgtggaaggacttccagaagaccatgccctgggagattgtcattctggttgggggaggctatgctctggcttctggtagcaagagctctggcctctctacatggattgggaaccagatgttgtccctgagcagcctcccaccgtgggctgtcaccctgctggcatgcatcctcgtgtccattgtcactgagtttgtgagcaacccagcaaccatcaccatcttcctgcccatcctgtgcagcctgtctgaaacgctgcacattaaccccctctacaccctgatcccagtcaccatgtgcatctcctttgcagtgatgctgcctgtgggcaatccccctaatgccatcgtcttcagctatgggcactgccagatcaaagatatggtgaaagctggcctgggagtcaacgttattggactggtgatagtaatggtggccatcaacacctggggagttagcctcttccacctggacacttacccagcatgggcgagggtcagcaacatcactgatcaagcctaacgccaagtgtacaaactggcccaaccacaggagctgccagtatccagcagtatctggaccacaggcaaagaaaaccactaggaccaccaggagcacacaaccccagacccacgccggagggcatccctccaccagaagattccgccacctcaagtgaactgcaggaatcctccaacaaccacaaacacatgcttcgctgttagtgtcttcttcctgccctcagcaccacagctcaagaaaacctaaagtttcaatacaagccataggctcacagaaaaagaaaaagaaaataaaaattaaattaaaaaaaaagaagacaaagaaaaaaaaaaaaaaaa

SEQ ID NO: 287944 - DNA, 1000 bp, Homo Sapiens; identical to SEQ ID NO: 222108

SEQ ID NO: 287945 - DNA, 1000 bp, Homo Sapiens
ggccacctgaagcgggcctccaacgagagcacccgccagaggctgcagcagcagctgacccaggcccaagagaccctgaagagcctgggtgccctgaagaagtgactctgggagggcccggcgcagaggattgaggaggagggatctggcctcctcatggcgctgctgccatctttcctcccaggtggaagcctttcagaaggagtctcctggttttcttactggtggccctgcttcttcccattgaaactactcttgtctacttaggtctctctcttcttgctggctgtgactcctccctgactagtggccaaggtgcttttcttcctcccaggcccagtgggtggaatctgtccccacctggcactgaggagaatggtagagaggagaggagagagagagagaatgtgatttttggccttgtggcagcacatcctcacacccaaagaagtttgtaaatgttccagaacaacctagagaacacctgagtactaagcagcagttttgcaaggatgggagactgggatagcttcccatcacagaactgtgttccatcaaaaagacactaagggatttccttctgggcctcagttctatttgtaagatggagaataatcctctctgtgaactccttgcaaagatgatatgaggctaagagaatatcaagtccccaggtctggaagaaaagtagaaaagagtagtactattgtccaatgtcatgaaagtggtaaaagtgggaaccagtgtgctttgaaaccaaattagaaacacattccttgggaaggcaaagttttctgggacttgatcatacattttatatggttgggacttctctcttcgggagatgatatcttgtttaaggagacctcttttcagttcatcaagttcatcagatatttgagtgcccactctgtgcccaaataaatatgagctggggattaaaaaaaaaaaaaaaaaaaaaaaaaaaaaaaaaaaaaaaaaaaaaaaaaaaaaaaaaaaa

SEQ ID NO: 287946 - DNA, 1000 bp, Homo Sapiens; identical to SEQ ID NO: 116878

SEQ ID NO: 287947 - DNA, 658 bp, Homo Sapiens
ggagcctcacgrgagcgkggtaacgttatagtatttgtcagaagttggggtctccgtgggcattgtgatccgtcccaggcagtggattaggaggccagaaggagatcccttccacggtgctaggctgagatggatcctctcagggcccaacagctggctgcggagctggaggtggagatgatggccgatatgtacaacagaatgaccagtgcctgccaccggaagtgtgtgcctcctcactacaaggaagcagagctctccaagggcgagtctgtgtgcctggaccgatgtgtctctaagtacctggacatccatgagcggatgggcaaaaagttgacagagttgtctatgcaggatgaagagctgatgaagagggtgcagcagagctctgggcctgcatgaggtccctgtcagtatacaccctggggtgtaccccaccccttcccactttaataaacgtgctccctgttgggtgtcatctgtgaagactgccaggcctaggctctctgtagagagtcttcaagatcccggagtggtagcgctgtctcctggtgaaggagtatttgtcacactggaatgtgactgtgtgtgtatgtatgtgtatatatatatatatatatatatataaacaagtttgttgacacctacaaaaaaaaaa

SEQ ID NO: 287948 - DNA, 423 bp, Homo Sapiens
ctgaggcgaacaatggcggagctgggcgaagccgatgaagcggagttgcagcgcctggtggccgccgagcagcagaaggcgcagtttactgcacaggtgcatcacttcatggagttatgttgggataaatgtgtggagaagccagggaatcgcctagactctcgcactgaaaattgtctctccagctgtgtagaccgcttcattgacaccactcttgccatcaccagtcggtttgcccagattgtacagaaaggagggcagtaggccatcccccaggagaatgacagaagcaaaggacttgttactaagcagatttaagggtcagtgggggaaggctatcaacccattgtcagatcagcatcaggctgttatcaagtctgttggtgctaaaaagtaaaagatgaaatgttcaaaaaaaaaaaa

SEQ ID NO: 287949 - DNA, 1000 bp, Homo Sapiens
gggacgtgggattagatttcctcgcgttataacgaatcggcgtctaagggtttaagtgtcacttgacattactgctcccacgtgttctttcccatctggcggccgcggctcctgtccagaccctgaccctccctcccaaggctcaaccgtcccccaacaaccgccagccttgtactgatgtcggctgcgagagcctgtgcttaagtaagaatcaggccttattggagacattcaagcaaaggttggacaactacttttccagaacagaaaggaaactcatgcatcagaaaaggtgactaataaaggtaccagaagaatatggctgcacaaataccagaatctgatcagataaaacagtttaaggaatttctggggacctacaataaacttacagagacctgctttttggactgtgttaaagacttcacaacaagagaagtaaaacctgaagagaccacctgttcagaacattgcttacagaaatatttaaaaatgacacaaagaatatccatgagatttcaggaatatcatattcagcagaatgaagccctggcagccaaagcaggactccttggccaaccacgatagagaagtcctgatggatgaacttttgatgaaagattgccaacagctgctttattggaaatgaggactcatctgatagaatcccctgaaagcagtagccaccatgttcaaccatctgtcatgactgtttggcaaatggaaaccgctggagaaacaaaattgctatttaccaggaataatcacaatagaaggtcttattgttcagtgaaataataagatgcaacatttgttgaggccttatgattcagcagcttggtcacttgattagaaaaataaaccattgtttcttcaattgtgactgttaattttaaagcaacttatgtgttcgatcatgtatgagatagaaaaatttttattactcaaagtaaaataaatggaaatatcaaaaaaaaaaaaaaaaaaaaaaaaaaaaaaa

SEQ ID NO: 287950 - DNA, 1000 bp, Homo Sapiens
ccataaggagcgccccacagtcatgctgtttccctttaggaatctcggctcaccaacccaggtcatatctaatcctgagagcaaggaagaacatgcgatatacacagcagacctagccatgggcacaagagcaccctccaatgggaagtataagggtccataccagaccctggggggaagggctctgaaggagaacccagttgacttgcctgccacagagcaaaaggagtgagtggaacagagttgcttcttaataggagcacattctttgcctgccttcccttcatcctatcctctttgcttgctctcacctcaggaattgcttggattgatacatggaccccctgagactatcattattacctcctagggccaggaagccaggtaggtagtctgagtcaggattggatcaacagcctcctctcttggggactctcaagagcctgtgttcatctagaagtagtagtttgattctggtttccctcatacagtgtgtcctccgtctctgtgcagctccgtcattaccataggggacttggttttagactctgatgaggaagaaaatggccagggggaaggaaaggtgagtgggaaggagcagaaagctgggaaaggggatgggtagaacaagactgagaaatccacatgcttcagaattcagagggttcagggaatggtttcggatagtaggctctccctgctcccttctatacaggaatctctggaaaactatcagaagacaaagtttgacaccttgatacccactttttgtgaatacctacccccttctggccacggtgccatacctgtttcttcctgtgactgtagaaacagttctagacctttgtgatagaactaaaatgctctctgtactctagtctcctgcctcctcagttctgcaagtagtttagtaggaatgaagtggaagtccaggcttggattgcctaactacactgctaaaaatatttgtaatccttaataattaaactttggatttgtt

SEQ ID NO: 287951 - DNA, 1000 bp, Homo Sapiens; identical to SEQ ID NO: 116880

SEQ ID NO: 287952 - DNA, 1000 bp, Homo Sapiens
agccttttagtagagctgatttattccagtaacttcttccatattttctcactaatctcccgttagccaaaatatgccagaaatgggaaagagaggagaaaaagtcattaacattaacacctatactgttctatactactcctacccgtgtgctaggaatgtgcactagctctttttaaattccatgctacactttgaggactgtcatcatgttctcgttttgtagttcagaaagtgaggctcaaagaatttatgtaaccttcccagagtcacagtgtaaagttagatgttgaaacccagtttatcttatacaaatgagcctctgcttgttctacaaaggtagtagaatcaatctcgacctatataaatagtagattttttatggtgaaactttcccacataaagtaaattttaggggtgaattagagtaaaacttacaggataagcattttgctctttttaagaacagcatgaaatttagaataccaatgatagctatctttaagaatcagaattagtactagaaatttaaaaaaccctatagtttggagttagtatgagccttttgtgaaaataaatatattaaattattttgcctgatgtggtaggggaaatgtattgctctatattaagaaatattctggatattctgattgacatcttattaggccatagtgagctatgctctgcacaactgagaaattaggtatttagaaggcatatagagatgttgtcataactaggtcttcaacgtgaaaattaatttttattgtatcatgtcaagtatcagtttaccacatattatttttatattaattcaacatttgccttaagtgtgttgttaaatgaaagtacagacagcttcattgttgtattgttaataattgttacttactgctccaggcattttattaaattaattttttaaattattttccaccctacatcagtatattggttgtgctttatatttgccaaagtcctaactgactatacatag

SEQ ID NO: 287953 - DNA, 1000 bp, Homo Sapiens
gcatccccagaagcaaacagcagaggtagaagatatcactgcagcctgctttgtgctttaattgggtaccaagctttggggatgacagtgagttgcaagaatagttttagttcagagaattgtcttaggacaacaggctaatgaaggatttggggtctgggtttttagcctggctccgttctggtgtaacccggtctagcaaaagctaagcctggattgcagggcaggaaaaaatctggaattaactttagccagtggaatttcttcaaacagagaaagagaggctgttcattgatccactattccctctattttcctctaaggtaaatatttagaggtatttacctgtaaggtgaagtttcctttttatttctactttacaatttctctctaaagcaagcttgtccaacccttggcccaggacggctttgaatatggcccgacacaaattcgtaaactttttaaaaaacattgtaagattctttctgtgatttttttttttctcgtcagctatcgttagtgtattttatgtgtggcccaagataattcttcttccaatgtggcccagggaagccaaaagatgggacacccctgctgtaaagtttcatatcactcatgaattgctcagctgatttaaataatttgtaaaatcctgctaactagcaaattcacattgagattttctattgattgggtccctttgatagctttcagattggtattgttagcgttccatttgtgaacaaatgttcccttggctttagcagatgtttttaaagtttcttttgtagaccgaacttctgaagagtaataccaaatgcctaaaattttatttttaaaaaggaaaattgtttaaagtattatatgtaaacatatgggtattttttattttgtgtaattttacatttcatgaaatgatgtcagtttcaaagagaaagtggagaggacctaacatatgtctctacctagaacggatggtttcattaaagaatgtggattt

SEQ ID NO: 287954 - DNA, 1000 bp, Homo Sapiens; identical to SEQ ID NO: 222112

SEQ ID NO: 287955 - DNA, 1000 bp, Homo Sapiens
ccgtgtgtgctaagatcgtgcagctcctggggcagaatgaggtggactatcgccagaagcaggtggtcatcctgagccaggatagcttctaccgtgtccttacctcggagcagaaggccaaagccctgaagggccagttcaactttgaccacccggatgcctttgacaatgaactcattctcaaaacactcaaagaaatcactgaagggaaaacagtccagatccccgtgtatgactttgtctcccattcccggaaggaggagacagttactgtctatcccgcagacgtggtgctctttgaagggatcctggccttctactcccaggaggtacgagacctgttccagatgaagctttttgtggatacagatgcggacacccggctctcacgcagagtattaagggacatcagcgagagaggcagggatcttgagcagattttatctcagtacattacgttcgtcaagcctgcctttgaggaattctgcttgccaacaaagaagtatgctgatgtgatcatccctagaggtgcagataatctggtggccatcaacctcatcgtgcagcacatccaggacatcctgaatggagggccctccaaacggcagaccaatggctgtctcaacggctacaccccttcacgcaagaggcaggcatcggagtccagcagcaggccgcattgacccgtctccatcggaccccagcccctatctccaagagacagaggaggggtcaggaggcactgctcatctgtacatactgtttcctatgacattactgtatttaagaaaacaccatggagatgaaatgcctttgattttttttttctttttgtactttggaacgacaaaatgaaacagaacttgaccctgagcttaaataacaaaactgtgccaactactactggtgatgcctaattatgaatccaacgtgtaaccagttataaatacatatatatataaaaaaaaaaaaaaaaaaaaaaaaaaaaaaaaaaaaaaaa

SEQ ID NO: 287956 - DNA, 1000 bp, Homo Sapiens
gaggtggccgggacctcagcctccagtcccgcaggctccagggagagtggagccgacagcgacgggcagcccgggcccggcgaggcagaccactgccgccgcatactggtgcgagatgccaaagggacaattcgggaaattgtcctgcctaagggcctggacctggaccggcccaagcggacacgtacatccttcactgccgagcagctgtaccgcctggagatggagttccagcgctgccagtatgtggtgggccgcgagcgcactgagctggcccgccagctgaacctctccgagacccaggtgaaggtctggttccagaaccgccgcaccaagcagaagaaagaccagagcagagacctggagaagcgggcgtcctcctcagcctccgaggcctttgccacctccaacattctgcggctgctggagcagggccggctgctctctgtgcccagggcccctagcctcctggcgctgacccctagcctgccaggcctacctgccagccacaggggcacctccttaggtgaccccaggaactcctccccacgcctcaacccgctgtcctcggcctcagcgtcccccccactgccgccccctctgccagctgtctgcttttcctcggccccgctcctggatctgcctgccggctacgaactgggttcctcggccttcgagccatacagctggctagaacggaaagtgggcagcgccagcagctgcaagaaagctaacacttaagactcccaccctgtgacactgagtcccgagcacagcaccttcccagtctcctgtgccccaagcggacagcactgagcaggccccggagaggaggggctgcagccacacactcttccccacctgccccccagctcagagactcgtgaccaaatggccttggtcccgcagcttgtgtgcgtgagtgcagtgtgagtgtgtgtgtctctcactgaaataaaaggaaaacaatgacaagaagggaaaaaaaaaaaaaaaaaaa

SEQ ID NO: 287957 - DNA, 1000 bp, Homo Sapiens; identical to SEQ ID NO: 116885

SEQ ID NO: 287958 - DNA, 1000 bp, Homo Sapiens
ttaagtgaagcctaccagaagaactagtagaagaagctttgccgcttttgtgcctctcacaggcgcctaaagtcattgccatgggaggaagacgatttggggggggagggggggggcagggtaggtggggctttccctaatttatcttcatgtccagtgagcagtgttgcgtttttccttgtagcatttggaaatgatttactggaattacaaaacctatttttcctttaaatttcagctttggctctggctgctttttagaataatgcaagataaaaatcacacctgagggctgaaaacggagagggaatgggagacttgatatttaagcagcttgaatggtttttcttttctttatttttaaagaaatgcacttgcctatgatactgtctctccagtgaaatgattactcctccattactctattgatacaatattgtgcatgctagtgttgtatttctatacagtagcttgaaattgattaacttatactgtaggtgttatgtattcctatgacaaaaaaaattaagtcttcaaattttttaaaggttttttttttttaatttaatttttccttttgggggtaaagtttgctctaccaaatagtgattgtaacaaattgatctgttttggatgttgctatagtgacatgcagttatatattttgtttttaaaagggggggagcaaaagaaacaccagtgttagcttaatcttaatgtctggtgtttgtcatggtgaaattataactattacagtgttggagaacaacaaatatgttctctgaatgagcctttgtgctttttgtcatgttatgcagtgaactatttttaaggtctaatcagtgattatttttccagctccgtgtttctctaaggaattatttcacacacggaccatctttagcagtttcctcagtgatggaatatcatgaatgtgagtcattatgtagctgtcgtacattgagcaaataaacttacagatctgaaaaaaaaaaaaaaa

SEQ ID NO: 287959 - DNA, 1000 bp, Homo Sapiens; identical to SEQ ID NO: 116886

SEQ ID NO: 287960 - DNA, 1000 bp, Homo Sapiens; identical to SEQ ID NO: 222114

SEQ ID NO: 287961 - DNA, 1000 bp, Homo Sapiens
tattattttttagacagtctcactttgtcgcccaggccggagtgcagtggtgcgatctcagatcagtgtaccatttgcctcccgggctcaagcgattctcctgcctcagcctcccaagtagctgggattacaggcacctgccaccatgcccggctaatttttgtaattttagtagagacagggtttcaccatgttgcccaggctggtttcgaactcctgacctcaggtgatccacccgcctcggcctcccaaagtgctgggattacaggcttgagcccccgcgcccagccatcaaaatgctttttatttctgcatatgttgaatactttttacaatttaaaaaaatgatctgttttgaaggcaaaattgcaaatcttgaaattaagaaggcaaaaatgtaaaggagtcaaaactataaatcaagtatttgggaagtgaagactggaagctaatttgcattaaattcacaaacttttatactctttctgtatatacattttttttctttaaaaaacaactatggatcagaatagccacatttagaacactttttgttatcagtcaatatttttagatagttagaacctggtcctaagcctaaaagtgggcttgattctgcagtaaatcttttacaactgcctcgacacacataaacctttttaaaaatagacactccccgaagtcttttgttcgcatggtcacacactgatgcttagatgttccagtaatctaatatggccacagtagtcttgatgaccaaagtcctttttttccatctttagaaaactacatgggaacaaacagatcgaacagttttgaagctactgtgtgtgtgaatgaacactcttgctttattccagaatgctgtacatctattttggattgtatattgtgtttgtgtatttacgctttgattcatagtaacttcttatggaattgatttgcattgaacacaaactgtaaataaaaagaaatggctgaaagagcaaaaaaaaaaaaa

SEQ ID NO: 287962 - DNA, 1000 bp, Homo Sapiens; identical to SEQ ID NO: 222115

SEQ ID NO: 287963 - DNA, 1000 bp, Homo Sapiens; identical to SEQ ID NO: 116887

SEQ ID NO: 287964 - DNA, 1000 bp, Homo Sapiens
taatatacttataaaattaagatttattagccaaacttgaattctagttttaaaactgactgtgaattttatttttcatatatttatgcattacacaccttagctataagaaaaaaagggttttgattatatgcttcttgcagttaatctcgttatttaaacaaaaagttttgggtctgtctttggagtatttgtaacttctaaattttgaaatgactgaattaggaatttggatgcttattcttttagtctgtttgcctaaaaaccaatttacaatctgactgtctcttgggagagggaggtgccttgcaaactttcacattaagaatgtgcctgaggctgctttactctggaatagtctcagatctaaaatttcctctatataaggtggcatatgttaagttttgcttcattggaccgtttagaatgctatgtaaaatgttgccattctgttagattgctaactatatacccatctctgatttggctctccttaagtgataggatttgttattctaaaggtgataaacttgaaaatatcagaatctgagttttacttgaaattttgcagaatacccaggtggagtgaaaattggaagggttttgtgcaatgactaaaaggtaaaacgctgttaaggttcaagaatcaatactttcaacccaagtagccccctgcttgactgtatattatggaactagtaaaccttaggattttgaaaattggagtctaatctttcaaggaggtgggctcccaggatggtaccattgctctttcctagctaaccctagatatggcagctctttaatgtacttcaaaaagcaaatatatattactaaggaaaaaaagttatttataattgccttgtcataattgttaaggtgttctagagccatttgcatacaatttaatgtaatttcattccattctattgtttacacaacgattactcgaagatgactgcaaaggtaaaaggaaaataaaagtgtattgcacaatgag

SEQ ID NO: 287965 - DNA, 1000 bp, Homo Sapiens; identical to SEQ ID NO: 222116

SEQ ID NO: 287966 - DNA, 1000 bp, Homo Sapiens
cctgaccagaaactgctgtcccggcgactcctgaccaagaccaacaggatgccacgctgggccgagcgactatttcctgccaatgttgctcactcggtgtacgtcctggaggactctattgtggacccacagaatcagaccatgactaccttcacctggaacatcaaccacgcccggctgatggtggtggaggaacgatgtgtttactgtgtgaactctgacaacagtggctggactgaaatccgccgggaagcctgggtctcctctagcttatttggtgtctccagagctgtccaggaatttggtcttgcccggttcaaaagcaacgtgaccaagactatgaagggttttgaatatatcttggctaagctgcaaggcgaggccccttccaaaacacttgttgagacagccaaggaagccaaggagaaggcaaaggagacggcactggcagctacagagaaggccaaggacctcgccagcaaggcggccaccaagaagcagcagcagcagcaacagtttgtgtagccagtctaccaccaccacagcaccccagacagctaggcttagcccctctgccctcccttcattgtactttatcattaaaaatcaacttccagccctgtctgctgtctacgtggtgggttgtggggatgcagtttggcatctgcagtacaccaagcacatgattcatgtctgagccaggtctgcttattctcccattgggcagctgaggaccgaggcacagaggtgcggtgacttgcccggggctccaggtagcctgcaggttaactggcggtaagtgctagactgtaagcccgacaagggcagggcttttggttttgttctctgatgtgtctcagtatctagcacataatagacactcaataaatacttgttgaattcaaaaaaaaaaaaaaaaaaaaaaaaaaaaaaaaaaaaaaaaaaaaaaaaaaaaaaaaaaaaaaaaaaaaaaaaaaaaaaaaaaaaaaaaaaaaaaaaa

SEQ ID NO: 287967 - DNA, 1000 bp, Homo Sapiens; identical to SEQ ID NO: 116888

SEQ ID NO: 287968 - DNA, 924 bp, Homo Sapiens
acgcgcatggaacgcagcgaaggactatggcaggggagaacttcgctacgccgttccacgggcacgtgggccgcggcgccttcagcgacgtgtacgagcccgcggaggacacgtttctgcttttggacgcgctcgaggcagcggctgccgaactggcaggagtggaaatatgcctggaagtagggtcagggtctggtgtagtatctgcattcctagcctctatgataggccctcaggctttgtacatgtgcactgatatcaaccctgaggcagcagcttgtaccctagagacagcacgctgtaacaaagttcacattcaaccagttattacagatttggtcaaaggcttgctaccaagattgaccgaaaaagttgatcttctggtgtttaatcccccctatgtagtgactccacctcaagaggtaggaagtcacggaatagaggcagcttgggctggtggcagaaatggtcgggaagtcatggacaggttttttcccctggttccagatctcctttcaccaagaggattattctatttagttaccattaaagaaaacaacccagaagaaattttgaaaataatgaagacaaaaggtctgcaaggaaccactgcactttccagacaagcaggccaagaaactctttcagtcctcaagttcaccaagtcttagcatacagtgtgtgcccagaactactggaaactgaatgcatttagcatattttgaaactgaagtcattcattaggtaacaaggaattttatcagaaatttgtcattaaaaaaaggtagaaaggtggaacattccctttcagtcaggcctatagaattatttgcacaagtacaagtaaatatgtgtattatatttatagtttgcattttaaatataaaaattatgtatgaaataaaaaaaaaaaaaaaaaaaaaa

SEQ ID NO: 287969 - DNA, 1000 bp, Homo Sapiens
gagctggccccagccctgcgtgcccgcctcacccacttcctggaccagtgtgcccgccgtgttgccatgctaaggatagtgcaccgccgtgtctgcaataggttccatgccttcctgctctacctgggctacaccccgcaggcggcccgtgaagtgcgcatcatgcagttctgccacacgctgcgggaatttgcgcttgagtatcggacttgccgggaacgagtgctacagcagcagcagaagcaggccacataccgtgagcgcaacaagacccggggacgcatgatcaccgagacagagaagttctcaggtgtggctggggaagcccccagcaacccctctgtcccagtagcagtgagcagcgggccaggccggggagatgctgacagtcatgctagtatgaagagtctgctgaccagcaggcttgaggacaccacacacaatcgccgcagcagaggcatggtccagagcagctccccaatcatgcccacagtggggccctccactgcatccccagaagaacccccaggctccagtttacccagtgatacatcagatgagatcatggaccttctggtgcagtcagtgaccaagagcagtcctcgtgccttagctgctagggaacgcaagcgttcccgcggcaaccgcaagtctttgagaaggacgttgaagagtgggctcggagatgacctggtgcaggcactgggactaagcaagggtcctggcctggaggtgtgaaggtgctgtatcccggaaatctatctggaccctggactgcagtgcaggagatgacagagtgaggagggcccagagcagaattctggccccagaactctgtgcccaggagccatgccttgagcagtattagccgtgtgtgtatgcatgtgagtgtgtgtgtatgtgtgtgtgtgcatgcatatgcatgtgcatgtgtgtgagctccttgaacgcacggagcaaaataaaattttcttagctaatcccaaaaaaaaaaaaaaaa

SEQ ID NO: 287970 - DNA, 1000 bp, Homo Sapiens
ccaggtaaatgggtataggatttgctggatttactaacaatttccccctgttcttaacacttcctattagtgacttttcagacattgagtttacttataaagagagatatttatgtactctctaagaagacaaatgaggtcataaacactgcataaagcaaggcaaaaatgtatgccacatctcagttatctaaactagattagatccaagccaagttttctcaacagagagcaaagggccaggcagtaaggtagaaatagagataaaaatcattccttccttgtgatccaaagctggtcgagcagctttcctggaggaaaaggttaatgaacttcaggtccctgcaactcagcccccaccacaaacacagccctggaaacatacagtggcgcaaggtcctcttgaaatgttaatggttaatgttcccaaaccagagaatgctttgaaaatgtatcattcagtgtaaattaattacatacatatttttctatatatttgtttcaaactgtaaaaataacataatatgtaatttgtgtattagtgagaggtgaagccagctggacttcctgggtcgagtggggccttggagaacttttctgtcttacaagaggattgtaaaatgcacccatcagtgctctgtaaaacacaccaatcagcgctctgtagctagcaataggtttgtaaaatgcacccatcagcactctgtaaaacgcaccaatcagcactctgtaaaatgcaccaatcagcaggattctaaaagtagacaatcacagggaggattgaaaaaaagggcactctgatagggcaaaaacggaacatgggaggggacaaataagggaataaaatctggccaccccagccagcagcagcaacctgttcaggtcgcctgccgctgtggaagctttgtccttttgctcttcataataaaccttgctactgttcaaaaaaaaaaaaaaaaaaaaaaaaaaaaaaaaaaaaaaaaaaaaaaaaaaaaaaaaa

SEQ ID NO: 287971 - DNA, 1000 bp, Homo Sapiens
gatgattttgaagaggagtcatttgacattcctgataacccccctgcaagtctgtacaccaacatgaatgtgtttgaaaattatgaagcaagcaaggcttacagtagtgttgatgagtacttttgggggaaaccaccttcaacaggagatgtttttgtgattgtatttgaaaatccaattataataaaaaaaattaaagtaaatactggaacagaagatcggcaaaatgatattttgcatcatggagccctagatgttggggaaaacgttatgcctagcaaacaaaggagacaatgttctagttacttaagactaggagaattcaaaaatggaaactttgaaatgtcaggtgtaaatcaaaaaattccatttgatatacattgtatgaggatatatgtcaccaaaacacaaaaggaatggctaattattaggagtattagcatttggacttcttagccaattaaatcagtatgttcagtttctgaagcagttcttcctgcttcgtcttttgctacctttgtcttttggagggaaagcaatggatgggatatgttaaaagaaacattaattacattggcagttttcatttatacattgttgacataattttactcttaatacacacttgtatttattttaacgtctgaagttgaatatcagtctatagctaatgctactttcatttatatttttaaatgttcttagttttaaaatttcaactgattgtcgaaagggtaatatgaaagattttaaatgaaaaaaatttgttggatgatgatttttgaaaaatagtcaccaactgtatatacttcctcaagaactgataattcattatatcatcagatagcttttattaagcatctgtgggaatatacagttgggtggaatgataatctggtttattttttctgtaaacttaagtttccgttgacttctgtacatctacaatgaatacctcctcatagaagtggtgtctttacataattttttgtgtaggtga

SEQ ID NO: 287972 - DNA, 1000 bp, Homo Sapiens
ctcatggcttctgacttctgaccttctcctcttcgctcccccttcaaaccctgctcccactttgtgagagccagccctgtatgccaacacctgttgagccaggagacagaagctgtgagcctctggccctttcctggaccggctgggcgtgtgatgcgatcagccctgtctcctccccacctcccaaaggtctaccgagctggggaggaggtacagtaggccctgtcctgtcctgtttctacaggaagtcatgctcgagggagtgtgaagtggttcaggttggtgcagaggcgctcatggcctcctgcttcttgcctaccacttggccagtgcccacccagcccctcaggtggcacatctggagggcaggggttgaggggccaccaccacacatgcctttctggggtgaagccctttggctgccccactctccttggatgggtgttgctcccttatccccaaatcactctatacatccaattcaggaaacaaacatggtggcaattctacacaaaaagagatgagattaacagtgcagggttggggtctgcattggaggtgccctataaaccagaagagaaaatactgaaagcacaggggcagggacagaccagaccagacccaggagtctccaaagcacagagtggcaaacaaaacccgagctgagcatcaggaccttgcctcgaattgtcttccagtattacggtgcctcttctctgccccctttcccagggtatctgtgggttgccaggctggggagggcaaccatagccacaccacaggatttcctgaaagtttacaatgcagtagcattttggggtgtagggtggcagctccccaaggccctgccccccagccccacccactcatgactctaagtgtgttgtattaatatttatttatttggagatgttatttattagatgatatttattgcagaatttctattcttgtattaacaaataaaatgcttgccccagaaaaaaaaaaaaaaaaaaaa

SEQ ID NO: 287973 - DNA, 1000 bp, Homo Sapiens
gtgattggagtgaacaccatgaaggtcacagctggaatctcctttgccatcccttctgatcgtcttcgagagtttctgcatcgtggggaaaagaagaattcctcctccggaatcagtgggtcccagcggcgctacattggggtgatgatgctgaccctgagtcccagcatccttgctgaactacagcttcgagaaccaagctttcccgatgttcagcatggtgtactcatccataaagtcatcctgggctcccctgcacaccgggctggtctgcggcctggtgatgtgattttggccattggggagcagatggtacaaaatgctgaagatgtttatgaagctgttcgaacccaatcccagttggcagtgcagatccggcggggacgagaaacactgaccttatatgtgacccctgaggtcacagaatgaatagatcaccaagagtatgaggctcctgctctgatttcctccttgcctttctggctgaggttctgagggcaccgagacagagggttaaatgaaccagtgggggcaggtccctccaaccaccagcactgactcctgggctctgaagaatcacagaaacactttttatataaaataaaattatacctagcaacatattatagtaaaaaatgaggtgggagggctggatcttttcccccaccaaaaggctagaggtaaagctgtatccccctaaacttaggggagatactggagctgaccatcctgacctcctattaaagaaaatgagctgctgccatcttttgtgggcagttagtcaggtgctgctctttgtggtgtggtgggctctggtctgttctgctcggtgctgggcctgggagcaaagattcccatgcttggctacagatactgacagctggcctctgaaggagggtgaaaacttctgcttgacagttccacatccatagtgcatggtctgatgagtgcggttgctgacatgggtttcttggtaagctcctgaggtaatggcagcctc

SEQ ID NO: 287974 - DNA, 1000 bp, Homo Sapiens
aggcggctcttcccgtgcccctaccagaggcttcggtgggcccaccttgtgacctccgcggccggcccctcagtggaactgcgtcccacgcggggggcgtcccgaccgtgggggccgcggcccgcgctgaccctggacgtcgccgcgcagcccctggttccccaaggcagaggaaataccctggtggagccctccttccatagaaccagagatggcatctgtggatttcaagacctatgtggatcaggcctgcagagctgctgaggagtttgtcaatgtctactacaccaccatggataagcggcggcgtttgctgtcccgcctgtacatgggcacagccaccctggtctggaatggcaatgctgtttcaggacaagaatccttgagtgagttttttgaaatgttgccttccagcgagttccaaatcagcgtggtagactgccagcctgttcatgatgaagccacaccaagccagaccacggtccttgttgtcatctgtggatcagtgaagtttgaggggaacaaacaacgggacttcaaccagaacttcatcctgaccgcccaggcctcacccagcaacacagtgtggaagatcgcaagtgactgcttccgcttccaggactgggccagctagtgggggtggcagaggtctctttgcttcattcagccctagctctgtagagaaatgcaaacctcgactctcaaggatgtgaggaacacaagttcatttctgttgttgcggagacactgcagactccactgtgccgaggttgaactcttttttgttgctcaagttctaggagtccctttcctgaatatatacttgtttgtcatagtttccttttcaaagtagtaaacttttctatttttctacttgcccagtagagactctgattctggaaattctgacaaataatttaataatacacatgttgcttcttaaaaaaaaaaaaaaaaaaaaaaaaaaaaaaaaaaaaaaaaaaaaaaaaaaaaaaaaaaa

SEQ ID NO: 287975 - DNA, 1000 bp, Homo Sapiens
tcgcattcatcagagagtccatacaggggagaaaccctatacttgtcctgaatgtgggaagggcttcagtaagagttcaaagcttcacactcatcaaagagtacatactggagagaaaccctacaaatgtgaagagtgtggcaagggattcagtcagcgttcacatcttctcattcatcagagagtccatacaggagaaaagccctataaatgtcatgattgtggaaagggttttagtcacagttctaatcttcacattcatcagagggtccatacaggagagaagccttatcaatgtgctaagtgtggtaaaggtttcagtcatagctcagctcttcgaattcatcaaagagtccatgcaggagagaaaccttacaaatgccgtgaatattataagggatttgatcataattcacatcttcacaataatcatagaagaggaaacttataaatattgttcatttagttaacagctttaatcaaagtttacctaacctttaaaccctataaatcctgctgttaaggaaatcttataaataacacaagtaatcccaagcaacatttatagtttcccctatctcccactaagaattatttgcttcaaaaggagatctttagaaaaatccctatatatttaaaattatagtgtatttttctttacctactataaatataatacagtcataaatatattaaacatttaaggagaaaactcttcattctatttcattctagtctttttttctgtgcattttaatgtgcatgaaattatattgtgtgttcaattttgtattttcactgtcttcaaaatatttacttaaattttggtttgaattgaaactggttggccaactgttaaacaacatctcttaactcccctaaaaactccctaggaagtaacagaaaagatggaaacacacagaacttaaaactcagttttggccggtagaattcaattgtttatggacaaaagccacctaataaaagataggaaagcatt

SEQ ID NO: 287976 - DNA, 1000 bp, Homo Sapiens
tattgacgaagtagacattagcaaagccaaacaatactcttggagttgatatttaataaaactcagcccttttaagaaggtcacaagaaatcattagctcatgcgaatataagagaatacttctaaggacagaaatctctgaatcaatggctaagacaacagtaacagccatttactccactcctgacaataccctttgttgtcttgctgttgaatggagactagagttgggaaagggttatcaactgcaatgggagaagtatgtattgctgttaatctatatgtattcttaaaatctgcatttgtttatagcaggtccttgaaaaatgtttttgttttgttataatgttataattgttatgatgttgatgagaaaaatatcgattcccagccagggacactgtgtggagttcgcacactctccctatgtctccgggtgctccagtttcaaaccccaaagatgtatacattaggttaattgacatatctaaattatctcagtctgagtttgtgaggaagtgtgccctgcagtggaatggctcctaatcagggtttgttcccaccattgccctgagctgctaggatgcgctctgtccacccatggccctgtactggaataacagggtaaataattatcttatctgtttttattaatccgtcttaaatgtgtatatagctcagatttattttaatgtctgatattggaagcgtttggggtctttagaagtttgatgatgttgtgaccagacatttgccttaggaacttaactcttgtttgtatccattagtctatggtaaaattggttttgttatacatcatttcacttaaagttgcagttcctaagaacctattgatgatgttcagtgcagacttactgtacctttgggaatttaggctggagagacgtccatagccttaggtatatcatttataccagacattatgaagttattaaagtctcctatactctaaaaaaaaaaaaaaaaaaaaaaaaaaaaa

SEQ ID NO: 287977 - DNA, 1000 bp, Homo Sapiens
ttcacttcctatttcatgacagaataactgcaaacttttaagatcaggaaatgtagacatctagtgatttctttagtagacagtttaatttcccccaagattaggagacacttctgtgcaggttctaaaaggagcccaatggcctggggtgggagtggggagtagatagggaatatgtgggatttggtttaagttcatcattggaagagttcctggatccttgcaagcttagataaatgtgatctttattagatagcagtggcatgctttaaaaaaaaaaaaggcaatgaaaatttagcaagccactgaatttgagttttcactttgtttctaatatgctgtgtgaatcagtacagttttcttaccctttcttggtcttaatttccttactgataaaatggggtagtaatacctatctcaaaaaattattgcacatattaaataacattcctctatgtatctcaatggcattagacattaggagaagcattttgtggaggatttgaagttgagatcttcatccaagaagtagcttttcaatttgctagaagcttaatgtaggcaagccacttcatttttcagaacttgtttactcatttataatatgggaataaaaatttgtgcaagtcagagaagggtgccttaaaaatgttgtggccaagccacatgagatcaaagacacacttttcatgacctcaaatgtgggcccagcctaggtcagccaacccccatccaacccttagactcacgaacaaatccacctgagatcagcagagccaccctagatcagctgaaactctaagcacaaaaataaaaacttatcactgtataccactggagttttctggttatctctcgtatagcaaaatctaactgatgcaatctccatctggccttcatccttctccctttattgtcctttcgtgtattgttcatccagcaaccaggatgatcttgttaaaacattaaacagattctgtcactcttaaaaaaaaaaaaa

SEQ ID NO: 287978 - DNA, 1000 bp, Homo Sapiens; identical to SEQ ID NO: 116889

SEQ ID NO: 287979 - DNA, 1000 bp, Homo Sapiens; identical to SEQ ID NO: 116890

SEQ ID NO: 287980 - DNA, 1000 bp, Homo Sapiens; identical to SEQ ID NO: 222119

SEQ ID NO: 287981 - DNA, 1000 bp, Homo Sapiens
aggatggcttgagcccacgagatggaagttgcagtgaactgaaattgtgccactgcacttttcagcctgggtgccacagcgagaccctagttaagagaaaaaaaaagtaaaaacaaattgtgggtcaaagtaaatgtatacagttttattacaatgtaacaaaagttgaaaatcaggcagatgtgtattcagtatccaattcaatatatcttagaaaaagcacaggaaacagaccttaaaattgtaacctaccaactaacttacatgcttataaaagtaaaggagaataactggccgggcacggtggctcatgcctataaaattccagcactttgggaggccaaggcaggaggatcacttgagcctatgagttcaagaccagcctaggcaatgtagtgacacctcatttctatttattttaaaaaaaagagagagtaactacagaagaactttaaaaaataaaaaataagcttaccttggattcttggcttagagtagaggttttttttaagttatggaggaaacatttttgtaaaagtttaatgacccactttagatgctccaagaacaagcatcccttccatgtatgtcttgagaaagaaatcacagaagcatttctcaccaatactctttggcttaaaatgttcagcagaattgggcagtgggggtgacttttcttatattaataatatttacatccaatacactgaatcttcctttagaggtaagactttaatatctatactgtaaatatttggtttatttggcactactgtaagttttgtttttcacaaagctcttattatgaagcaaaataaaaattctagtttcttgtatgattttttgtactcattcattcctgttaagctgccaaaaattaaagtgcaatattgtatatttttaagaacaaatttaaaatagaattttgatgtttctcagatcacaagaaatacaaatctatatagtataataaaatcagcaaaaagatcaaaaaaaaaaa

SEQ ID NO: 287982 - DNA, 1000 bp, Homo Sapiens; identical to SEQ ID NO: 222120

SEQ ID NO: 287983 - DNA, 1000 bp, Homo Sapiens; identical to SEQ ID NO: 222121

SEQ ID NO: 287984 - DNA, 1000 bp, Homo Sapiens
taacttgatcaagaatgattggaaggcaaacaggtttacaaatcaattctgtgacttttaaaaagttgacaatgttgtcagatttaaaccagtgtggctagtaaaaagcagctcactcaatgtgggtggctccctattcctttacgctccccctatccctaccccacaagcctttcgattataaaatactaccaatcttgttataagattactgtggagtagtcaagtactccccgggccttctgagctggtggaatattttatttcagactgaaaacagagagcactctccttgggaagggaaagcggagcttgctgagtgagagatggagcctcatggtgtacaactgagggtagttaactcatcacttctcccaagcactcgatcccagcttcacccactggtgttgctttgcttgaactgttcaagccttttatagccttaccataagtatttagatatggtgtccttttctgtttttggggggggagttttgttgtgtttttttaaagtaagtgcttaagtattaactttgggttgtcccctctgtatgtttcgaaggggttttggttctttttgcttctgttttcttaaacatgttttccactcccacttgggcattttggaagctggtcagctagcaggttttctgggatgtcgggagacctagatgaccttatcgggtgcaatactagctaaggtaaagctagaaacctacactgtcactttactgagatttctgagtatacttttcatattgccttaatgtagcagtaatgtgtttatgcatttgtttctttgcacagacattttgtcaaatattaaaactctacttttttatggcacatattagcatataagcctttattccaagaggtatttattttttcacttgtaaaaaaataatgtttccacgtaaagaactctgttatatcctagaggactctgtcttttatattcgggataataaagactttaaagcaaaaaaaaaaaaaaaaa

SEQ ID NO: 287985 - DNA, 1000 bp, Homo Sapiens
tctggagtgaatactttgcaggggttcaaagaggataaaaggaacaaagtcactccagtgttatatttgaattatgggccctacagttcttatgcaccgcattatgactccacatttgcaaatatcagcaaggatgattctgatttaatctattcaacctatggggaagactctgatcttccaagtgatttcagcatccatgagtttttggccacgtgccaagattatccgtatgtcatggcagatagtttactggatgttttaacaaaaggagggcattccaggaccctacaagagatggagatgtcattgcctgaagatgaaggccatactaggacacttgacacagcaaaagaaatggagattacagaagtagagccaccagggcgtttggactccagtactcaagacaggctcatagcgctgaaagcagtaacaaattttggcgttccagttgaagtttttgactctgaagaagctgaaatattccagaagaaacttgatgagaccaccagattgctcagggaactccaggaagcccagaatgaacgtttgagcaccagaccccctccgaacatgatctgtctcttgggtccctcatacagagaaatgcatcttgctgaacaagtgaccaataatcttaaagaacttgcacagcaagtaactccaggtgatatcgtaagcacgtatggagttcgaaaagcaatggggatttccattccttcccccgtcatggaaaacaactttgtggatttgacagaagacactgaagaacctaaaaagacggatgttgctgagtgtggacctggtggaagttgaggctgcctggtatttgattatatattatgtacatactttttcattcttaacttagaaatgcttttcagaagatattaaatatttgtaaattgtgtttttaattaaactttggaacagcgaatttggatgttccagaggttggacttgtattaggtaataaagctggacctgggactcgtga

SEQ ID NO: 287986 - DNA, 1000 bp, Homo Sapiens
cagacggctcagagcttctgcgacagccctggggagaaggggggtgccacaccacctgccctgctcctgctgctctcccgcctctgcctggactacgagacggccaccatctcctacatcctcactctcactgatgaacagtttctggtgcaggatcagttcccagtgacgcccgtgagcacgctgtgtgcagaggccagggaaacggcgcggcggctgctgacccactacgtgaaggtgcagggcctggtcatatcacagatgctgcgcaagagcgtggagactcgcgactggctcagcactctggagccccggaatgtgcgggccgtcatgaagcgggtggtggaggataccaccgccatcgacgtgcaggtggggctcctgtacgaagagggtgttcgcaaggcccagagcagcgactccagcaagaggactttctccgtgtacagcagctctcggcagcagggccgctacgcccccagctatacccccagtgccccgatggacaccaacctcttgagcaatatccagaagctattctctgaacgtattgatgtgttcagccctgtggagttcaacaaggtgtcggtgctgaccggcatcatcaagatcagcctgaagacgctgctggagtgtgtgcggctgcgcacctttgggcgcttcgggctgcagcaggtgcaagtggactgccactttctgcagctctacctgtggcgttttgtggccgacgaagaactcgtgcacttgctgctggacgaagtggtggcctctgctgccctgcgctgcccagaccctgtgcccatggagcccagtgtggttgaggtcatctgcgagcgcggctaggcgcagccgctgccatgcaccggtctgtccctgcaccccatggcacccaggatctggtctcggtggtccttccccgcaggcaggtgtcaggaccggcctaataaacatgtgtggcctcctcaaaaaaaaaaaaaaaaaaaaaaaaaaaaaaaaaaaa

SEQ ID NO: 287987 - DNA, 1000 bp, Homo Sapiens; identical to SEQ ID NO: 223942

SEQ ID NO: 287988 - DNA, 610 bp, Homo Sapiens
actggactcaattctgaaggtcgccaagaaggagagaacaatgtcttctttacccgtgccatacaaactgcctgtgtctttgtctgttggttcctgcgtgataatcaaagggacaccaatccactcttttatcaatgacccacagctgcaggtggatttctacactgacatggatgaggattcagatattgccttccgtttccgagtgcactttggcaatcatgtggtcatgaacaggcgtgagtttgggatatggatgttggaggagacaacagactacgtgccctttgaggatggcaaacaatttgagctgtgcatctacgtacattacaatgagtatgagataaaggtcaatggcatacgcatttacggctttgtccatcgaatcccgccatcatttgtgaagatggtgcaagtgtcgagagatatctccctgacctcagtgtgtgtctgcaattgagggagatgatcacactcctcattgttgaggaatccctctttctacctgaccatgggattcccagaacctgctaacagaataatccctgctcacattttcccctacactttgtcattaaaacagcacgaaaactcaaaaaaaaaaaaaaaa

SEQ ID NO: 287989 - DNA, 1000 bp, Homo Sapiens
gctcctgtggcttttcctacgagcaggaccccaccctcagggacccagaagccgtggctcggcggtggccctggatggtcagcgtgcgggccaatggcacacacatctgtgccggcaccatcattgcctcccagtgggtgctgactgtggcccactgcctgatctggcgtgatgttatctactcagtgagggtggggagtccgtggattgaccagatgacgcagaccgcctccgatgtcccggtgctccaggtcatcatgcatagcaggtaccgggcccagcggttctggtcctgggtgggccaggccaacgacatcggcctcctcaagctcaagcaggaactcaagtacagcaattacgtgcggcccatctgcctgcctggcacggactatgtgttgaaggaccattcccgctgcactgtgacgggctggggactttccaaggctgacggcatgtggcctcagttccggaccattcaggagaaggaagtcatcatcctgaacaacaaagagtgtgacaatttctaccacaacttcaccaaaatccccactctggttcagatcatcaagtcccagatgatgtgtgcggaggacacccacagggagaagttctgctatgagctaactggagagcccttggtctgctccatggagggcacgtggtacctggtgggattggtgagctggggtgcaggctgccagaagagcgaggccccacccatctacctacaggtctcctcctaccaacactggatctgggactgcctcaacgggcaggccctggccctgccagccccatccaggaccctgctcctggcactcccactgcccctcagcctccttgctgccctctgactctgtgtgccctccctcacttgtgggccccccttgcctccgtgcccaggttgctgtaggtgcagctgtcacagccctgagagtcagggtggagatgaggtgctcaattaaacattactgttttccatgcaaaaaaaaaaaaaaaa

SEQ ID NO: 287990 - DNA, 990 bp, Homo Sapiens; identical to SEQ ID NO: 116891

SEQ ID NO: 287991 - DNA, 1000 bp, Homo Sapiens; identical to SEQ ID NO: 222122

SEQ ID NO: 287992 - DNA, 1000 bp, Homo Sapiens; identical to SEQ ID NO: 222124

SEQ ID NO: 287993 - DNA, 1000 bp, Homo Sapiens
actcaagtttaattgtgcatgagggttttattaaaactatatatatctccccttccttctcctcaagtcacataatatcagcactttgtgctggtcattgttgggagcttttagatgagacatctttccaggggtagaagggttagtatggaattggttgtgattctttttggggaagggggttattgttcctttggcttaaagccaaatgctgctcatagaatgatctttctctagtttcatttagaactgatttccgtgagacaatgacagaaaccctacctatctgataagattagcttgtctcagggtgggaagtgggagggcagggcaaagaaaggattagaccagaggatttaggatgcctccttctaagaaccagaagttctcattccccattatgaactgagctataatatggagctttcataaaaatgggatgcattgaggacagaactagtgatgggagtatgcgtagctttgatttggatgattaggtctttaatagtgttgagtggcacaaccttgtaaatgtgaaagtacaactcgtatttatctctgatgtgccgctggctgaactttgggttcatttggggtcaaagccagtttttcttttaaaattgaattcattctgatgcttggcccccatacccccaaccttgtccagtggagcccaacttctaaaggtcaatatatcatcctttggcatcccaactaacaataaagagtaggctataagggaagattgtcaatattttgtggtaagaaaagctacagtcattttttctttgcactttggatgctgaaatttttcccatggaacatagccacatctagatagatgtgagctttttcttctgttaaaattattcttaatgtctgtaaaaacgattttcttctgtagaatgtttgacttcgtattgacccttatctgtaaaacacctatttgggataatatttggaaaaaaagtaaatagctttttcaaaatgaaaaaaaaaa

SEQ ID NO: 287994 - DNA, 1000 bp, Homo Sapiens; identical to SEQ ID NO: 222125

SEQ ID NO: 287995 - DNA, 1000 bp, Homo Sapiens
taagaaggcgacaggatcagtccttctctagggttctggcccccaaggtcagagcaagcatcttcctgacagcattttgtcatctaaagtccagtgacatggttccccgtggtggcccgtggcagcccgtggcatggcgtggctcagctgtctgttgaagttgttgcaaggaaaagaggaaacatctcgggcctagttcaaacctttgcctcaaagccatcccccaccagactgcttagcgtctgagatccgcgtgaaaagtcctctgcccacgagagcagggagttggggccacgcagaaatggcctcaaggggactctgctccacgtggggccaggcgtgtgactgacgctgtccgacgaaggcggccacggacggacgccagcacacgaagtcacgtgcaagtgcctttgattcgttccttctttctaaagacgacagtctttgttgttagcactgaattattgaaaatgtcaaccagattctagaaactgcggtcatccagttcttcctgacaccggatgggtgcttgggaaccgtttgagccttatagatcatttacattcaatttttttaactcagcaagtgagaacttacaagagggtttttttttaatttttttttctcttaatgaacacattttctaaatgaattttttttgtagttactgtatatgtaccaagaaagatataacgttagggtttggttgtttttgtttttgtattttttttcttttgaaagggtttgttaatttttctaattttaccaaagtttgcagcctatacctcaataaaacagggatattttaaatcacatacctgcagacaaactggagcaatgttatttttaaagggtttttttcacctccttattcttagattattaatgtattagggaagaatgagacaattttgtgtaggctttttctaaagtccagtactttgtccagattttagattctcagaataaatgtttttcacagattgaaaaaaaaaaaaaa

SEQ ID NO: 287996 - DNA, 1000 bp, Homo Sapiens
ggagacaaacggtctttcattagtttatttgtgttgggttcttttttttttttaaatgaaaagtatagtatgtggcactttttaaagaacaaaggaaatagttttgtatgagtactttaattgtgactcttaggatctttcaggtaaatgatgctcttgcactagtgaaattgtctaaagaaactaaagggcagtcatgccctgtttgcagtaatttttctttttatcattttgtttgtcctggctaaacttggagtttgagtatagtaaattatgatccttaaatatttgagagtcaggatgaagcagatctgctgtagacttttcagatgaaattgttcattctcgtaacctccatattttcaggatttttgaagctgttgaccttttcatgttgattattttaaattgtgtgaaatagtataaaaatcattggtgttcattatttgctttgcctgagctcagatcaaaatgtttgaagaaaggaactttatttttgcaagttacgtacagtttttatgcttgagatatttcaacatgttatgtatattggaacttctacagcttgatgcctcctgcttttatagcagtttatggggagcacttgaaagagcgtgtgtacatgtattttttttctaggcaaacattgaatgcaaacgtgtatttttttaatataaatatataactgtccttttcatcccatgttgccgctaagtgatatttcatatgtgtggttatactcataataatgggccttgtaagtcttttcaccattcatgaataataataaatatgtactgctggcatgtaatgcttagttttcttgtatttacttctttttttaaatgtaaggaccaaacttctaaactaattgttcttttgttgctttaatttttaaaaattacattcttctgatgtaacatgtgatacatacaaaagaatatagtttaatatgtattgaaataaaacacaataaaattaaaaaaaaaaaaaaaaaaaa

SEQ ID NO: 287997 - DNA, 1000 bp, Homo Sapiens; identical to SEQ ID NO: 116893

SEQ ID NO: 287998 - DNA, 1000 bp, Homo Sapiens; identical to SEQ ID NO: 116894

SEQ ID NO: 287999 - DNA, 1000 bp, Homo Sapiens
agatggcaaaatcgtggccctcactgctaaggtgcagagcttgcagcagagctgccgctacatggaggctgagatgcagaaagaaatccaggagttaaagaaggaatgcgctggctacagagagagattgaagaacattaaagcagctaccaatcatgtgactccagaagagaaagagcaggtgtacagagagaggcagaagtactgtaaggagtggaggaagaggaagaggatggctacagagctgtctgatgcaatacttgaaggataccccaagagcaagaagcagttctttgaggaagttgggatagagacggatgaagattacaacgtcacactcccagacccctgaggggcccacggtcaggactggtggggactgcaggatgtcagaagagtgagatgtcttgcactggctaccttgtttttggttggcttttgttgttgttcctgctactttcacctttaagcagagcagtcaggagacaagcataaaccagagcactgggtagagaggatgagggctggtggctgggggtagacccagcccatttcattgtctaaattgcagtagcttgaggttaacatttagacttggaacaatgctaaaggaaagcatttggcaatatttattataatttaattttatataaaaatatttaatttcctctggatagtcaaacctgccagatatcaaacctgaggaaggcagaagtgaatttggagaactagggtagagagaggttgctataaaacgagcatttggagggcccacggcttcactcaggacctgctgggcttgtgtaccccaggagcccttttaagtatcttttgtacgcttttcaccccacccccaagtcctgggagaaatgcaggcaacactgagacatgggagaggccaagatatgcttgacagaaagggtgattttgaggctcagttaatatttcaaaattgtaaccgtagcaaaactgcattggtatttagaaaaaaaaaaaaaaa

SEQ ID NO: 288000 - DNA, 1000 bp, Homo Sapiens; identical to SEQ ID NO: 116895

SEQ ID NO: 288001 - DNA, 1000 bp, Homo Sapiens
aagaaaagaactgccatacagcttcaacaacaacttcttccactccccctaaaatgatgctaaaaacatcatctgttcctgtggtatcccccaacacggatgagtttttagatcttcttgccagctcacagagtcgccgtctggatgaccagagggctagtttcagtaatttgccagggcttcgtctaacacaaaacagccagtcggtacttagccacctgatgactaatgacaacaaagaggctgatgaagatttctttgacatccttgtaaaatgtcaaggatccagattagatgatcaaagatgtgctccaccacctgctaccacaaagggtccgacagtaccagatgaagactttttcagccttattttacggtcccagggaaagagaatggatgaacagagagttcttttacaaagagatcaaaacagagacactgactttgggctaaaggactttttgcaaaataatgctttgttggagtttaaaaattcagggaaaaaatcggcagaccattagttactatggatttattttttttcctttcaaacacggtaaggaaacaatctattacttttttccttaaaaggagaatttatagcactgtaatacagcttaaaatatttttagaatgatgtaaatagttaaccttcagtagtctattaaggcattaatacttctctggacatgcgcgtttgagggtggaggggtcctgtaaggtgcttcatcgtctgtgattactgcttgggatgtgttctttggcagcttgtgagattactttacctagtgtttataaagtaggaagttaagtgaatcatagattagaatttaatactcttatggaaataattttttaacatcttaattgacaatggcgttttttttatacataaccatggatgtagtgggaaacaatgttgtttggtaaaaataatgtacttgatcaatgtaaaaaagtatataaaatagtcttactaaaaaaaaaaaaaaaaaaaaaa

SEQ ID NO: 288002 - DNA, 1000 bp, Homo Sapiens
gacaaattcatctcttctgctcggatggaggcagaggaccactgccggatgaagcctgggcccaggcggatggagggggacagccgtggtggggctgggggcgaggcctcggaccctgagtcagcagcctcctccctcagcggagcgtccgaagaaggcagtgccagtgagaggaggcggtagaagcagaagggaggtgctagtcggaggcgctttgggaagcccaaggcccgggagaggcagcgagtgaaggacgccgacggggtcctctgccggtacaagaagatcctgggcaccttccagaagctcaagagcatgtcgcgggccttcgagcaccaccgcgtggacaggaacaccgtggcgctgaccacgcccatcgccgagctgctcattgtggcccccgagaagctggccgaggtgggcgagttcgacccctccaaggagcgcctgctcgagtactcccgccgctgctttctggccctggacgacgagacgctcaagaaggtgcaggcgctcaagaagagcaagctgctgctgcccatcacctaccgcttcaagcggtgatcgcaccacgcctccgcgcctccacccgggccttcctcccccgtggaccccggtggatgacctgcccctctccccgccgcgcccctgcccctcctcctcgctccctgggttgggggctcccttagccgggcccccaagcgcgacggccccggaccggccgcggccccttcccgaacgccggcacccccttccgcttgggctgcccagccctgtcctcgccgggccccttcctcctggaaaaccaggcaggcgggtgcccccccctcgagtgggggactgtacagaccccgtctccgccctggccccgcggaggagctgcccacctgattcccggacagacctccccaactccgcgtgagacagagaattattcagataatttaaattaaaaaacgacgtgaaaatttggaataaaaaaaaaaaaaaaaaaaaaaaa

SEQ ID NO: 288003 - DNA, 1000 bp, Homo Sapiens
agcagcctaatgaaccaacataccgttttgtgtgtggttttttttgtttgtttgtttgtttgttttgagacagagtcttgctctgtcacccaggctggagtgcagtgacatgatcttagctcactgcaacctccgcctcctgggttcaagtgattctcctgcctcagcctcccaagtagctgggattactggtgcacaccaccacactcagctaatttttgcatttttagtagagatggggtttcaccatgttggccaggctggtctcgaactcctggacttaagtgagcctcccgcctcagtctcccaaagcgctgggattacaggcaggagccactgagcccagccaagacttcagtgttgactgctttggaggcacaaacccatgcaagcgttagttccaaagttcagtgtgtacccttaaatgaacaatgaagcaggtaaaattacccttgaaaaaaatcccttggaccacccataaatgacagtgactttttcaatatggactcatcatagccagttttccttttgaagttggaactgatcacccttttgtcatctgtaccagatcagtagttggcttgtgttacattttgtgtgtgtgtgtgcgtgttttaaaccagtgcatataaattgtatgttaaatgtaagtaactttaagttgacttatctcttcacagtaatcaagcctcacgtaattcatgctttttaaattcagccagccccccctctctgaaattttattatgtaaataatttgtgttccctgatcactcgtttaagttcttagttgtatgtcatctcttctctagcaggaattggcaaacttttttgtaaaggggtagaaagtgaagattttaggctttgcaggccatatagcctctgctgcaaatgctcagccctgctgttgtaatgtaaaagctgccacagacactacatgaacacgaatgagtgtggctggtgttccaataaaactttatttacacaaaaaaaaaaaaaaa

SEQ ID NO: 288004 - DNA, 1000 bp, Homo Sapiens; identical to SEQ ID NO: 222127

SEQ ID NO: 288005 - DNA, 1000 bp, Homo Sapiens; identical to SEQ ID NO: 222128

SEQ ID NO: 288006 - DNA, 1000 bp, Homo Sapiens
cgtccccagcctgccacgggtgcgaggacagccaagtcctgagtgactcaagatgcttcacttacatggaagaaacttctaaaactctaccgagtggtttttgtatatactaaagttctatttagagcttttctgttttgggcaagttcgctgctccttctatttgggcactttggtttttgtactgtcttttgtgacggcattgattgaacattttttactagtagtcttatgacttttgtatttttttttttttttgtaatttataccaacaacacttttatcactttttttttgttgggcttctgcaaaatacaagctcatttttaaaccaaatgaacagaccatgagctggcttcaggggaagtgctattcacaggaccatatccaccaccctcttaaattcctaaacaatatcatctaggacttctatttaagttatttaaaataaatcttccttgagagccttgggaggtgatgtcagggttataaatggcacagtgcatttgctgtaggaatgtggtttggcattgttttatacacacagtattttttataccttaatgcttattcttgatggcatctgtcagatattagaattgaaaataagaatcttcccaaaatcctttaatttacctgatgccctcatcaggtcgttaaaaattcaaatggttttaatagctaaaaaactacaaattaagctctaaaacaaacaaactacagaaatgtaaaccttcatttgccaaaggtccttggtggcctgtcccctgccctgggagcagatggccctgaagcccttccctcactgtgcaggccaccgggtgaggctggacggtcacccatggtggcttcactgcaaggagcaggactgccgagctcaagcacggggccttcagcttcccctgtcctctggccacaccgccagcccttggtccttatctgtgtgaggtttacaaataaagcttctgatgtcaaatgtttaaaaaaaaaaaaaaaaaaa

SEQ ID NO: 288007 - DNA, 1000 bp, Homo Sapiens
cctccaggaacagcttcaggtcgaaacagtggggcctgggaaaccaagtcacctccaccagctgcaccatccccgttgccacgggccgggaaaaaaccaacgacaccactgaagacaactccagttgcctctcaacagaatgcttcaagtgtttgtgaagaaaaacctatacctgctgaacgccaccgagggtcaagtcacagacaagaagctgtgcagtcaccagtgtttcctcctgcccagaaacaaatccaccaaaaacccatacctctgccaagatttacagaagggggaaacccaactgtggatgggcccctacccagcttttcatctaattccactatttcagaacaggaagctggcgttctctgcaagccatggtatgctggagcctgtgatcgaaagtctgctgaagaggcattgcacagatcaaacaaggatggatcatttcttattcggaaaagctctggccatgattccaaacaaccatatacactagttgtattctttaataagcgagtatataatattcctgtgcgatttattgaagcaacaaaacaatatgccttgggcagaaagaaaaatggtgaagagtactttggaagtgttgctgaaatcatcaggaatcatcaacatagtcctttggttcttattgacagtcagaataacacaaaagattccaccagactgaagtatgcagttaaagtttcataaagggggaaaaaaaagatcaataccattgcttcagacactttcccaaagtttctccttttgagaaaaagtcccaaaacttcatattttggattatgaatcatccagtaataaaatggaagatggagtcagctattgaagtggtcatccatttctttttaagaagctcatgtggacttgttctattgcctgacctgatgaactgttaatatctggtgaggttgagttatcatgctactaatattttccaaataaatatttttatttttaaaaataaaaaaaaaaaaaa

SEQ ID NO: 288008 - DNA, 1000 bp, Homo Sapiens; identical to SEQ ID NO: 222129

SEQ ID NO: 288009 - DNA, 1000 bp, Homo Sapiens
aacccagcagaccattaaaactgaatcatccagtacaaatggggcagttgttaaagatgaaacttcactaacaacattcagtaccaaatctgaagttgatgaaacatatgcactgcctgcaacgaagatcagccgtgtagagacacatgctacagcaacgccgttttctaaagagactccttcaaatccagtggccacagtgaaagcgggagaacgacaatggtgtgatgtgggaatttttaaaaataatacagctttggtgagccagttttatttgctgccaaaagggaagcaaagcatctcaaaggtaggaaatgcagatgtacctgactacagcttgcttaagaaacaagatcttgttccaggcacaggatacagattcagggttgctgcaatcaatggttgtgggataggtcctttcagcaaaatcagtgaatttaaaacttgtattcctggttttcctggagctccttctgcagtcagaatttcaaagaatgttgaaggtatccacctttcctgggaacctccaacctcaccttctggaaatattttggaatattcagcctacttggctatccgcacagcacagatacaagataatccaagtcaacttgtgttcatgaggatttattgtggtcttaagacatcatgtatagtaactgctgggcaacttgcaaatgcacatattgattatacatccaggcctgccattgtgttcaggatatcagcaaagaatgaaaagggatatggaccagctacacaagttcggtggcttcaaggtaacaataagaaagcacctttaaattgaattggtttttttactgaagctattgtgatgatgattatttattagtaactggttatgaagatttgtcatttaaaagagtattctctggctgtatttccagcagttatgaacttgagtttgtaaattgttcttaaaatgtatttgctgaattatagatccaaataaaagaaaagaagcaaagactctctgaaa

SEQ ID NO: 288010 - DNA, 1000 bp, Homo Sapiens
atgatttattttttgactaaatgtgcaatttcttatcactagataactttcagtatcagtggtggttacttattacttaaatcagaggaaggattttataaagattaataaatttaattttaccaataaatattcccataatttagaaaaggatgtcgacttgctaatttcagaaataattattcatttttaaaaagccccttttaaagcatctacttgaagattggtataattttcataaaatgtctttttttttagtgtcccaaagatatcttagataaactattttgaagttcagatttcagatgaggcaacattttcttgagataattacccaagtttcatccatgttgaatggtacaaaatatttctgtgaaactaacaggaagatattttcagataactaggataacttgttgctttgttacccagcctaattgaagagtggcagaggctactacaaaaagcaaccttttcattttcactaagagtttaaaagctattgtattattaaaaagtctttacaatgcttgtttcaaagaaccaacagaaaaaaaagctaagaaaactgagaactaacattaaaaaaattaaatttagaataagaatgatttctttaatttgtcctttttttctttggtctaaaacattattaaatttttgtaaatattttgatttaatgtgtcttagatcctcattattttaatacaggaaaagaaaagatttagtaatttcttaccatgctaatatgtaaagttcatgccatccaggcatttaagagcgatcctcatcccttcagcaatatgtatttgagttcacactatttctgttttacagcagttttgaaaaacacatactatgccaccaattgtcatattatttttagatgatgtaacatagccatcaaaattaatattatgtaatgcctaatacttagtatgtaaatgtcacgagatcatttttacattaaacgtgaaaaaaaatcaaaaaaaaaaaaaaa

SEQ ID NO: 288011 - DNA, 1000 bp, Homo Sapiens; identical to SEQ ID NO: 116898

SEQ ID NO: 288012 - DNA, 1000 bp, Homo Sapiens
acatctcggaggagctgaccacaactacagagatgatgatgggccggttcgagcgggatgccttcgacacgctgttcgaccacgccccggataagctcagcgtggtgaagaagtctctcatcacttttgtgaacaagcacctgaacaagctgaatttggaggtgacggaactggagacccagtttgcagatggcgtgtacctggttctgctcatgggccttctggaagactactttgttcctctccaccacttctacctgactccggaaagcttcgatcagaaggtccacaatgtgtccttcgcctttgagctgatgctggacggaggcctcaagaaacccaaggctcgtcctgaagacgtggttaacttggacctcaaatccaccctgagggttctttacaacctgttcaccaagtacaagaacgtggagtgacgggggagctgtggatggtggcaggagtgtcccagcaagaaaggcggcatccgtctgtgccctgtgcctttccagggagccaggcgccatgggcttctggtccaagctgtgttgactgtcatccccaccccacccctacctcacgcctgccccaccccctgcctcttttggttgttgttcttaatctcctctccatgtagttcccagtgggcaagagcctttgaaaatgcaggattctaaacactcgtgcttgcgtttgaagcctcgcgtcactcagtcgcgtgggatgatgagtccgttgttgtctgccttggccgaaagatgaaaaaaagcctgaaccccaacccccagctggttgagagcaccctgcattctgcctcatggtgcagttagcgatcacaggccttcagaagtacaacatcagctcagcaggaacgccggctccccgaggacccaggcttgacgattcaccggggatctcctgggctgggctctccttggaagtgaggccttttattaaaaataaaagggttttgcagtttgaaaaaaaaaaaaaaaaaaaaaaa

SEQ ID NO: 288013 - DNA, 1000 bp, Homo Sapiens
catgtagatcaccagtcaagaccctttttcaatgagctgatccagtttattacaactggtcctattattgccatggagattttaagagatgatgctatatgtgaatggaaaagactgctgggacctgcaaactctggagtggcacgcacagatgcttctgaaagcattagagccctctttggaacagatggcataagaaatgcagcgcatggccctgattcttttgcttctgcggccagagaaatggagttgttttttccttcaagtggaggttgtgggccggcaaacactgctaaatttactaattgtacctgttgcattgttaaaccccatgctgtcagtgaaggactgttgggaaagatcctgatggctatccgagatgcaggttttgaaatctcagctatgcagatgttcaatatggatcgggttaatgttgaggaattctatgaagtttataaaggagtagtgaccgaatatcatgacatggtgacagaaatgtattctggcccttgtgtagcaatggagattcaacagaataatgctacaaagacatttcgagaattttgtggacctgctgatcctgaaattgcccggcatttacgccctggaactctcagagcaatctttggtaaaactaagatccagaatgctgttcactgtactgatctgccagaggatggcctattagaggttcaatacttcttcaagatcttggataattagtggtgtggaaagtaaagaagtcacaggttgggacatttagacaagagtgaatcacacacgaggaatgtgttcattcttttattgtccgttgttttaacctgactgaatacaagatcaacaagagcactgtactcctggcaattattacatatgttagaacatggattttgcactgtagacaacatttaacaccagtctatggggtactgcattgctttttataaagttcaaaataaagatttattttcaaacaaaaaaaaaaaaaaaaaaaaaaaaa

SEQ ID NO: 288014 - DNA, 1000 bp, Homo Sapiens; identical to SEQ ID NO: 116901

SEQ ID NO: 288015 - DNA, 1000 bp, Homo Sapiens; identical to SEQ ID NO: 116902

SEQ ID NO: 288016 - DNA, 1000 bp, Homo Sapiens; identical to SEQ ID NO: 116903

SEQ ID NO: 288017 - DNA, 1000 bp, Homo Sapiens; identical to SEQ ID NO: 116905

SEQ ID NO: 288018 - DNA, 1000 bp, Homo Sapiens; identical to SEQ ID NO: 222132

SEQ ID NO: 288019 - DNA, 1000 bp, Homo Sapiens
agcgcagcccaggcgtcctcaacggggagccccaaatgtccacgcccagaacaacagttggcaggacaggtgtgacacagccacagcagaggcaaggggtgccaggagtccccagcggcatcctcggggagatgctggtgaggggtccgtacagggtggggtccccacccctagccccttactgaggggggagtgcagcagttggcctgcttgtctggcggagaaagccagctccctgcaccctcggggctgagtcagatctgggtctgccgcaaaggccttgcctagaccaggtcacactgatgccctggtttccctatctgtaaaatggggccaatgacacctacctcactgggtcaccatcgagatcaatcctcctccctgccccgacacctcgggcacatcgcatgcactcagagcacagagccgggcagacgcagcacctgcatggggagcccagtgcccggcacagcacaggggcttccagggaggccgcgcagggccgtggggctgagccacgctctcgttttgtcaggcagctatgcagttgctcttccttgtttttgttttgtttttgtttttgtttttaatatttatttttttagagacagggccttgctctgttgcctgggctggagaacagtggcaccatcatagctcactgcagcctcaaactcctgggctcaagcgatcctccccgctcagcctcctgagtagctgggactacaggtgtgcaccaccacacccagccaaaacagccatcctccccttgagagtcatcagaaaaatacattaggaaaatgtgtttagaaataaaagcacaaggcagggcagtgctcacgcctgtcatcccagcactttgggaggccgagacgggaggatcagttgaggtcaggagtttgagaccagcctcggcaacatggcaaaatcttgtctcttttttttggtattaaaaaaatcataaaaataaaagaaataatgcaaaaaaaaaaaaaaaaaa

SEQ ID NO: 288020 - DNA, 1000 bp, Homo Sapiens
ctcttcttgttcccaatcacagtgttagcactgaagctataaattacctggtcattttgtgatcacaagagtctatgcaaaaaaaaaaatttctttaccccagattatcagatttttttccctcagattcattttaacaaattaagggaagatattttgacacaagaaagcaggaacgtggagaaattggagcaggaaaagaaattatcaaagcaatagaaatagcttggtggtcctatggtgtttttggaagtatttggcattgctaattgagcagtccatatagtactacttttagaagaaacaaaaagtctattttttaaagtaatgttttttcttatgagaaaaaggtttagatagaattgggttttattaatattaatttaatgctattagcaatttccatatactatattgtggaaaagactgaagaatacaattctgagaaatataaaaaaattttaatggtatactcatgttgaaagataaatgttgctaagtcctggtatgatggtgtgagcttccttggggaagtacttcttgagttatgtaactaacaggatgttttactacagatctggatggctattcagataacatggcaaaaaatgatagcagaagatcattaaaaacttaaaatatattttattagaaaacatttatctatgaatgaatatttccttgatgctggtctctgcacacatatgcttggttacttgcatgcattcattggttgttcaataagtgagatgattacagataatactgtattttccttatatggaaaaccgttatagacccaataacaactaaacctttcaaaagaaaatattttctattatgaatgttgattttcataccaaagaagatggagagtctaaaatttggatatgattcttatgtttttttaatagaaaaccttcttcaagtttattttcctaaataaacatcataattgtgaaaaaaaaaaaaaaaaaaaaaaaaaaaaaaaaaaaaaaaa

SEQ ID NO: 288021 - DNA, 1000 bp, Homo Sapiens
aagagcccaacggggccactggaccgagaggcccttttgcagtacttggagcaacaggcactagaagtcaaagagcgtgatgacttggtgcccttcacaggcgagaagaaggggaaaccctatattcagcccaagagggaaatcccagcagaggagcagatcaccctggagcctgagctggaggaggcactggcacatgccacagatgctgaaatgtgtgacattgcagcaattctggacatgtacacactgatgagtaacaagcaatactatgatgccctctgcagtggagaaatctgcaacactgaaggcattagcagtgtggtacagcctgacaagtataagccagtgccggatgaacccccaaatcccacaaacattgaggagatactaaagagggtccgaagcaatgacaaggagctggaggaggtgaacttgaataatatacaggacatcccaatacccatgctaagtgagctgtgtgaggcaatgaaggcaaatacctatgtgcggagcttcagtctggtagccacgaggagtggtgaccccattgccaatgcagtggctgacatgttgcgtgagaatcgtagcctccagagcctaaacatcgaatccaacttcattagcagcacaggactcatggctgtgctgaaggcagttcgggaaaatgccacactcattgagctccgtgtagacaatcagcgccagtggcctggtgatgcagtggagatggagatggccaccgtgctagagcagtgtccctctattgtccgctttggctaccactttacacagcaggggccacgagctcgggcagcccaggccatgacccgaaacaatgaactacgtcgccagcaaaagaagagataacactgcatttccctttaccaactagcgctgggagcactggacacttaaatcctcatctgtcctcctttcctgtaaataaaagcccttctatccaaaaaaaaaaaaaaaaaaaaaaaaaaaaaaaaaaaaa

SEQ ID NO: 288022 - DNA, 1000 bp, Homo Sapiens
acagaaatgcattgactggaaccgtaatgtgctgaagcgggagctgggcctggcagagagtgacatcgtggacattccccagctcttcttcctgaaaaacttctacgcggaagccttcttcccagacatggttaacatggtggtcttaggcaagtacctgggcatccccaagccctacgggcccatcatcaatggccgctgctgcctggaggagaaggtgcagtccctgctggagcctctgggcctgcactgcatcttcattgatgactacttgtcctaccacgagctgcagggggagatccactgtggcaccaacgtgcgcaggaagccctttcccttcaaatggtggaacatggtgccctgagcctgcccccacccgccatcctctctgccctcttgctagggaaccctgccagggtgaaggcaaggaacaaccacctggcctccattctcttgggggagtcttggcactttgcaaacatcctggccaccatgggcaccaggacacagggatggataccacctaccctcgcctctggaatggcctacccaacccgagaagaatgcacctcattcttccctggcctctttcccacccacagcccccagaggctctagatcaacaatgttagcatgttccagaatggctgtgggaggcctagggaggtgggccccacttagaattgctcccccttcattctgatgcctccctggggaacaaggataatgactttgcatctgcacctggaacggggcctgggggacctggggtctggtgtgccaggcaccaggctgcctctgctcttggaaaactaggaaaggggatcagaaacatcctctccccgctctaggtttcttctcccaaaggggacccaaggctgtgacacttacctccacccccatccagcacccttcagctgtgtgtggacaaacaaggacagaaaaacccagtgtccaagggccaatttaaatagaaaaaaaaaaaaaaaaaaaaaaaaaa

SEQ ID NO: 288023 - DNA, 1000 bp, Homo Sapiens
ggaagggattttatacaaattcacaacgttattctcaccagagagcgcacagtggagaaaagccatatagatgtgaggagtgtgggaagggctacaaaaggaggttggaccttgactttcatcagagggtccacagaggagagaaaccctataattgtaaggaatgtgggaagagctttggctgggcctcgtgtcttttgaatcatcagagaatccacagtggagaaaaaccatttaaatgtgaagaatgtgggaaaagatttactcagaattcacaactttatacccatcgtagagtccacagtggagaaaaaccattcaaatgtgaagagtgtgggaaaagatttactcagaattcacaactttattctcatcgcagagtccacactggagtaaagccatacaaatgtgaagagtgtgggaagggcttcaacagtaagtttaatcttgacatgcaccagagggtccacaccggagagagaccttataattgtaaagaatgtgggaagagctttagccgggcctcaagtattttgaatcataagagactccatggtgatgaaaagccattcaaatgtgaagagtgtgggaagagatttactgagaattcacagcttcattcccatcagagggttcacactggggaaaagccatacaaatgtgagaagtgtggaaagagcttcagatgggcctcaactcatctaacccatcagagactccacagtagagaaaaactacttcaatgtgaggactgtgggaagagcattgtgcacagttcatgccttaaagaccaacaaagagaccaaagtggagagaaaacatctaaatgtgaggactgtgggaagcgctacaagaggcgcttgaatcttgatacgcttttgtcattatttttaaatgacacataactgttgtactcatttatggggtacagtgtgatagttaatgcaagtatacatgtgtaatgatcaaatcagtgtaattaacatacctatcactcaac

SEQ ID NO: 288024 - DNA, 1000 bp, Homo Sapiens
cccccagccctgagctgggagatgacagggggaaagaggccctctcaagggtgccagatgcctgggtctcccaagaggggtcccccaactcaccgttcccgggacaggctgccccctgttccaggaagctcatcctcacctgtgtaggcccctgtagtgacccacgcgtccagcagacgcccacccaccgctagccgttgttcctgtgcaaagtagtgtgctatgcacccacccaggtggccgcctctgggcccaaggcacatgctgtgagcttcctgtgagcccaggctctgctcactgctgtcccgcgtcatgagcaccacctctgctttccctgtgtagatctaggccagtggctgcttgttcttgtggagctgtgtgtgttcttctctgagcagctcctccccggagtcccccagcacagtcccaggagatgacaggaaggaagcaccagggcaaggcggacgctcaccctgtgaccacgatggtgaccgtgactgtgggaggaagaactggacccaggacggagcggggctgccctgcctgaggctcccgaggagctttgtgctttggtgttccacccctgttgttactcatgactcagtttccttgacctggtagggtgttccctgctgtgttttccagtgtcctgtgactgtcctgtgcgggccatagggcagggccctgtcccagcagatgggcttgggagggggctccctaaagccagtggacactgccagagtctaccttcctggcaagaggcagaccccggggccctcaggaaggagggagttggcagcgggggctgcagcaggagtaggagcagatgaggcgtcttgccaggaacctcaggaggagggggcccgggacctgtgtgggacctgtgtcctgtggtggccgtttgcagtttctctctgtgttgtgattcccttctcttcaacgttttcagtacgtgtttctcttcaataaacttcattcagtgttccaaaaaaaaaaaaaa

SEQ ID NO: 288025 - DNA, 1000 bp, Homo Sapiens; identical to SEQ ID NO: 222136

SEQ ID NO: 288026 - DNA, 1000 bp, Homo Sapiens; identical to SEQ ID NO: 116907

SEQ ID NO: 288027 - DNA, 1000 bp, Homo Sapiens
atccccggggaggccctgcccttcatccaccatgagctgtctgccctggaggccgccacaagggtgggtgcggtgaccccggcctcagaccctgtcctcatcattggcgcggggctgtcagcggccgacgcggtcctctacgcccgccactacaacatcccggtgatccatgccttccgccgggccgtggacgaccctggcctggtgttcaaccagctgcccaagatgctgtaccccgagtaccacaaggtgcaccagatgatgcgggagcagtccatcctgtcgcccagcccctatgagggttaccgcagcctccccaggcaccagctgctgtgcttcaaggaagactgccaggccgtgttccaggacctcgagggtgtcgagaaggtgtttggggtctccctggtgctggtcctcatcggctcccaccccgacctctccttcctgcctggggcaggggctgactttgcagtggatcctgaccagccgctgagcgccaagaggaaccccattgacgtggaccccttcacctaccagagcacccgccaggagggcctgtacgccatggggccgctggccggggacaacttcgtgaggtttgtgcaggggggcgccttggctgtggccagctccctgctaaggaaggagaccaggaagccaccctaacactcggccagacccgctggctcccaggccctgagaggacagagatgaccacatccctgctggatgcaggacccgtccaaagatgccccggggaggggtgtcagcccacgttgctggcctttggggtcaagaggagtagggatcccaggctgccctggacttagaccagtgtctgaggtggtaacagcggccgcaggccagggttggcctagacctgggatttgtggggaaagctgctggtgtgaccagctgagcacccagccaggagacctgcagccctgcgccttccagaagcaggtcccaaataaagccagtgcccacctgaaaaaaaaaa

SEQ ID NO: 288028 - DNA, 1000 bp, Homo Sapiens
tgtaatgatatattttttcattattatagtagaatatttttatggcaagatatttgtggtcttgatcatacctattaaaataatgccaaacaccaaatatgaattttatgatgtacactttgtgcttggcattaaaagaaaaaaacacacatcctggaagtctgtaagttgttttttgttactgtaggtcttcaaagttaagagtgtaagtgaaaaatctggaggagaggataatttccactgtgtggaatgtgaatagttaaatgaaaagttatggttatttaatgtaattattacttcaaatcctttggtcactgtgatttcaagcatgttttctttttctcctttatatgactttctctgagttgggcaaagaagaagctgacacaccgtatgttgttagagtcttttatctggtcaggggaaacaaaatcttgacccagctgaacatgtcttcctgagtcagtgcctgaatctttattttttaaattgaatgttccttaaaggttaacatttctaaagcaatattaagaaagactttaaatgttattttggaagacttacgatgcatgtatacaaacgaatagcagataatgatgactagttcacacataaagtccttttaaggagaaaatctaaaatgaaaagtggataaacagaacatttataagtgatcagttaatgcctaagagtgaaagtagttctattgacattcctcaagatatttaatatcaactgcattatgtattatgtctgcttaaatcatttaaaaacggcaaagaattatatagactatgaggtaccttgctgtgtaggaggatgaaaggggagttgatagtctcataaaactaatttggcttcaagtttcatgaatctgtaactagaatttaattttcaccccaataatgttctatatagcctttgctaaagagcaactaataaattaaacctattctttcaaaaaaaaaaaaaaaaaaaaaaaaaaaaaaaaaaaaaaaaa

SEQ ID NO: 288029 - DNA, 1000 bp, Homo Sapiens; identical to SEQ ID NO: 222138

SEQ ID NO: 288030 - DNA, 1000 bp, Homo Sapiens
tgttgtacccatatttataattaggctttattatcttcctaaatcaaggaaaggaaatcatccccagaccatttatgctgagctttggaatactattttaaactggattgtacttaaataatgaagctctgcatagaggaactagtcagaagtggggaaaacactgtctaatttttatcagtctggtataaagtattgatctaagagaactctccctgtgccccttggtctttattctcaattaagaaaaacagtcacatgtcacgacaaaccaatcaatctttatgagatattcctgtatccataccccagcttgtttgcaatttataaacctccccttcaaaactaaggagttgcagaaaaaaatggatttcacagagccttgtgtccctaaagttctgtcccagtcagcagtctttatagtccaaacagattataaaaaatgttttccatttgaactttacagtttgcaaaagtgcttttatacattttctaatttcagaaacaggataatttgttaagtgggtttcagtttgctaatagggattttttgtgttttgttttttaattttcagcatctcttgaagaatcttgctacagccaaatggcatctcactttttaaagacgtttgcaattattagttgattcacagtacagaacaaggtataaaggaaaaaaccctgctaggtagtgttataattgctagattaaaaatagactagaacaggttcattttaagatttacttggaagagcaaagaaggaaaaattatatttttaaagaaagagaatattcaggctttatttctggtatgaagtttatattttttaaaaaaatcctatattatcacaccagagattttagattcttttctggttagaaacattgctggtagttggattatatttttattgtattcatttatcttagggggaacattgtaaagaaacaaaaaggtccagatgaatgtatgctagaaataaaagttgaaagattctt

SEQ ID NO: 288031 - DNA, 1000 bp, Homo Sapiens; identical to SEQ ID NO: 222139

SEQ ID NO: 288032 - DNA, 1000 bp, Homo Sapiens
tagggccaaagagcagcgccgtcgccgtgagttcatgatgcgaagcaggttagagtgtctcaaggagagccctcagagcggcagtgagggcaagaaggagatcaatatcattgaactgagtcacaaaaagatgatgaaaaagagaaacaagaaaattttggacaactggatgacaatccaagaactgatgacccatggggccaagtctccagatggcacgagagtccataatgccttcttgtcggtgaccactgtatgaccgaatgaatggaatgcatgcgactgattttaggaggatgctaccagtttcggtagagtatgattgcctcgttcaatgtggcgtttttatatatattttgtgactctttatagtttaaattttttgtaagcaaaaaatacctggtaatttttcatttgtttttcatatactggtaccttctttttggctgagatctttcttttacttgtgatatattcatattactcgtttataaaaaatcaaaaacaaaaggaaagaaaacaaaaaaaacttgcacaaaaatactgaggagccaattaatttcctacttcaatgtatctaatgtaagtgaaaatctggatttatttctctagtttacttattttctactttaataataactcaatgccaaaatatttctatgcttgtttcttggcataatacattttaaatcaaacctgttcgtaataaatcatgtgccacatcttgtcttacacataaaagccactgcttttaacatcccattgtacatttaacacataaatggtgttaacatcccattgtacatttaacacataaatggccattgtctttgtctcagtaaagtgtaggtggacaatcttcctgtgatatgtagtgacattggtcatgtagctagataattatggtaattgtgacaattaaagagaaataaattattgattatccttcagaaaaattaaaaaaaaaaaaaaaaaaaaaaaaaaaaaaaaaaaaaaaaaa

SEQ ID NO: 288033 - DNA, 1000 bp, Homo Sapiens; identical to SEQ ID NO: 116908

SEQ ID NO: 288034 - DNA, 1000 bp, Homo Sapiens; identical to SEQ ID NO: 222140

SEQ ID NO: 288035 - DNA, 1000 bp, Homo Sapiens; identical to SEQ ID NO: 222141

SEQ ID NO: 288036 - DNA, 1000 bp, Homo Sapiens; identical to SEQ ID NO: 116909

SEQ ID NO: 288037 - DNA, 934 bp, Homo Sapiens
gcggtggcgcgagttggactgtgaagaaacatggcggccgcgacgttgacttcgaaattgtactccctgctgttccgcaggacctccaccttcgccctcaccatcatcgtgggcgtcatgttcttcgagcgcgccttcgatcaaggcgcggacgctatctacgaccacatcaacgaggggaagctgtggaaacacatcaagcacaagtatgagaacaagtagttccttggaggcccccatccaggccagaaggaccaggtccacccagcagctgtttgcccagagctggagcctcagcttgaagatgatgctcaaggtactcttcatggaccaccattcgctgttggcaagaaacggctttacttacaaaacagactctttaccttctgctgtgtttgaagtatgtttagtcagcatgctcaggaaataaatgtgaattgcccttgagacctgcttctacattggttgctttgttaactctacctgatcttcacttgtcagtaatttgagaccacttcaaagccctctgcaaacaccccaaaggcagaatctgctattttgagttttccattaacttccaaagaattctggttttcaaaacaggagccagagttggagatattacagtcaactttggcttctaagccagtaattccattcttaaatacctcactgtcttggccatggggaagcactatggcctcagctgggggaaagaccctggcctaggggtcttagccactccccaccctagggtatagttcaggggtatccaatcctttggcttccctgggccatgttggaagaattgtcttgggccacacataaaatacagtaaccatagctgatgagctaaaacaaaaaacaatggtttgtgcaaaaatctcataatgttttaataaagttgaagaatttgaaaaaaaaaaaaaaaaaa

SEQ ID NO: 288038 - DNA, 1000 bp, Homo Sapiens
gtgccatcagcaacttcttgcccaacaatgggcggcagttctgatacagccagaggccctgtctaggctctatggccctgaaccaaagggttatggggatcttccttgtgactgccccttgacacacgccctcctcaaatcctaggggaggccattcccatgagactgcctgtcactggaggatggcctgctcttgaggtatccaggcagcaccactgatggctcctctgctcccatagtgggtccccagtttccaagtcacctaggccttgggcagtgcctcctcctgggcctgggtctggaagttggcaggaacagacacactccatgtttgtcccacactcactcactttcctaggagcccacttctcatccaacttttcccttctcagttcctctctcgaaagtcttaattctgtgtcagtaagtctttaacacgtagcagtgtccctgagaacacagacaatgaccactaccctgggtgtgatatcacaggaggccagagagaggcaaaggctcaggccaagagccaacgctgtgggaggccggtcggcagccactccctccagggcgcacctgcaggtctgccatccacggccttttctggcaagagaagggcccaggaaggatgctctcataaggcccaggaaggatgctctcataagcaccttggtcatggattagcccctcctggaaaatggtgttgggtttggtctccagctccaatacttattaaggctgttgctgccagtcaaggccacccaggagtctgaaggctgggagctcttggggctgggctggtcctcccatcttcacctcgggcctggatcccaggcctcaaaccagcccaacccgagcttttggacagctctccagaagcatgaactgcagtggagatgaagatcctggctctgtgctgtgcacataggtgtttaataaacatttgttggcagaaaaaaaaaaaaaaaaaaaaaaaaaaaaaaaaaaaaaaaaaaaaaaa

SEQ ID NO: 288039 - DNA, 1000 bp, Homo Sapiens
aacttgtatcattttaacttgcacaaaggaagtctgttcttggtattgctcttgcacttgggttttttgttattgttttgtgtggattttttaaagcttttctgttcaccctcctgccaggaaaatcccagaaagcttaatgataccccaaaatgattacacccagggaggaaaaaaaggagcgctttctagggtcagaatcgtggagagaatactcagaacatgaacctctttaaagccttgcaggaatgagtcactcttacttaatgaaatgttaaagccaattaaaaagcatgctgtgatgcccagcttccctttccacagggtgcatgcgtctcctgctggtgaatcacatgcggcaagaggcaactggctccacagcctgggatgctgccgtaccaagaggaaagaagcagcaaaatgcctttacgttgttctaaacccccgacgcataaagtgtagaggagggatggccaagggtgggtggtagaaagtgtgttcaggctgacactggcaatgagtacagataatttcactttcctcttccaggggcaaaggctgatggcctctacctttgtatccaggagaaactgcagagcagccctgtgactttacaaaatatgctacctcaaagtgctaccgataaacctttctaattgtaagtgcccttactaagggcacatgtcttaatcaaagttagttttttgttttctggtttgttttttttttttttgtatattgatgaatgagatcttacctattaaatatattattggaaaaaaaaaaaaaaaaaaaattaaagtttgagtgtgtgtgtgtgtgtgtgtgtgtgtgtgtgtgtgtgtgttttatgacttaaatatctttacgtgtgttttttagagcttggttctttaaagatttggagaagatatgtaaattaccaaggcacttggtttttctgttttatatactaataatcagggcctaagttaaataaaaatatgtgtgcatgtatttt

SEQ ID NO: 288040 - DNA, 1000 bp, Homo Sapiens
atgcaggccaggaggagggaatcgacaattttggaacctatgccatgaatgccttacgcctggagaaagccttcagagcctgggggttagagatgaactgtgatacaaatcctttggaagctggactggaatattttgtgaagttaaataagccagcagacttcataggaaagcaagcactgaaacagattaaagccaaggggctgaaacgaagactggtctgcctcaccttggcaacggatgatgttgatccagagggaaatgaaagcatctggtacaatggcaaggtggttggcaacacgacatctggaagctatagctacagcatccagaagagtctggctttcgcatatgtccctgtacaactaagtgaagtgggacagcaagtggaagttgaactattaggcaaaaattacccagcagtcatcatacaagaacctttggtattgaccgaaccaaccagaaaccggcttcagaaaaaaggtggaaaggacaaaacttgaaaaaagaccttcagcagtcaactgaattagagttgctaatgactgtccttgaaattattataactggctcccaggggaatagaggaaaccaggaattcatttcaaaatcatcaaagtctaaatttagaatcttaatgaaacctttctgttaagtgttttctaagcaagacagaataatagataaatgatttacattgttcttttaaatgaagaaatttgaaatgaatgtttttttatttaccccacattacccaatcagtaaaacatttaggtgtttgctaatatacacaatcattactataacctaattaagggacattttataattttagtaacaaatgcattcggttcttgacagctgaaaacaaattaataaattatcttttacataaaaacatgtacaatattgtttatggatttacttctttgagaaatctttccttagatgaataaatgaaagttttaatttttcatgaaaaaaaaaaaaaaaaaaaaaa

SEQ ID NO: 288041 - DNA, 1000 bp, Homo Sapiens; identical to SEQ ID NO: 222143

SEQ ID NO: 288042 - DNA, 1000 bp, Homo Sapiens
gtgacaagtttggagtgcgcccccttcagtactgcgcgttctaagacttttggcggagactttcttggcaaaacccattccccaaagctacgcttcccctgctgagatagcccctacccccacctccacaggctgggacagccccgtccccaccatcctcctcccaagccaattaaatgatcacagcacgcgtgacagttaccggctggagagccggaggtgggaccgggagcaggggaccgtagaaccgggccgcgctcctcccctcctagagttcgtggaggcgcagcagagggccgtccctcttccggatgtcggactaagcgaacagcgcccccactgccggccggtagcagccggaagtgccagaccggaggtgcgtcattcaccggcgacgccgatacggttcctccaccgaggcccatgcgaagctttccactatggcttccagcactgtcccggtgagcgctgctggctcggctaatgaaactcccgaaataccggacaacgtgggagattggcttcggggcgtctaccgctttgccactgataggaatgacttccggaggaactcgatactaaatttgggactctttgctgcgggagtttggctggccaggaacttgagtgacattgacctcatggcacctcagccaggggtgtagccaagtagacaaatggaatcctgtgctgaacccgaatcttccaaaaaacagcctacaatctgtgaccaccacaagatgtgccctgatggcagctgaagtttgattcagatgggcacttttcttccccttccctgcctagtttccttttgttccttgagtccacgcagaattccattctctggtcagcagacaggcttaagctaaagtattgcctctattctgtaaagttctgtacatagttcccaagcttctgcagggggtgatttttgctcttgtcctgagaaataacagtgctgttttaaaaaacatttgaaataaataccgcacacaaaggc

SEQ ID NO: 288043 - DNA, 1000 bp, Homo Sapiens; identical to SEQ ID NO: 116911

SEQ ID NO: 288044 - DNA, 1000 bp, Homo Sapiens
ggaagatgcggggagtgagctgggtgggccctgctagcgagagaggtcaaccccggtggccagggaacccacttccaagcgcagggacgccggcctccagctggtgtgtgctaaggctccgtcctgactgccctgtgccctggaaaagcagcaatacatccgccccttacagccctctggctagaggagccaccagtggaaaggaagccctccatcctctggtattaacgccttaatgcccctgtcttttactgtaagttacttagatcatttttggaagcaggcgtggtagagtcctgtaaatgaatgctctgggctagatacagcttggagaacctgctggccttgttagacagaacttgggcctttgccagcagcaagaggtgaagcgaagccactcttacctctcccttcccctcccacctgccccctgcgtaggcacccagacttggagagacccgtctgctgttaatacttccatcctcttccttcccaaagagcagatcccaaggcatttactccttggtctgtctcgctttatctgtcgcccctcccagcgctgagagcctcccctggctgtcagcagcactgtgtccaggctcttgtctgaacaccgcagcccctccttcgctccttccacagctcagcatgtcacggcaaggactgccgcattggtgatggagggccagctgaggggaagttgctggtgagtttcctttctccatttctagcatatgacacctggcctctgcttgagcacttaggtgacaggaacttccgcacctcctgaggccctggatgattctaattgttagaaattctaattgttagaaatccttccttataatgaatgaattctgctttcctataatttctacctattgggccttgttctgttctctggaactaaacagaacaaccatttacccctccttttcaaactagagaataaacatttggttttagaaaaaaaaaaaaaaaaaaaaaaaaaaaaaaaaaa

SEQ ID NO: 288045 - DNA, 1000 bp, Homo Sapiens
agggcgcggcccaggcctgaaggggagctctgagacagagcaaacacccaccccagaacaagccgacacacagggagacgggggcctggagccagccctgagccagaggcagaatggatggacagacaggccatggaggcagcactgagccagcaccacacgtccatcctgggacagacgggcctggacttcacggcaagacccccctctcttccccactgggttctgccaccaccaggaggatttcaagaaagcaccaaagaccagggagctcggatccatactcggggggcctcagcccttgggaggggacacctgaggcagccagcgccccctccccagtccccagaactgcctgcaggtgccttgttgctggcttgtcttcagaaagggactgttctgggtggctggatctccagggtaccctccaccccagctgccaagccctgggccagcagcacccccttgtggccatcctgtgccttgttcccggtggcctccctattggactactaggaggggctggcagggcctccatagcacagaattgccccaaagccttgttaagatgagtcaagacccctcccccgcttcctcccttcctttcccccttcctccctcccccttcataaaggcctcccttgtcaccttccctcccaccccgtctcagccctgtgctcctggaggccctgctcccaaaaccgctggaaggactggggcactttctgccacagtagaacacagacagggcttcagatcacccacgcctgttttcagctgtgggtggccatgcagacacgcgccctggcatgtggggcctgggtgggcaggcaggacctgggccctcccacccatcagagcccactcaggaccagcgttcggagctcccacctggacgcatccctcaccacgtccggatttccttctttggatggaatgtaacgcgatctctatttaataaaggcaggctttgttggtaaaaaaaaaaaaaaaaaaaaaa

SEQ ID NO: 288046 - DNA, 1000 bp, Homo Sapiens; identical to SEQ ID NO: 116913

SEQ ID NO: 288047 - DNA, 1000 bp, Homo Sapiens
ctgttgcctgccaccccagcaaggccctcattgccagtgctggcgctgatgccctggccaaggtcttcgtatgatgcccacctggccctgccctggccgccacgctggctggggtgtagggccgggcaggtggggctgaggggactcccagcctcgctggaggtgcagaggcctggcctctgtctgtttgccatggagcctggtggtgctaacggccctttccccaggaatccctccccaacggctgccttccccaagcatccagcctggggatgggcccctttcaggaatcacccccgaggatggcctcggggtttccccctgtgccctgacagccgctcctggtatcagagctgctttccagagggcagcacagccagggccgggtgtctttagggatcagtttttccaagactccagaaggtgccaggttctccccttgagctcctgctcccccatcccccatcctcccagacctgggcaggagctgtgctgggagaaagggtggcagccgggagcctcagagctgagccccggcctggctgcccctcccctccggccctctccactgctttccagacactaaccaaggcttccaggccagggattgcccaacactcctagggcagccctcccagcgccccatggggtcgcccatgggtagagacggctttcttgtgcccctccctggggcatggagggtggagtgggcctcgggtccccctgaactccctgtatatctgtataaataacgggattttcatggcgccgccccacccgcattatcactgtgtgatggtctcagtcagtctcctccctgtctccactctttccctctatttatttcactctcttgtttggttctaccctgcaccctcggtccccttccaggttcctgtttataagccccaacccctctgtccccatcttgtatgtgaaaacttgtctcaataaaccctttggagtaaaaaaaaaaaaaaaaaaaaaaaaaaaaaaaaaa

SEQ ID NO: 288048 - DNA, 1000 bp, Homo Sapiens
ccccttcacctacgagcagctggacgtcctaaagcataaactggatgagctctacccacaaggttaccccgagtctgtgatccagcacctgggctacctcttcctcaagatgagccctgaggacattcgcaagtggaatgtgacgtccctggagaccctgaaggctttgcttgaagtcaacaaagggcacgaaatgagtcctcaggctcctcggcggcccctcccacaggtggccaccctgatcgaccgctttgtgaagggaaggggccagctagacaaagacaccctagacaccctgaccgccttctaccctgggtacctgtgctccctcagccccgaggagctgagctccgtgccccccagcagcatctgggcggtcaggccccaggacctggacacgtgtgacccaaggcagctggacgtcctctatcccaaggcccgccttgctttccagaacatgaacgggtccgaatacttcgtgaagatccagtccttcctgggtggggcccccacggaggatttgaaggcgctcagtcagcagaatgtgagcatggacttggccacgttcatgaagctgcggacggatgcggtgctgccgttgactgtggctgaggtgcagaaacttctgggaccccacgtggagggcctgaaggcggaggagcggcaccgcccggtgcgggactggatcctacggcagcggcaggacgacctggacacgctggggctggggctacagggcggcatccccaacggctacctggtcctagacctcagcatgcaagaggccctctcggggacgccctgcctcctaggacctggacctgttctcaccgtcctggcactgctcctagcctccaccctggcctgagggccccactcccttgctggccccagccctgctggggatccccgcctggccaggagcaggcacgggtggtccccgttccaccccaagagaactcgcgctcagtaaacgggaacatgccccctgcagacacgt

SEQ ID NO: 288049 - DNA, 1000 bp, Homo Sapiens
ctggctccgtcaagcgaagaacggccgctgccaggtcctgtacaagaccgaactgagcaaggaggagtgctgcagcaccggccggctgagcacctcgtggaccgaggaggacgtgaatgacaacacactcttcaagtggatgattttcaacgggggcgcccccaactgcatcccctgtaaagaaacgtgtgagaacgtggactgtggacctgggaaaaaatgccgaatgaacaagaagaacaaaccccgctgcgtctgcgccccggattgttccaacatcacctggaagggtccagtctgcgggctggatgggaaaacctaccgcaatgaatgtgcactcctaaaggcaagatgtaaagagcagccagaactggaagtccagtaccaaggcagatgtaaaaagacttgtcgggatgttttctgtccaggcagctccacatgtgtggtggaccagaccaataatgcctactgtgtgacctgtaatcggatttgcccagagcctgcttcctctgagcaatatctctgtgggaatgatggagtcacctactccagtgcctgccacctgagaaaggctacctgcctgctgggcagatctattggattagcctatgagggaaagtgtatcaaagcaaagtcctgtgaagatatccagtgcactggtgggaaaaaatgtttatgggatttcaaggttgggagaggccggtgttccctctgtgatgagctgtgccctgacagtaagtcggatgagcctgtctgtgccagtgacaatgccacttatgccagcgagtgtgccatgaaggaagctgcctgctcctcaggtgtgctactggaagtaaagcactccggatcttgcaactccatttcggaagacaccgaggaagaggaggaagatgaagaccaggactacagctttcctatatcttctattctagagtggtaaactctctataagtgttcagtgttcacatagcctttgtgcaaaaaaaaaaaaaaaaaaaaa

SEQ ID NO: 288050 - DNA, 1000 bp, Homo Sapiens
gtcctgtctgtctatagcttggaacagggagctttgattactgactccggttccacacactgtaagatcaaaaaaccatctccacatttgaaagagatgtaaggtgtattcatagggatggtggctcaacaaatcaagcaaactggaatcaaggggagggggaagggaatgaaatggaaagggaggctgattcccttcccctgacttaccactaatttactaggctacctactttcatgagtaacctctcacagctacccagcacatgccacaatcctatgctcttgccttcttttatctgcactgtgtgaagggactcttttaaataaatgagcaagtgtcctaagctatgtcatccaaagattgtcctttccattctcaaatcctgtgactgggatcactcaacagcactgtgatgtattattttcaatgaggtgcctttcttaactgaccaaatgctgccttgtttggcccctaaatcaataaaatatgttaaaatttgtatcccctgttgtggcattttttttagataatctaagctagaaaaatgacattgaattctggacctggctggaaggaaaagaagccctttcttgtcgctggcagctgtgtggtagggaggtccaagtatgtgcatatgagataagcctgcaacctcttgaccttcagctcctatgcaggcttctcttgagcccagagacaaggcagcttggtctagtggagatagcactgtgcttggagttcaggggacctaggacaaatcccagccagttagttattcactgtgctcctgtttcctcagctgaaaaaggaagttggttatgccaccttcttggccttaatggcattaaatgaaatttataggaagaaggtttttgctcagtacctggcatgcaacagacattggataaatgttagttggatccagatatacacagaaagatatctgcttcctgccaggctggataactgttgaatggacacttgtccatagtctaga

SEQ ID NO: 288051 - DNA, 1000 bp, Homo Sapiens; identical to SEQ ID NO: 116914

SEQ ID NO: 288052 - DNA, 1000 bp, Homo Sapiens; identical to SEQ ID NO: 222146

SEQ ID NO: 288053 - DNA, 1000 bp, Homo Sapiens
tcccgggagagcgtggagagccccgagcagaagggcctgacgtaccaccgcatcgtagaggctttccggtttgcctacgccaagaggaccctgcttggggaccccaagtttgtggatgtgactgaggtggtccgcaacatgacctccgagttcttcgctgcccagctccgggcccagatctctgacgacaccactcacccgatctcctactacaagcccgagttctacacgccggatgacgggggcactgctcacctgtctgtcgtcgcagaggacggcagtgctgtgtccgccaccagcaccatcaacctctactttggctccaaggtccgctccccggtcagcgggatcctgttcaataatgaaatggacgacttcagctctcccagcatcaccaacgagtttggggtacccccctcacctgccaatttcatccagccagggaagcagccgctctcgtccatgtgcccgacgatcatggtgggccaggacggccaggtccggatggtggtgggagctgctgggggcacacagatcaccacggccactgcactggccatcatctacaacctctggttcggctatgacgtgaagcgggccgtggaggagccccggctgcacaaccagcttctgcccaacgtcacgacagtggagagaaacattgaccaggcagtgactgcagccctggagacccggcaccatcacacccagatcgcgtccaccttcatcgctgtggtgcaagccatcgtccgcacggctggtggctgggcagctgcctcggactccaggaaaggcggggagcctgccggctactgagtgctccaggaggacaaggctgacaagcaatccagggacaagatactcaccaggaccaggaaggggactctgggggaccggcttcccctgtgagcagcagagcagcacaataaatgaggccactgtgccaggctccaggtggcctccctggcctgtctccccactcaaaaaaaaaaaaaaaaaa

SEQ ID NO: 288054 - DNA, 1000 bp, Homo Sapiens; identical to SEQ ID NO: 116915

SEQ ID NO: 288055 - DNA, 1000 bp, Homo Sapiens
cctctgccttgcacaaaaagcacaagcattccttagcagctcaggcgcagccctagtgggagcccagcacactgcttctcggaggccaggccctcctgctggctgaggcttgggcccagtagccccaatatggtggccctggggaagaggccttgggggtctgctctgtgcctgggatcagtggggccccaaagcccagcccggctgaccaacattcaaaagcacaaaccctggggactctgcttggctgtcccctccatctggggatggagaatgccagcccaaagctggagccaatggtgagggctgagagggctgtggctgggtggtcagcagaaacccccaggaggagagagatgctgctcccgcctgattggggcctcacccagaaggaacccggtcccaggccgcatggcccctccaggaacattcccacataatacattccatcacagccagcccagctccactcagggctggcccggggagtccccgtgtgccccaagaggctagccccagggtgagcagggccctcagaggaaaggcagtatggcggaggccatgggggcccctcggcattcacacacagcctggcctcccctgcggagctgcatggacgcctggctccaggctccaggctgactgggggcctctgcctccaggagggcatcagctttccctggctcagggatcttctccctcccctcacccgctgcccagccctcccagctggtgtcactctgcctctaaggccaaggcctcaggagagcatcaccaccacacccctgccggccttggccttggggccagactggctgcacagcccaaccaggaggggtctgcctcccacgctgggacacagaccggccgcatgtctgcatggcagaagcgtctcccttggccacggcctgggagggtggttcctgttctcagcatccactaatattcagtcctgtatattttaataaaataaacttgacaaaggaaaaaaaaaaaaaaa

SEQ ID NO: 288056 - DNA, 1000 bp, Homo Sapiens; identical to SEQ ID NO: 116916

SEQ ID NO: 288057 - DNA, 1000 bp, Homo Sapiens
tcctttcccatgaggccttggttcagagccccaggaatggaccccccaatcactccccactctgctgggataatggggtcctgtcccaaggagctgggaacttggtgttgccccctcaatttccagcaccagaaagagagattgtgtgggggtagaagctgtctggaggcccggccagagaatttgtggggttgtggaggttgtgggggcggtggggaggtcccagaggtgggaggctggcatccaggtcttggctctgccctgagaccttggacaaacccttccccctctctgggcacccttctgcccacaccagtttccagtgcggagtctgagaccctttccacctcccctacaagtgccctcgggtctgtcctccccgtctggaccctcccagccactatcccttgctggaaggctcagctctttggggggtctggggtgacctccccacctcctggaaaactttagggtatttttgcgcaaactccttcagggttgggggactctgaaggaaacgggacaaaaccttaagctgttttcttagcccctcagccagctgccattagcttggctcttaaagggccaggcctccttttctgccctctagcagggaggttttccaactgttggaggcgcctttggggctgcccctttgtctggagtcactgggggcttccgagggtctccctcgaccctctgtcgtcctgggatggctgtcgggagctgtatcacctgggttctgtcccctggctctgtatcaggcactttattaaagctgggcctcagtggggtgtgtttgtctcctgctcttctggagcctggaaggaaagggcttcaggaggaggctgtgaggctggagggaccagatggaggaggccagcagctagccattgcacactggggtgatgggtgggggcggtgactgccccagacttggttttgtaatgatttgtacaggaataaacacacctacgctccgaaaaaaaaaaaaaaaaaa

SEQ ID NO: 288058 - DNA, 1000 bp, Homo Sapiens
tcttgtctccccactccctccctctttgtttccttccttccttatttcctttagtttccttccttagccgttttgagtggtgggaatcaatgctgtttcactcaaaagtgttgcatgcaaacacttctctttattctgcatttattgtgatttttggaaacaggtatcaaccttcacagttgggtgaacaagtgttgtcctacagatgtccaatttatttgcatttttaaacattagcctatgatagtaatttaatgtagaatgaagatattaaaaacagaagcaaattatttgaagctctctaatttgtggtacgatattgcttattgtgactttggcatgtatttttgctagcaaaatgctgtaagatttataccattgatcttttttgctatatttgtatacagtacagtaagcacaattggcactgtacatctaaaaatattacagtagaatctgagtgtaatatgtgtaaccaaaatgagaaagaatacaagaaatgtttctggagctagttatgtctcacaattttgtagaatcttacagcatctttgataaacttctcagtgaaaatgttggctaggcaagttcagttaaaatatagtagaaatgtttatcctggtatctctaagtatacatttaattgtacagaaaatttacagtgtaacattgtgtcaacatttgcagattgactgtatatgaccttaatctttgtgcagcctgaaggatcagtgtagtaatgccaggaaagtgctttttacctaagacttccttctcagcttctcccataaagagaccctaatatgcattttgatttgtaattggaaatgtaactttcactgaaagtgtcatgtgatgtttgcattacttttaactgctatgtataaaggaaagtgtgtcttttgacttcatcagttatttctcttgtgcacagagaaaaatgcattaaaaatgactaaaaaaaataaaaaattaaaaaatgaaaaaaaaaaaaaaaaaa

SEQ ID NO: 288059 - DNA, 1000 bp, Homo Sapiens
tacgcctgtcagggccgagccgagcggatcgctgggcgctgtgcagaggaaaggcgggagtgcccggctcgctgtcgcagagccgaggtggcctgtttctgcgccggaccagtcgaggactctggacagtagaggccccgggacgaccgagctgatggcgtcttcgaccccatcttcgtccgcaacctcctcgaacgcgggagcggaccccaataccactaacctgcgccccacaacgtacgatacctggtgcggcgtggcccatggatgcaccagaaaactggggctcaagatctgcggcttcttgcaaaggaccaacagcctggaagagaagagtcgccttgtgagtgccttcaaggagaggcaatcctccaagaacctgctttcctgtgaaaacagcgaccgggatgcccgcttccggcgcacagagactgacttctctaatctgtttgctagagatctgcttccggctaagaacggtgaggagcaaaccgtgcaattcctcctggaagtggtggacatactcctcaactatgtccgcaagacatttgatcgctccaccaaggtgctggactttcatcacccacaccagttgctggaaggcatggagggcttcaacttggagctctctgaccaccccgagtccctggagcagatcctggttgactgcagagacaccttgaagtatggggttcgcacaggtcatcctcgatttttcaaccagctctccactggattggatattattggcctagctggagaatggctgacatcaacggccaataccaacatgccatcagacatgagggagtgttggttgctacggtgatggggctcagagcagaaccaaagcatgattgtgacctccagaggtgatggtaactgcacacatggtttccaagggtcttcctcctaaatttccaggggcctcccaaggaaaatggacatattctttttggaaataaaatacttctaccaacataaaaaaaaaaaaaaaaaa

SEQ ID NO: 288060 - DNA, 1000 bp, Homo Sapiens
accacgtgcacttgttctgtggttttggtctcttgtttaattgcacacaagtaatactactgggtaaccagaatcaggtgtgaatgtgttgagattttttactgttttgcatgataggaaaattgagaaagaatacgtataaaagatagagaggcataacatcaatgcagagttggaagttggctcccaagggctgacatggtgtgagtgtgtgggtgtgtgataagcttctcatccctgcatagatgcagtattcttagccttagtagaaaaacctggtttagtggtttaagccttgtgtggcagatagatcttaaagggcaaagcagtatattggtagttgtcaatatagcagtgctagctctgtctatataaatagagaaatggggttagccatagaggttaaaactacctggttatcccatataataacacaaactgggtcttggatacacagttgtatttaatgttttacgatctagcctttccagtacaggcactttctgagaaacctttgtcctcacttgaggcattttgttgtcgggtttttgtgtttgtttttgtgggtatttgcctcattccacccctgagctttcaggtagacagacgtgattcaaaactctgttctaaggtgtttattgtagtggagtaatgggtttgcagtgataagtcatacttttccaccgaaagggagggcttgggaatccctgagattagctaaagttaagttgttggaagaattccttgattggaaattgtacctttgtgttttgttgctctgtttcctgaaaataactcggggatgctcctggtttgtccatctactgctttgattccttggatcccacccattctttcactttaagaaaaaacaaataattgttgcagaggtctctgtattttgcagctgcccttttgtaagaagcacttttcccaaataaaacaattaaaaaaaaaaaaaaaaaaaaaaaaaaaaaaaaaaaaaaaaaaaaaaaaaaaa

SEQ ID NO: 288061 - DNA, 1000 bp, Homo Sapiens; identical to SEQ ID NO: 116917

SEQ ID NO: 288062 - DNA, 1000 bp, Homo Sapiens; identical to SEQ ID NO: 116918

SEQ ID NO: 288063 - DNA, 1000 bp, Homo Sapiens
ggtttgttacataggtaaacttgtgtcatgggggtttactgtacagattatttcatcacccaggtattaagcctagtactcattaatcatttttcctgatcttctccctcctcccaacctccaccctcaagtaggattcagtgtgttgttcccctctatgtatccatatgttttcataatttagctcccacttatgagtgaagacatacggtatttgattttctgttcctgtgttagtttgcgaaggatagtagcctccaattccatccatgtcaaataatcaaaattatttaaactttgattagttctttattaaatatgtcataaatatttaaaaataatacagcaataccaaaataaacctagaaatattgttttttatattattgttgtatgacatttaaaaatttctttctatgtgtatttatatttatacatacaagttggatcatggagtttgtaatctggttttccactgaacactgtgtcacgaacaactttttctattaacaagcatctatttctttattcttctgggcttcatcgtatggctaaacatgatttgttattctattttgggaatttttagttgtattctattcttttactgtacattgtttacatctggattttcctgtaataaacttttagcacctaaattgcaagatctaaggatatgtgtttttaaaaatctaaagctgaattccttttcttttaaacttcttttcttgtagaacatttcaaacatacataaaagagaagagcacagtgaacccccatgtactccatgtagccaccatccagcttcaacatcaacattttgctaatcttattttaattagctacagctccttgtttgttagttttcatggaaaattttagggcaaattccagatgttgtataactattatgttgtgtaagttatgtatgtacatattccacatatgtatttagtataatctgtgactaataaagacattttaaaaaaccatgcccaca

SEQ ID NO: 288064 - DNA, 951 bp, Homo Sapiens
atgcctggtcagaactacagaaccatatctgaatttatcctctctggcttctcagccttcccccagcagctcctgcctgtcttgttcctgctgtacctcctgatgttcctgttcacattgcttggcaaccttcttatcatggccacagtttggattgaacgcagactccacacacccatgtacctcttcttgtgtgccctctccatctctgagattctgttcactgttgccatcacccctcgcatgctggctgatctgctcttcacccatcgttccatcacctttgtggcttgtgccattcagatgttcttctccttcatgtttggcttcactcactccttccttctcatggtcatgggctatgatcactacgtgaccatctgccacccactgcattacaacatgctaatgagtccccgtggctgtgcccatcttgtggcctggacctgggctggtggctcggtcatggggatgatggtgacaatgatggtttttcacctcactttctgtgggtctaatgtgatccaccattttctctgtcatgtgctttccctcttgaagttggcctgtgggagcaagacatcatctgtcatcatgggtgtgatgctggtgtgtgtcacagccctgataggctgtttgttcctcatcatcctctcctttgtcttcattgtggctgccatcttgaggattccttctgctgagggccggcacaagactttctccacttgtgtatcccacctcactgtggtggtcatgcactatagttttgcctcccttatctacctcaaacccaagggcctccattctatgtacagtgatgccttgatggccaccacctatactgtcttcacccccttcctcagcccaatcattttcagtctaaggaacaaggagctgaagaatgccataaataaaaacttttgcagaaggttctgccctctaagctcctaa

SEQ ID NO: 288065 - DNA, 1000 bp, Homo Sapiens
atgtttgtggaaagagcatagtttaacatcttgagaaatttgggacataaagttttcatggtagacagttcatgcagtatatgaattgacataatggaaataatctgattttatttttacaactaacatccattccccttcatttaaacaccttttgtgttttacttcagtgaggagattggagtctgaatggatctgttttccaagagattctgagaaatttttgtattcagcagttggaaagctctctattctagttgataaaacttcccttttttgatgtagatgcagatattctatacagttctgttgtcttttactaggactgtaaacttttgtgataaaattcaaataagattttatttctttgtaattttggctttcacaatttatctttaaatccttgagcaatctgtatacaattaagagatttctgacatttattcttacactaaatggatcaactctaggatttaggcatgttaacttctgttgtgttttgaatctctccagagttgcatgtagatagcatttatttctgtgcccttaaacccatttagaaaataactacaaagtaaaaatgtagaggaaatagaaatgtattttttcatgaacattttgatacaaatttcatcatttaatgattcaccaatttcttgcattaatttgaatttaagcatttaattcaaagagaggggagcatccattattggtacatgtgggcttttaaaaactccatcctttataaatagtcaaggtttgggccacacaaagtatatttttatcatggaaaaatttcaactcctcaagccgtaatgttgaacagaattggagtattttctttataatttcttgaacaggcaaatgaaagcttattatagaatgcatgtattttcttttatctttggaacatcagcaccagtatattgctggcagctattgtattaaaaaataaagtatattttcactatcaaaaaaaaaaaaaaaaaaaaaaaaaaaa

SEQ ID NO: 288066 - DNA, 1000 bp, Homo Sapiens
atgaattgaatcgaaaaaacaaaccacaaaatatcaagatacaaaaaaagccagggaagtcagaacttcgcattaacaaagcatcactggctgattctggagagtatatgtgcaaagtgatcagcaaattaggaaatgacagtgcctctgccaatatcaccatcgtggaatcaaacgagatcatcactggtatgccagcctcaactgaaggagcatatgtgtcttcagagtctcccattagaatatcagtatccacagaaggagcaaatacttcttcatctacatctacatccaccactgggacaagccatcttgtaaaatgtgcggagaaggagaaaactttctgtgtgaatggaggggagtgcttcatggtgaaagacctttcaaacccctcgagatacttgtgcaagtgcccaaatgagtttactggtgatcgctgccaaaactacgtaatggccagcttctacagtacgtccactccctttctgtctctgcctgaataggagcatgctcagttggtgctgctttcttgttgctgcatctcccctcagattccacctagagctagatgtgtcttaccagatctaatattgactgcctctgcctgtcgcatgagaacattaacaaaagcaattgtattacttcctctgttcgcgactagttggctctgagatactaataggtgtgtgaggctccggatgtttctggaattgatattgaatgatgtgatacaaattgatagtcaatatcaagcagtgaaatatgataataaaggcatttcaaagtctcacttttattgataaaataaaaatcattctactgaacagtccatcttctttatacaatgaccacatcctgaaaagggtgttgctaagctgtaaccgatatgcacttgaaatgatggtaagttaattttgattcagaatgtgttatttgtcacaaataaacataataaaaggagttcagatgtttttcttcattaaccaaaaaaaaaaaaaaa

SEQ ID NO: 288067 - DNA, 1000 bp, Homo Sapiens
tccaaaaccaagaaaaggcggaggagctgtaccagaagagagtgctgaccataaccggcatctgcatcgccctccttgtggtcggcatcatgtgtgtggtggcctactgcaaaaccaagaaacagcggaaaaagctgcatgaccgtcttcggcagagccttcggtctgaacgaaacaatatgatgaacattgccaatgggcctcaccatcctaacccaccccccgagaatgtccagctggtgaatcaatacgtatctaaaaacgtcatctccagtgagcatattgttgagagagaagcagagacatccttttccaccagtcactatacttccacagcccatcactccactactgtcacccagactcctagccacagctggagcaacggacacactgaaagcatcctttccgaaagccactctgtaatcgtgatgtcatccgtagaaaacagtaggcacagcagcccaactgggggcccaagaggacgtcttaatggcacaggaggccctcgtgaatgtaacagcttcctcaggcatgccagagaaacccctgattcctaccgagactctcctcatagtgaaagacataaccttatagctgagctaaggagaaacaaggcacacagatccaaatgcatgcagatccagctatcagcaactcatcttagatcttcttccattccccatttgggcttcattctctaagaccccttggcctttaggaaggtatgtgtcagccatgaccaccccggctcgtatgtcacctgtagatttccacacgccaagctcccccaaatcgcccccttcggaaatgtctccacccgtgtccagcatgacggtgtccatgccttccatggcggtcagccccttcatggaagaagagagacctctacttctcgtgacaccaccaaggctgcgggagaagaagtttgaccatcaccctcagcagttcagctccttccaccacaaccccacgcgcccacgcgtccgcggacgcgtgg

SEQ ID NO: 288068 - DNA, 1000 bp, Homo Sapiens
tccgaaagccactctgtaatcgtgatgtcatccgtagaaaacagtaggcacagcagcccaactgggggcccaagaggacgtcttaatggcacaggaggccctcgtgaatgtaacagcttcctcaggcatgccagagaaacccctgattcctaccgagactctcctcatagtgaaaggtatgtgtcagccatgaccaccccggctcgtatgtcacctgtagatttccacacgccaagctcccccaaatcgcccccttcggaaatgtctccacccgtgtccagcatgacggtgtccatgccttccatggcggtcagccccttcatggaagaagagagacctctacttctcgtgacaccaccaaggctgcgggagaagaagtttgaccatcaccctcagcagttcagctccttccaccacaaccccgcgcatgacagtaacagcctccctgctagccccttgaggatagtggaggatgaggagtatgaaacgacccaagagtacgagccagcccaagagcctgttaagaaactcgccaatagccggcgggccaaaagaaccaagcccaatggccacattgctaacagattggaagtggacagcaacacaagctcccagagcagtaactcagagagtgaaacagaagatgaaagagtaggtgaagatacgcctttcctgggcatacagaaccccctggcagccagtcttgaggcaacacctgccttccgcctggctgacagcaggactaacccagcaggccgcttctcgacacaggaagaaatccaggccaggctgtctagtgtaattgctaaccaagaccctattgctgtataaaacctaaataaacacatagattcacctgtaaaactttattttatataataaagtattccaccttaaattaaacaatttattttattttagcagttctgcaaatagaaaacaggaaaaaaacttttataaattaaatatatgtatgtaaaaatgaaaaaaaaaaaaaaaa

SEQ ID NO: 288069 - DNA, 1000 bp, Homo Sapiens
ggggaaggtgcgggggctggccttcccgctctggatctggccaaagctcaaagggagcacggggtgctgggaggtaaactgaggcaacgactggggctacagctgctagaactgccacctgaggagtcattgccgctgggaccgctgcttggcgacacggccgtgatccaaggggacacggccctaatcacgcggccctggagccccgctcgtaggccagaggtcgatggagtccgcaaagccctgcaagacctggggctccgaattgtggaaataggagacgagaacgcgacgctggatggcactgacgttctcttcaccggccgggagtttttcgtaggcctctccaaatggaccaatcaccgaggagctgagatcgtggcggacacgttccgggacttcgccgtctccactgtgccagtctcgggtccctcccacctgcgcggtctctgcggcatggggggacctcgcactgttgtggcaggcagcagcgacgctgcccaaaaggctgtccgggcaatggcagtgctgacagatcacccatatgcctccctgaccctcccagatgacgcagctgctgactgcctctttcttcgtcctgggttgcctggtgtgccccctttcctcctgcaccgtggaggtggggatctgcccaacagccaggaggcactgcagaagctctctgatgtcaccctggtacctgtgtcctgctcagaactggagaaggctggcgccgggctcagctccctctgcttggtgctcagcacacgcccccacagctgagggcctggccttggggtactgctggccaggggtaggatagtataggaagtagaaggggaaggagggttagatagagaatgctgaataggcagtagttgggagagagcctcaatattgggggaggggagagtgtagggaaaaggatccactgggtgaatcctccctctcagaaccaataaaatagaattgaccttttaaaaaaaaaaaaaaaaaaaaa

SEQ ID NO: 288070 - DNA, 1000 bp, Homo Sapiens
ctgtcctccaagactccttaatgaggggcaggagtcccagggaaagagaaccatgccatgctgaaaaagacaaaattgaagaagaaatgtagcccccagccggtacccaccaaaggagagaagaagcaatagccgaggaacttggggggatggcgaatggttcctgcccgggcccaaggggtgcacagggcacctccatggctccattattaacacaactctagcaattatggaccataagcacttccctccagcccacaagtcacagcctggtgccgaggctctcctcaccagccacccagggagtcacctccctcagcctcccgcctgccccacacggaggctctggctgtcctctttctccactccatttgcttggctctttctacacctccctcttgggcatgggctgagggctggagcgagtccctcagaaattccaccaggctgtcagctgacctcttttgcctgctgctgtgaaggtatagcaccaccccaggtcctcctgcagtgcggcatccccttggcagctgccgtcagccaggccagccccagggagcttaaaacagacattccacagggcctgggcccctgggaggtgaggtgtggtgtgcggcttcacccagggcagaacaaggcagaatcgcaggaaacccgcttccccttcctgacagctcctgccaagccaaatgtgcttcctgcagctcacgcccaccagctactgaagggacccaaggcaccccctgaagccagcgatagagggtccctctctgctccccagcagctcctgcccccaaggcctgactgtatatactgtaaatgaaactttgtttgggtcaagcttccttctttctaacccccagactttggcctctgagtgaaatgtctctctttgccctgtggggcttctctccttgatgcttctttctttttttaaagacaacctgccattaccacatgactcaataaaccattgctcttcaaaaaaaaaaaaaaaaaa

SEQ ID NO: 288071 - DNA, 1000 bp, Homo Sapiens; identical to SEQ ID NO: 116921

SEQ ID NO: 288072 - DNA, 1000 bp, Homo Sapiens
ccgcaaggcactgagcaggcgaaagagcgcgctcggacctccttcccggcggcagctaccgagagtgcggagcgaccagcgtgcgctcggaggaaccagagaaactcagcaccccgcgggactgtccgtcgcaaaatccaacatgaaaatcctcgtggccttggcagtcttttttcttgtctccactcagctgtttgcagaagaaataggagccaatgatgatctgaattactggtccgactggtacgacagcgaccagatcaaggaggaactgccggagccctttgagcatcttctgcagagaatcgcccggagacccaagcctcagcagttctttggattaatgggcaaacgggatgctggacatggccagatctctcacaaaatggcttatgaaaggagtgcaatgcagaattatgaaagaagacgttaataaactacctaacattatttattcagcttcatttgtgtcaatgggcaatgacaggtaaattaagacatgcactatgaggaataattatttatttaataacaattgtttggggttgaaaattcaaaaagtgtttatttttcatattgtgccaatatgtattgtaaacatgtgttttaattccaatatgatgactcccttaaaatagaaataagtggttatttctcaacaaagcacagtgttaaatgaaattgtaaaacctgtcaatgatacagtccctaaagaaaaaaaatcattgctttgaagcagttgtgtcagctactgcggaaaaggaaggaaactcctgacagtcttgtgcttttcctatttgttttcatggtgaaaatgtactgagattttggtattacactgtatttgtatctctgaagcatgtttcatgttttgtgactatatagagatgtttttaaaagtttcaatgtgattctaatgtcttcatttcattgtatgatgtgttgtgatagctaacattttaaataaaagaaaaaatatcttgaaaaaaaaaaaaaaaaa

SEQ ID NO: 288073 - DNA, 1000 bp, Homo Sapiens
gtctgaaggacacttcctgcctaagggagagtggtatttgcagactagaattctagtgctgctgaagatgaatcaatgggaaatactactcctgtaattcctacctccctgcaaccaactacaaccaagctctctgcatctactcccaagtatggggttcaagagagtaatgggtttcatatttcttatcaccacagtaagttcctactaggcaaaatgagagggcagtgtttcctttttggtacttattactgctaagtatttcccagcacatgaaaccttattttttcccaaagccagaaccagatgagtaaaggagtaagaaccttgcctgaacatccttccttcccacccatcgctgtgtgttagttcccaacatcgaatgtgtacaacttaagttggtcctttacactcaggctttcactatttcctttataatgaggatgattattttcaaggccctcagcatatttgtatagttgcttgcctgatataaatgcaatattaatgcctttaaagtatgaatctatgccaaagatcacttgttgttttactaaagaaagattacttagaggaaataagaaaaatcatgtttgctctcccggttcttccagtggtttgagacactggtttacactttatgccggatgtgcttttctccaatatcagtgctcgagacacagtgaagcaaattaaaaaaaaaaaaaaaaaaaatccctgaatgatgattagagacatcaccgctaaaaaactacatttataagctaggatttgttatatgcaaatattttctgcctcttcttttgttctgtttaaaacaataaaatgcatttgtataaaaaaaaaaaaaaaaaaaaaaaaaaaaaaaaaaaaaaaaaaaaaaaaaaaaaaaaaaaaaaaaaaaaaaaaaaaaaaaaaaaaaaaaaaaaaaaaaaaaaaaaaaaaaaaaaaaaaaaaaaaaaaaaaaaaaaaaaaaaaaaaaaaaaaaaaaaaaaaaaaa

SEQ ID NO: 288074 - DNA, 1000 bp, Homo Sapiens; identical to SEQ ID NO: 222153

SEQ ID NO: 288075 - DNA, 1000 bp, Homo Sapiens; identical to SEQ ID NO: 222154

SEQ ID NO: 288076 - DNA, 1000 bp, Homo Sapiens
tttggatcactcattattacaaggtcatgctgaaattttattttgctcttgctatagatacttaggtaatgtggatttgttttggtagctatttcactgaaggaagtgctacttatataaaagctagaaataatgtgattcctaggatgagaaattggttaacagagctctgttgtctggttttagtctttctaaaggatattttaactaaaactatggagatgctaagagagtgactttctaaatatgaaacagataatttacggtacaaggctgacatagtgcccttgtcagtttctgtaagatgccactactgtcacaaggtgtttcagactcttgataaggcagtgttttgtattttagttctaacattgagtttggacaattttatctaattgtaattctctagggtgccagagataggtatttctcattggtttgctttcccaaatcctgtttggttaattgtagcctccatacagtggggtcttctctgtggctggtagacaccaagctgctgtgactgaccacggtaccacgggctgccacagcccctgctctgtcttagattatggtgctttacaaagagagtggtccatgaccacacttagtgagaaggagccacaagttgtggctgagagttccctgtgaacttgagtagttcatagagtgctaaggtgacactccaccaaccagagtgagagggcagataggcaggattctatgagtggttatacttaagggggacaaaactgcccaagaagaatcttgagaatacactctttcaaggtgggggagatactctttagagggtacactgagctaatactaccagttctttatgagcactggaatgtgtttgtaaaaggagtcctaagtttagcaaggtagtctacagaaccatgctcccacattatagataaagctgcttaaacttaaaagtccacaaagctacgccgaccaaaaaaaaaaaaaaaaaaaaaaaaaaaaaaaaaaaaaa

SEQ ID NO: 288077 - DNA, 1000 bp, Homo Sapiens
ggcagggcacaatgtctcctccagagagagatggtacagtctctggagcagcagctggtgctggagaaggagaagctgagtgccatgcaggcccacctggctgggaaaatggcactgaccaaggcttcatctgtggcatcatccgacaagggctcctgctgcatcgtagctgctggcagccaaggccctgtcgtcccagcctggtctggcccccgggaggcccctgacagcctgtttgctgtccggaggcacctgtggggtagccatggaaacagcacattcccagagttcctccacaacatggactacttcaagttccacaacatgcgaccccctttcacctacgccacgctcatccgctgggccatcctggaggctccagagaagcagcggacactcaatgagatctaccactggttcacacgcatgtttgccttcttcagaaaccatcctgccacctggaagaacgccatccgccacaacctgagtctgcacaagtgctttgtgcgggtggagagcgagaagggggctgtgtggaccgtggatgagctggagttccgcaagaaacggagccagaggcccagcaggtgttccaaccctacacctggcccctgacctcaagatcaaggaaaggaggatggacgaacaggggccaaactggtgggaggcagaggtggtgggggcagggatgataggccctggatgtgcccacagggaccaagaagtgaggtttccactgtcttgcctgccagggcccctgttcccccgctggcagccaccccctcccccatcatatcctttgccccaaggctgctcagaggggccccggtcctggccccagcccccacctccgccccagacacaccccccagtcgagccctgcagccaaacagagccttcacaaccagccacacagagcctgcctcagctgctcgcacagattacttcagggctggaaaagtcacacagacacacaaaatgtcacaatcctgtccctcac

SEQ ID NO: 288078 - DNA, 1000 bp, Homo Sapiens; identical to SEQ ID NO: 116923

SEQ ID NO: 288079 - DNA, 1000 bp, Homo Sapiens
ggaagatgcccatgactggtcagctacttcctcctatacattttggtttctttgagggtcactcattgagacacgcaggcctctgagagggtcttgttctagatttcatattgcacttggagggtaacagctgctttttcacgcatggtactcttgatgtttttcactctgtcaaggattttgttggctatcaatgaatgtgtctaaaacttagtgcttccaggtagttatagtactccaaatcaaggaccaacttaaacgttaatttttgtgcaaaaacaaacctgaaaaatatgcttcggaaactgtgcatagttctaattgtaagtcagattgtatattcaaattgtaattaagagatttaaatattagaacggtatgtaaggtagtataattaccactattttaaaacaattcagttaaacactgctgcaatatttcagtgttgtgcttgaaaatatgtacagtttttttccaatattaataccttatgttgtccttaaatatttctaaaagcgcctttatttcagcattacctttttttcatcactatcttttataaaacattaatataagtcgttacttttagaaactaaaggaaataatagctggaaaaccctctgtagtttaaaatcagtcattaaactcacaatagggtaagtaaatatagccacctgttaacatgtaaataagcataatttgttccaaagatggaatattgaaacttagttcatgtctgctgtaaaatattatttaaatgctgctgggcatttcacttaaagaacttaatgtcaacagctacaacaaagaccaaatctgaactgctaatgtggctgctttgtagggaatggactaatatcagtgtgttagatcttaaggtatcagtatttcagaatcctgcgacgattttatttctaaattcatgtactgtatgtccataagtgaaaataaaatgtcatattcttttctaaaaaaaaaaaaaaaaaaaaaaaaaaaaaaa

SEQ ID NO: 288080 - DNA, 1000 bp, Homo Sapiens
aacgtccacatccaccaggagtcagctttgacacaactgctgaaagctggaggttctctgaagaagtttctttttcaccctggggacactgtgccttccacagccaggattggttatgagcagctggctctaggggtgactcagatattgctgggggttgtgagttgtgttcttggagtgtgtctcagcttggggccctggactgtgctgcgtgcctcaggctgtgccttctgggcggggtctgtggtgatcgcagcaggagctggggccattgtccatgagaagcacccgggcaaacttgctggctatatatccagcctgctcaccctgacaggctttgctacagctatggctgctgttgtcctctgcgtgaatagcttcatctggcaaactgaaccctttttatacatcgacactgtgtgtgatcgctcagaccctgtcttccctaccactgggtacagatggatgcggcgaagtcaagagaaccaatggcagaaggaggagtgtagagcttacatgcagatgctgaggaagttgttcacagcaatccgtgccctgttcctggctgtctgtgtcttgaaggtcattgtgtccttggtttccttgggagtaggtcttcgaaacttgtgtggccagagctcccagcccctgaatgaggaaggatcagagaagaggctactgggggagaattcagtgcccccttcgccctctagggagcagacctccactgccattgtcctgtgagccgccaaagaccccacggggtgcccgcatgtccctgtctagggcagcccagggcccccactcctggctcctcacacttgcctcccctatggccgctctccagaccctcctcctttcttctccccacatccgcacctgctgttcccactctggggttctcaagtccatgaacagatattgttgcattttccacaatgctgattaaacataataaacaatccagaaaagcaaaaaaaaaaaaaaaaaaaaaaaaaaa

SEQ ID NO: 288081 - DNA, 1000 bp, Homo Sapiens
taaatgattagatacacaggacagttcacagcaaattgtttacttacatggcataattgaaatactgttatttgtaaagagttctatactgcctaccttagctaaccagaattgttcatagacttgtgataatatggtgttatgggaaaacacattttgtgcgcatgatgaagagagcaccgtgaatctagtcttgactgcccctggtggaacatttgaaagcccttgggactccaggagagatgtttttgcagcatgtatgctaaatttgtgagttagcaagaccctgctgtgattactatgttgtacagatcttcaaagtatattgcctaatatgagtcatgttatttctagattgaatttaaagtaagtatggattatggaagtctagtaaatatacttttccctatttttgtcctttttcagtcttttggtaagcatttattaagtacctgctgtatgtcaaggcttactactgctttccaatccttggtgatatgaagacagataagcacgctgcctgctattaggaatctgagctgagtggaaggccaactattaaacctacattgtaataaacaatggtggatgctacggacacattcagtctgttcataaaacatggactgatgggtctgctccaggccacatttgttttttaacagtaacgtggctaggcttccatttataagtcttagcattatttcctttgtgaagtactatgtaacagatgattgtttgctagattttgttttctacaatcaaaatgttgacctgcaaagcagtgtaggattttctctcctcaagagcgtgtattattatctagtagaaaaagcattcccaaagacttggtccatgcagataaggataatgaaattgctcactctaatcctttttctaaatacagtgtttttcaagctggatgtaaattagagtgggtggatattgattaaattatttgatttatatgaaaaaaaaaaaaaaaaaaaaaaaaaaaaaa

SEQ ID NO: 288082 - DNA, 1000 bp, Homo Sapiens; identical to SEQ ID NO: 222157

SEQ ID NO: 288083 - DNA, 1000 bp, Homo Sapiens
aatcattttcctacacgggaaggtgaatgaggcctctggggatggggatggagaggatgccgttgtgatcctggagaagacgccatttcaggtggaacaggtggctcagctcctgacgggcagccctgagctccaattgcagttctccaatgatatctacagcacctatcacttgttccctccaagacaactgaatgatgtaaagacgaccgtggtttaccctgccacagagaaacacctgcagaagtacctgcgccaggacctccgcctgatccgagagacgggagatgactacaggaatattactttaccccacctggagtcccagagcctcagcatccagtgggtgtataacattctcgacaagaaggctgaagcggaccggattgttttcgagaacccagatccctctgatggttttgtcctcatccctgacctcaagtggaaccaacagcagctcgatgacttgtacttgatcgccatctgccatcgccggggcatcagatccctacgcgaccttactccggagcacttgccgctgctcaggaacatcctccaccaggggcaggaggccatcctgcagcgctaccggatgaagggagaccatctgcgagtatacctgcactacctgccctcctactaccacctgcatgtgcacttcaccgccctgggcttcgaggcccccggctcaggcgtggagcgggcccacctgctggctgaggtgatcgagaacttggagtgtgaccctaggcactaccagcagcgcacgctcaccttcgccctcagggctgacgaccccctgctcaagctcttgcaggaggctcagcaaagctgaattaactcaggcagaagagcacagatgtgtgggattgggggaggagtggggacaagattttttatctccaagtgaattttctaaaaatgtattttataccggcttattcctagtattgaataaactagcgggctcaaaaaaaaaaaaaaaaaaaaaaaaaaaaaa

SEQ ID NO: 288084 - DNA, 1000 bp, Homo Sapiens; identical to SEQ ID NO: 222158

SEQ ID NO: 288085 - DNA, 1000 bp, Homo Sapiens
aggggcctgcaaggcatcactcccagcccctcgccttctagggcaccctcagcaaaggggcaggtggggacactccaagtggggcagctctccgtacatgcgccccacccccatgagccagttcagccctactgggggctgagcgggggcatcccctcctttgtacatagtctccatggatgtccctgccctgtagccaccagccccttgctgctctccctttaatgccatatggcccctgcctagggcacaggccccaacctgtgtgctggggtccccagcagcaaacactggaaagtctgttttttttttttctttcttcttccccaccccttaattttaactttgtggtaactgagtgcccccgcgtgcctgcgtgttgagtgtgtgggcggcagtgccgttccggaggcctggtccatctggagttttgaggggtgaggggaccagagcagtgggaccagcatggggatcagcttcccttccccacctggagccagggactgtccgggtagccagttttggtcctgccagctgcctccctgatccctccccactctcgccccttctctatgaacttaaatcaaaaaccacttccctccatctcctcctgctcctgcgtggagggggaatgtgtgctggctagggtggaggactgagcacctgagcctggggctggctccccggggtccccgactcagctggtggctgtggagctgagtcccctccccgtaacctctgcaaggccagcacccaccatcactacctgcacctgctgtggtcccaccctctggaggcctgggaacctggctgcagcctgggaaggctggagaggcagacggtgggacccaccagctctctccccatcccgcttcttccctgggggccaggccctacctgtgtggtggtgggtgggctgtcaagacgtgtcatgtacatttgtatcaaaaataaagaagtgaccatgaaaaaaaaaaaaaaaaaaaaaaaaaaaaaaaaa

SEQ ID NO: 288086 - DNA, 1000 bp, Homo Sapiens
gttggtcagcctggccaacatggcaaaaccctactaaagatacaaaaaaaaaaaaaaattagccgggcgtggtggtgggtgcctgtagtcccaggtacttggaaggctgaggcaggagaatctcttgaacccagaaggcgaaggttgcggtgagccgagatcatgccattgtactctagcctgggtgacaagagcaagactccgtctcaaaaaaaaaaaaaaaaaaaaaagaagtagagacagggagacggggtctcactgtgttgcctaggccggtcttgaactcctgggctcaagtgattctcccaccttgacctcctaaattgttgggattacaggtgtgagacagtgcacctggccgaaatagctcaagtttctgaaaaacaaatctgaatctatttgttattcttagcgtcactggtctggctttcagaattaacatacaaggttgccacacctagttctgcccagctttatgtctttattccagtattccaccaaagtttgttttcctgcattccagttctcaagtcttaagataaagattgtacttgacagtttagtatatccataaaactatttgaggtggttaaggttcttgggttcattttccttaatactttgctgaatattgtagattgtaggcaatgaaaaagtctactaaattaggaaaaccttgaataattaggtatcctaggtaagagcccctaaacatcaagcaatctgtgagtctgtaaagaaataaatattttttggattattcttatctaattccacccctgttggaagatgatttctttgttctttgcaactatggaagctgtgaaaatcatcacaagtgcctctgaaagcgagtgttaggttggttagagggtttaatattttctgcaatggtttgtaggaattttaataaatgtagtatattttctgagatgattttgtaaaagtactattttaaatatcaaatcaaccaataaattcacatttgtgttaggaacag

SEQ ID NO: 288087 - DNA, 1000 bp, Homo Sapiens
agttcatgagatgttggacagcatttggtttgtttggtaagagaagaacaaatatggctaattgttaataaggtcccctggctatggtttttgttcttataacagagtttagaatatcagagcatttcttgaatcatacatcattattgtccagtgaattcaagaccgaatacaatatcgggagaaaatacaaactccctgtgtttaagaataggggattataatggctcaaattggttcatttgatttctaaaaataccatgacctttaaaaattcttttaatagatcatgttattggcagtatttatataaaaaccatggatttagaaaggtatatttagctttattataatagatacgttactattttggaaatatatatattttcacacctgtagtactcttccccatttcctctgacactcatgcagaatgagatcaggcatatttgtggttgacatactctagatagcttttccaacaaatctttgaaaagcaatcttggaaaggaattcattaactaaatggggtaaaaggtttctttttctttgagagttaagtccttcctcaaaaaattttcttatgctccataaaattgaggtagaatactttcattattcttgcagctaagcaagacagccatatgatgcaggttatgcagtgccttcatatctaaaacttttatactgcactttttaaagcttttatgttgaggaaaggaaaagggcatttgtctaaacatggattctgagttgtatatatttcctatcattctaaaaaagtgaatttgtgaagcaaagttttgccagatgttaaactttgaatttaatataccagattattaaaatattgtccattaactagttcatagattttaaaagtaaaatacttctgactgttaaaactatataaagaaaatctcatttgtctaattgcaattaaaagaaaaatgttaaaatattaaaatgaaaataaaagcattactttccaaaaaaaaaa

SEQ ID NO: 288088 - DNA, 1000 bp, Homo Sapiens; identical to SEQ ID NO: 116927

SEQ ID NO: 288089 - DNA, 1000 bp, Homo Sapiens
gacggcgaacacttcacgggcgcgcgatgcctcgacaaggcggccgccaccaccacctcagctgccctcgcgggcagcacggcgcggcaaaagcgcacgtcgcctagcgatggcgcggggcggggacacgggctgtaccggcccgtcggagacttccgcttccggggccgccgccatcgctctcccgggcttagaaggcccggctactgacgcgcagtgccagaccttacccctcacggtccttaagtctcggtcgccctcgcctcgcagcctgccacccgcgctcagctgcccgcctcctcagccagccatgctggagcatctgagctcgctgcccacgcagatggattacaagggccagaagctagctgaacagatgtttcagggaattattcttttttctgcaatagttggatttatctacgggtacgtggctgaacagttcgggtggactgtctatatagttatggccggatttgctttttcatgtttgctgacacttcctccatggcccatctatcgccggcatcctctcaagtggttacctgttcaagaatcaagcacagacgacaagaaaccaggggaaagaaaaattaagaggcatgctaaaaataattgaggttttcatgattcagcacctgcttttgtttctgtgagatgagctaaattgctttcataccccagataagagctaaaaccacctaatgctcttatggcacagctgtgtatagatttagttctctttatacttcatttctagcccagttgggttttgatttatataagtagtttagaccttctcttcataatcttgctctgagatggggaacagaacacacaagtatgaagtttctttcaggtgtaaataatgaaaaataaatgcctcataaatgatagtacaatgtaactatcaaagttttataattcattatgagttaaccattttaatgtttccaattaaacctcatagtgcaagttctttgtctaaagggtcttctgt

SEQ ID NO: 288090 - DNA, 1000 bp, Homo Sapiens; identical to SEQ ID NO: 116928

SEQ ID NO: 288091 - DNA, 1000 bp, Homo Sapiens
taccgagtacttcagtgaattccttagtgcaggggaacggagtcttgaattccagggatgcggcaagacacacagccggagcgaaacgctacaaatatctgagaaggcttttccgctttcggcaaatggactttgaatttgctgcctggcagatgctctacctgttcacatccccacagagagtttacagaaattttcattatcgaaaacagacgaaggaccagtgggccagagatgaccctgctttcttggtcctgttaagtatctggctctgtgtgtccactataggatttggctttgtgctggacatgggattctttgagacaataaagcttctcctttgggttgtactcatagattgtgtaggcgttggtcttctgatagcaactttaatgtggttcatctctaacaagtatttagtgaaacgacagagcagagactatgatgtggaatggggctatgcttttgatgtgcatctcaatgctttttatccactcctggtcattttgcattttatccagctttttttcatcaaccatgttatcctgacagacacatttattggatatttagttggaaataccttatggttggttgcagttggctattatatctatgtaactttcctgggatacagtgcattgccatttttgaaaaatacagtaattcttctgtatccatttgcacctctgattctgctctacgggctttccctggcactgggatggaacttcacccatactctctgttctttctataagtacagagtgaaataaaaagtgagaagaagattcaatcgtaactgtgtcaacagtattgtgaagtgatcatttcttgtaaaacttgtaaataaactatcatctttgtagatatcttaaaggtgtaaagtttgcaaatttgaagaaatatatattaacactgtggtcaggtacattccttaaaactaattaaatgtacatttctataataaatattttttaaactaaaaaaaaaaaaaaaa

SEQ ID NO: 288092 - DNA, 1000 bp, Homo Sapiens; identical to SEQ ID NO: 116930

SEQ ID NO: 288093 - DNA, 1000 bp, Homo Sapiens; identical to SEQ ID NO: 116931

SEQ ID NO: 288094 - DNA, 1000 bp, Homo Sapiens
gtgatttaagtatttttaatcatcagccaagcattgttagtagtataaatatgattaataaaaatgtgcatggctttcctgaaggagattttttaattgcctttgagaataaactcataaggtctaccaagaaaataaatgttatgatgtttcagttggcttctaggaaataattaaattagtgatattttaatcaggttttactatctgctaggccccttccatcaattcttattaaattctcaaaataatcctttgaaaagggagtataattacattttacagtgactcgaaccttacccaaacaagtgggagagccaggagccaaactatcaggctccaaagcttttttttagtgcatcacaatgacaaaggggtggttttctttcacccaagaatgtgctttcctggaaatttttctagatagaatattatgtaatttgttttgaaggttttttttcctgactgtcttaaagattatgctagctttagaacacatgcaaacagctgcagctctgtgattaaaatgttaaggtcactagaatagtgttaggaaaatgttaatagataattctgctgcctctattagcttatgtatgatccttaatagcattgcttccccttcagtttctatttaggaggtgaagaatcttttaataaggtagaaagttgctttatttaaatttgtactgtagaatgtttgtgatacagtatttgtaaaattgatatgaaaaataatttctcaaagtctattgtttgatctagttattttaataaaggaactctagaagtttcaagtggccagtgaagtgtgaggaatagagagtaaaggaaataattaataatggtgaccctctgttaagtggtttactttttccattaatataaatttcatttggaaagattaaaaaaacaagtttgattgaacttgataaatcagaaatatttaaaaaaaaaaaaaaaaaaaaaaaaaaaaaaaaaaaaaaaaaaaaaaaaaaaa

SEQ ID NO: 288095 - DNA, 1000 bp, Homo Sapiens; identical to SEQ ID NO: 222163

SEQ ID NO: 288096 - DNA, 1000 bp, Homo Sapiens
cgagcactgcccaagcacaaaagccttcagtgccccggagcaattttcagggcaccaagaaaagtctcctgatgtctatattagcgctcatcttcatcatgggcaacagcgccaaggaagctctggtctggaaagtgctggggaagttaggaatgcagcctggacgtcagcacagcatctttggagatccgaagaagatcgtcacagaagagtttgtgcgcagagggtacctgatttataaaccggtgccccgtagcagtccggtggagtatgagttcttctgggggccccgagcacacgtggaatcgagcaaactgaaagtcatgcattttgtggcaagggttcgtaaccgatgctctaaagactggccttgtaattatgactgggattcggacgatgatgcagaggttgaggctatcctcaattcaggtgctaggggttattccgccccttaagtagatctgaggcagacccttgggggtgtaaaagagagtcacaggtaccccaaggagtagatgccagggtcctaagttgaaaatgatgtcgattgggggcgggggacactgtatttgatatttgtgatcagtgatcattgttcaactgcgaaatagagtgtttgcttttgataatggaaaattgtattcgttttaaaattccgtttgttgagaataacaatatgtttaaaaatataattgaacaaatttttttctttgtttcctgtcattgacatttagtataacagttttgctaacgttctaaaatgaagtcgttccatcataatctatgatcttgtacagcacttatagaaataagctgttcttttgaagttgaaatacccagtaaaatgttgaagaaggatggaggatttcttcatatctgacgtttctgaaaccctttgtgtctgctgttgtgtgaagattgacatttaccatgattttccttagttactgcagaacatagagaaaaataaaagcctaacgaatagtaaaaaaaaaaaaaa

SEQ ID NO: 288097 - DNA, 1000 bp, Homo Sapiens; identical to SEQ ID NO: 116932

SEQ ID NO: 288098 - DNA, 1000 bp, Homo Sapiens
gattaataaaaatatcagaacctcaatcattgatgcagtagaactggccaaggatcattctgacttaagcagattgactgagctctccttgaggaggcggcagatgcttctgttagaaaccctgaaggtgaaacagaccattctggagccaatccctacttcactgaagttgcccattgctgtcagttgctactggttgcagcacaccgagaccaaagcaaagctacatcatctacaatccttactgctcacaatgctagtggggcccttgattgccataatcaacagccctggtaaggaagagctgcaggaagatggtgctaagatgttgtatgcagagttccaaagagtgaaggcgcagacacggctgggcacaagactggacttagacacagctcacatcttctgtcagtggcagtcctgtctccagatggggatgtatctcaaccagctgctgtccactcctctcccagagccagacctaactcgactgtacagtggaagcctggtgcacggactatgccagcaactgctagcatcgacctctgtagaaagtctcctgagcatatgtcctgaggctaagcaactttatgaatatctattcaatgccacaaggtcatatgcccccgctgaaatattcctaccaaaaggtagatcaaattcaaaaaaaaaaaggcagaagaaacagaataccagctgttctaagaacagagggagaaccactgcacacaccaagtgttggtatgagggaaacaaccggtttgggttgttaatggttgaaaacttagaggaacatagtgaggcctccaacattgaataaaactcagtttgcatcaaactagatgtatttaatataatccttacttaaaattcttccgttaccacccttgaaacaattagctttttctttaggactgacctgttaggggataaacatcacaataatctgaattccaagttattttgtattttgtttttaataaatacaacctgatttaag

SEQ ID NO: 288099 - DNA, 1000 bp, Homo Sapiens
cctctggctgagaatctcctcagagcccagtgcagaagctgtgatgcttagaacctggacagcccgactgcctcaactctgtctccaggtctattccctccagctccaaaaggagcagccctacttctaccccttcccgtccccaaagtgtcagcaactttgaggagggcaccaggaaacaaagatgcctccccagccctgatattcttgatgtcaccagtgatacccactgccctgacccctgggcaggcccctctctgcatctactggagtggtccctgggctctggggctgaaggattccagcctctctgccagatattcagtactcgatctcaattcccctcttccacaagagttgggtgaccagctgtcctagtttgcccaggactctccctgttttagcactgaaagtctcttgccccaggaaaccccatcagtcccaggcagattgggacagctggtcaccttacgcaagagccaggctgaaacatcccctccatactcagctctttaacttttcttttcctttttcatcgggctctttcctaaaaagctgagctgtaaaatattttacatcgaggtataataaataatcatgtacatgttttaccaccacccaggtcaagacatagaatgtttcaacatttccatcaccccagaaactccccttgtacccccttccacttcgtctcccctagctcctagaagcaaccactgatgtgatttctaccaaatccagttttggtcctactaaatatactcttttgagactggcctcttttactcaccataatgcctttgtaattcatccatgctgttgtgtgtatcagcagtttgttccttttcattgctgagtagtattctattgtagagatgtaccacagtttgtttattcttctgttgatggacgtttgggttgtttctaattttgaatgattataaataaaaattctgtgagtgttcttgtaaaaaaaaaaaaaaaaaaaaaaaaaaaaaaa

SEQ ID NO: 288100 - DNA, 1000 bp, Homo Sapiens; identical to SEQ ID NO: 222165

SEQ ID NO: 288101 - DNA, 1000 bp, Homo Sapiens
gctctcagataatacatatttctgatgaaaatgaaggaaaagaaatgtgtgttctgcgaatgactcgagctagacgttcccaggtagaacagcagcagctcatcactgttgaaaaggctttggcaattctttctcagcctacaccctcacttgttgtggatcatgagcgattaaaaaatcttttgaagactgttgttaaaaaaagtcaaaactacaacatatttcagttggaaaatttgtatgcagtaatcagccaatgtatttatcggcatcgcaaggaccatgataaaacatcacttattcagaaaatggagcaagaggtagaaaacttcagttgttccagatgatgatgtcatggtatcgagtattctttatattcagttcctatttaagtcatttttgtcatgtccgcctaattgatgtagtatgaaaccctgcatctttaaggaaaagattaaaatagtaaaataaaagtatttaaactttcctgatatttatgtacatattaagataaatgtcatgtgtaagataactgataaatattggaactttgctagaacaagaccctgtagtaatagtaataatagttgaagtttggccaactcttaataaagttattttggtaactaatgttttatggcacttaagaataattagcagcgttaaattttgtttgtattaagcacttttaattttatccttcctaaaaatagtttattgtatctgacaagaaacttacttaaccattgtgtccttcccatcttttttgtcatctttgttttcttcaaatgccctcctcccatctgccttgagattcccttgtcttcacttaaaagccagagtgcaagtcatgatttgcgggagggctcttgaaccacttctggctgcaccacaattctgtacttgagtatcacagtcattgtttttgagacaaacatttttataattctaatttgggttaataaagattttaaatatttaaaaaaaaaaaaaaaaaaaa

SEQ ID NO: 288102 - DNA, 1000 bp, Homo Sapiens
aatgtgaaattcaagagtaatccacacgtgagaaactagacaatgtacattcatgtgttctcttgaaaggaaagggagagctgtaagcttcactctgtcctacaccggagaaaagcaggaataactttaccgtggaaataatgtttagcttttatcagagaaaattgtccttctagagcatagagtcccaaaactcaattctggttttcccctgttttttttttttttttttttcccaacatatgaactgcagcatatcactttttctttttgtgcctcaggttcctcacctgtaaaattgaaaaatatatgtattaataatattattaataataataatggtaatgtagtacttgtttgtaaagcactttgagatccttggttgaaaggcaccataggagtgccaagtattattatgtggccaagggggttatttaaactgtcagttcccaaaggccaggaaaggttggggtcatttttcttaaagacgagctgtaaatatcaactaggcagccaatagtgttgactatgaagatgcaaaactattactaggctgataaaatcatagtttcttaatggctaccaataaggcaaatatcacaataataaacgccaaattccttagggcggactatttgacaaccacatggaaaactttgggggaggcatgaggggggaacatctcaaaatgccaatgtaaaatttaacttacagcaatattcaccagcagaaaatgtctttcatatggaatgatttcatgttgctaagaaaaagaattcaatttgtagtcctgatttgaatactagaatgttggctataatagttctgttcttacaacacatgaaattttttcgttttattttattttgttttcatagtgcatgttcatttctactcacaaacatgttcttggtgtatttcttatgcaaacaatcttcaggcagcaaagatgtctgttacatctaaacttgaataataaagttttaccaccagttacaca

SEQ ID NO: 288103 - DNA, 1000 bp, Homo Sapiens
cctggggagagtaacagggccccacatccctcctcctgggagacgctggtgcagggcctcagtggcttgactctcagcctaggcaccaaccagcccgggcctctgcctgaagcggcactccagccacaggagacagaggagaagcgccagcgagagaggcagcaggagagcaaaataatgtttcagaggctgctcaagcagtggttagaggaaaactgagacgtgcacccccatgggatggagacccgaagggactcagacggagccgccgtgttggcagcgcctgggtgtgggcccattttggggaccaaacagcaagctgtggtcggatgagtgccaggacctgtgtaccgggacacgtgggagtcctcccagcatgatgcttgactgacccgaggaaggtcctcatgtttcgtgcctgtcattctcggatggctgtgaggcattccttggcaagggatgctgcgtaccagcggtcctcaccgcatctcacatggctcctgtgatgcatgttgtcgctttcccaccccgggatctccatctctcttcccttcctgctgtcagtaaagagatcacatgtctgtgtagtgtgaatgccttgtcgctgtcctgtgcttttgcaccattgagttgactgcctctgagaagcagcactaggcctgttgaaatgcaatgtgctgccctgagatccagtttcaagaatgggcaggtaaacgcagtgtgggaaaggaatgtggaatgagaacttggtggttcaccgctgtactatttgtgtaaatgtttacgtatgtgataagctacatgtatgtaaatgttgcaatacccctaacagtcgagtagtagtctcccttacaggaatttttgacggggttcctcatcatcaataccaaataaatatatgtaggaatggaaaaaaaaaaaaaaaaaaaaaaaaaaaaaaaaaaaaaaaaaaaaaaaaaaaaaaaaaaaaaaaaaaaaaaaaaaaaaaaaaaaaaaaaaa

SEQ ID NO: 288104 - DNA, 1000 bp, Homo Sapiens
acttgtctagctttggggtggccaagggcaaggtccactgtgactgagccctcacctccacgcctacctcatagcttcacagccttgccctcagcctctgagctccaggggtcagcagcttagtgtatcaacagggagtggattcaccaaattagccattccattttcttttctggctaaataaatgatatttcaatttcattttaaatgatacttacagagatataagataaggctacttgacaaccagcggtactattttaataaggaagaagacaccaggaaggactgtaaaaggacattccaattttaggattggaatagttcaagccgggcgcagtggctcatgcctggaatcccagcactttgagaggccaaggcaggtggatcacgaggtcaagagatcgagaccatcctggccaaccatgatgaaactccgtctctactaaaatacaaaaattagctgggcatggttgcgtgcgcctgtagtcccagctacttgggaggctgaggcaggagaatcgcttaaacctgggagacggaggttgcagtgagccaagatcgtgtcactgcactccagcctggtgacagagtgagactctgtttcaaaaaagaaaagaaaagaaacatggttcaaattatatctaaacaaaaaagaataagaaacaaaaaacacattaaaattttaagttgtattttctatgtttctagatacatcatttttgtttgatattttcctgatgcaagtatgtggtttatcacatgtagctcttttgcatgctaaatgaaaattcaagacttgccaataaatgaatagcttattgcagacattttttaccaacattaattattttgggtttgtttaaaacctagaggcacaatcttgacttgtcaattactaccctttcacaagctaccatctcagatatatatatatatataaattcaataaagctttctgtttgtgttccataaaaaaaaaaaaaaaaaaaaaaaaaaa

SEQ ID NO: 288105 - DNA, 1000 bp, Homo Sapiens
gttctacggatgccggaaggagggtgcgcgcccatccttttagcaccgcgagaggcgccggtgtttcgagccgtggcaccggcatcggctgacactgctgcctccagctagttatttcgtcctcttccgttcttcacccctacaccttggaggtgaacttctcacctgagggctgtaaagactcgtttgaaaatggagagccaagaaccaacggaatcttctcagaatggcaaacagtatatcatttcagaggagttaatttcagaaggaaaatgggtcaagcttgaaaaaacaacgtacatggatcctactggtaaaactagaacttgggaatcagtgaaacgtacaaccaggaaagagcagactgcggatggtgtcgcggtcatccccgtgctgcagagaacacttcactatgagtgtatcgttctggtgaaacagttccgaccaccaatggggggctactgcatagagttccctgcaggtctcatagatgatggtgaaaccccagaagcagctgctctccgggagcttgaagaagaaactggctacaaaggggacattgccgaatgttctccagcggtctgtatggacccaggcttgtcaaactgtactatacacatcgtgacagtcaccattaacggagatgatgccgaaaacgcaaggccgaagccaaagccaggggatggagagtttgtggaagtcatttctttacccaagaatgacctgctgcagagacttgatgctctggtagctgaagaacatctcacagtggacgccagggtctattcctacgctctagcactgaaacatgcaaatgcaaagccatttgaagtgcccttcttgaaattttaagcccaaatatgacactggccatttttgtaaacgagaccaccaggccttcttcactaagactttgtattcaacttagtttaatgtagatttgccattagctttttcgtaaaataaaagcacagaacagaaaaaaaaaaaaaaaaaaaaa

SEQ ID NO: 288106 - DNA, 918 bp, Homo Sapiens
ggggggagaggtagagatgagacaagaggtagaggggagaggtagaggtagccacgagctgataattacagacaagagatgcggagtatgtgggggctcattatcctgcatagtctatctttgtatatctttgaacttttcaagaataaaaaagcttaaaaagtatacatggcctggtcctaccagagactcacccaatgccagcctccagccagggagagccaagtttgcattttcacacgcatctcacactcctctgcactctcaacttggagagctccaaacagggaaaccccaagccttgctggcttctgccaaccccctgagcagaagcatgggtccccctgatcaccacctcaccaccctcatcctgatctcactgtacactccctttcctggtctgctaagtagcgggtgttttccttgacactaacgctacagctagaccacggtgggcttggcaacaggtgtcttcccagatgctggcgttaccgctagaccaaggagccctctggtggccccgtccgggcataacagaaagctcgcactcttgtcttctggtcactcctcactgtccccttcagcctcctatctctgtatggcctggtgtttcctaggttatgattgtagagcgaggattattataatattggaataaagaataattactacaaactaatgattaatgattcatatataatcatatctaagatctatatctagtataactattcttattttatatattttattatactggaacagctcgtgccctcggtctcttgcctcggcacctgggtggcttgctgcccacatccaccaagtgcactttgggaggctgaggctggaggactgctggaggccaggagttcaataccagcctgggcaacatagggagaccccccccccaccatctcc

SEQ ID NO: 288107 - DNA, 1000 bp, Homo Sapiens; identical to SEQ ID NO: 116935

SEQ ID NO: 288108 - DNA, 1000 bp, Homo Sapiens
accgaggacgaccagtactgctggcagcaccgcttcccaacaggctatttcagtatttgtgataggtatatgaatggcacctgcccagaaggaaacagctgtaaatttgcacatggaaatgccgaacttcatgaatgggaagaaagaagagatgccctaaagatgaagctcaacaaagcacgaaaagatcacttaattggcccaaatgataatgactttggaaaatatagttttttgtttaaagatttaaactaatatgctggcttttatgtatgatacctaatcagagcattgaccagaaaaattgaaagtgttctgaggcacatagcagaggagctgcagatttcctgcttgtattggcgtatatcgttcctcctgagcagcaacccacagtaggtaggaaaatgggctgtttcacaggcctggccacgctctcacggaaccactggcatcagatggtgaagtgactgctacccggttgccatctgttgaacagacttttggatgaagtgtgttggggaagaggataaggttatatctaggacaactctttgagttggtccttcatataagaatcgtgacggtaagagaataaacacttgtactgggatcagaatacatgatggatgaaattctttacatgttttagcagaatgaatttgtttaatataataaagtttgctacttatctgtatgtaggttgctaaaaaggattttcttaactcagattttaagccaaataaccatttaacactagtatttgttaaatggggtatttttctgtatttgtatgtttcactataataagggaattaaggataatgtgcattgagaatattttgaaaaataattgactcaaattttatttcttggtcttttgctgtttaaatgatgattttgaaagattaaacctgtactgttggtattgtgttagtgtatggaccaatactgcctgtaataaagattttatatatagatgcctttcaaaaaaaaaaaaaaa

SEQ ID NO: 288109 - DNA, 1000 bp, Homo Sapiens; identical to SEQ ID NO: 222169

SEQ ID NO: 288110 - DNA, 1000 bp, Homo Sapiens; identical to SEQ ID NO: 116936

SEQ ID NO: 288111 - DNA, 1000 bp, Homo Sapiens; identical to SEQ ID NO: 116937

SEQ ID NO: 288112 - DNA, 1000 bp, Homo Sapiens
gcgcgtggtgaaggggtttccactgtcgggtacaggaataagaatgtgagacagaagacatggcggcctaaccacccgcaagccttcgtggggagcgttcgcgagggacaaggctttgcttttcgaagaaaactgaaaatacagcaaagttacaagaaattgctacggaaggaaaagaaggctcaaacgtcactggaatctcaattcacagatcgatacccagataatctgaaacatctctatttagctgaagaggaaagacataggaagcaagcaagaaaagtcgaccatcctttgtcagaacaagttcaccagccgttgcttgaagaacagtgtagcattgacgagcctttatttgaagatcagtgtagctttgaccagcctcagccagaagaacaatgtattaaaacagtaaactcctttacaatttcaaagaaaaataaaaagaaaacatcaaatcaaaaagcacaagaagaatatgaacagatacaagccaaacgtgctgctaagaaacaagaattcgagaggagaaaacaggagagagaagaagcccaaaggcagtacaaaaagaagaaaatggaagtgtttaaaatactgaacaaaaagactaaaaagggccaaccaaacttgaatgtacaaatggagtaccttcttcaaaaaatacaagaaaaatgttaaacattttgttcctacaggttaaaatatctgctgcctattaggttcttctgtgacatgtgcctcccagcagtgaactaaatttgtcgacataaactggattgctaaactatgctaaatataagatgttcacatatttttattatggtaaaaaattttctaaatatgttctacatgtttcttatttatttgcctctgaaggaaggttggcctgaagaactgaaagaacctcttattttgcaagacaggcccaagcatgtaatacttttgtaccatatgagatttatatgaaataaattttttaaaaataaggaaaaaaaaaaaa

SEQ ID NO: 288113 - DNA, 963 bp, Homo Sapiens; identical to SEQ ID NO: 222173

SEQ ID NO: 288114 - DNA, 1000 bp, Homo Sapiens
cggctccaagaaaccggagagaagaccaagaggtcggagaagaggtagaaaatgtggcagaggccataaaggagaaaggcaaagaggaacccggccccgcttgggctttgagggaggccagactccattttacatccgaatcccaaaatacgggtttaacgaaggacatagtttcagacgccagtataagcctttgagtctcaatagactgcagtatcttattgatttgggtcgtgttgatcctagtcaacctattgacttaacccagcttgtcaatgggagaggtgtgaccatccagccacttaaaagggattatggtgtccagctggttgaggagggtgctgacacctttacggcaaaagttaatattgaagtacagttggcttcagaactagctattgctgccattgaaaaaaatggtggtgttgttactacagccttctatgatccaagaagtctggacattgtatgcaaacctgttccattctttcttcgtggacaacccattccaaaaagaatgcttccaccagaagaactggtaccatattacactgatgcaaagaaccgtgggtacctggcggatcctgccaaatttcctgaagcacgacttgaactcgccaggaagtatggttatatcttacctgatatcactaaagatgaactcttcaaaatgctctgtactaggaaggatccaaggcagattttctttggtcttgctccaggatgggtggtgaatatggccgataagaaaatcctaaaacctacagatgaaaatctccttaagtattatacctcatgaattcccgtccaaggaagcagagttgttaaagagtactggaataggggctgaaggatctatattcccttattgcattttccttatgtataattttccagatggtgatgttacttttcagtgtactcatatgtctcattttcatctaaaattaaatggcaggaaacaaggactgcatagagaaaaaaaaaaaaaaaaaaaaaa

SEQ ID NO: 288115 - DNA, 1000 bp, Homo Sapiens
aagaaaacgctgcgacctagatgtattcttggagtcacccagaaaaccatctggacgcagggaccgagcccccgaaaagcaaaggaggatggcagcaaacaagtgtctgtgcacaggagtcagagagggggaaccgccgtcccaacatcacaaaaagtgaaagaagccggaagagattttacctatttaatagtggtgctttttggaatcagcattacaggtggcttgttttacacgattttcaaagaacttttttcttcatccagtcctagcaagatatatgggagagccttagaaaaatgcagatcacatcctgaggtgatcggtgtctttggtgagtctgttaaaggctatggggaggtgacaaggcggggtcgccggcagcatgtcaggttcactgaatatgtaaaagatgggctgaaacacacgtgtgtgaaattctacattgagggctctgagccagggaagcaaggaacggtgtatgcgcaagtgaaagagaacccaggaagtggtgaatatgattttcgatatatatttgtagaaattgaatcttatcctagaagaactattatcattgaagataatcgatcccaagatgattaataatcaagcaagcaggtttctgatggatgttgaatggcgtggactcgctactccgttcttcacagctgccttccagaatgtgttcaaaagaaagacaagaaggagtgtatggcttataaagtgaatctaatacagtatttgttgcatttaaacaaactagacattttcttacggaaaaattatgaaatacagcatattttatgttctcccattgactcaatcatgacaatatttctgctttaacaccatctttcgtgattagaaatgtttgttattggaaatgttacaccatgtaaataaaggaaatagattttagtattgtattcattttatattatagaactgcataatgtctgcagaataaaattaaaactaacaaataaaaaaaaaaaaaaaa

SEQ ID NO: 288116 - DNA, 1000 bp, Homo Sapiens
cgccaggttaatggtatcgatcctaatggggattcggcagagtttgatttgttgtttgaaaatgcttttgaccagtgggtagccagcacagcgtcagaaaaatgcaccttcttccagatcctccaccatacctgccagaggtacctcacggacaggaagccagagtttattaactgccaatccaaaattatgggaggaaacagcatcctccattcagctgctgacagcgtgaccagcgcagtgcagaaggcaagccaggccttgaatgagcgtggagagcgattaggccgagcagaggagaagacagaagacctgaagaacagcgcccagcagtttgcagaaactgcgcacaagcttgccatgaagcacaaatgttgagaaactgcctatcctggtgactcttcttaagagaaactgaagagtttgttcagcagtttttacaagaattcgggacctccgcttgcttctttttttccaatatttggacacttagagtggtttttgttttttcttttcagatgttaatgtgaaagaaagggtgttgcatttttacatttccctaatgatcttgctaataaatgctacaatagcatcggcttcattttgggtttttgcctcctcccactgtgtgtatgtgtgtatatgtatgttttgaatatgttttctttattaaaaaatattttttgtagtttgaatatgaaatttggaccaaatgataaactgcgctgagtctaaactggcaacatgtatttttttctctgatattaagcaggaaggcattttaatgtggtgacatcagatgttatttttcctagatgaaaataaaagtcaagcagtgattagtttcactcactgtcctagctacacttaatttgaagattaaaattctacattgtggaaaacaattgaatttattgggaaaaacagcagtcttagattttgctccttgcatagtaatcttttgcatgaaccatcaccagcgttcaaaaaaaaaaaaaaa

SEQ ID NO: 288117 - DNA, 652 bp, Homo Sapiens; identical to SEQ ID NO: 116942

SEQ ID NO: 288118 - DNA, 1000 bp, Homo Sapiens; identical to SEQ ID NO: 116945

SEQ ID NO: 288119 - DNA, 1000 bp, Homo Sapiens; identical to SEQ ID NO: 116946

SEQ ID NO: 288120 - DNA, 1000 bp, Homo Sapiens
acagcagcaacagcagtgacagcagcgatagcagtgacagcagcgatagcagtgacagcagtgacagcagcaatagcagtgacagcagtgacagcagcgacagcagtgatagcagtgacagcagtggcagcagcgacagcagtgatagcagtgacagcagtgatagcagcgatagcagtgacagcagcgacagcagtgacagcagtgacagcagtgaaagcagcgacagcagcgatagcagcgacagcagtgacagcagcgacagcagtgacagcagcgatagcagcgacagcagcgacagcagcgatagcagtgacagcagcaatagcagtgatagcagcgacagcagtgatagcagtgacagcagcgacagcagcgatagcagcgacagcagtgatagtagtgatagcagtgacagcagtgacagcagcgacagcagtgacagcagcgacagcagtgacagcagcgacagcagtgacagcaatgaaagcagcgacagcagtgacagcagcgatagcagtgacagcagcaacagcagtgacagcagcgacagcagtgatagcagtgacagcacatctgacagcaatgatgagagtgacagccagagcaagtctggtaacggtaacaacaatggaagtgacagtgacagtgacagtgaaggcagtgacagtaaccactcaaccagtgatgattagaacaaaagaaaaacccataagattccttttgtgaaaagtttggtaatgggataggaaaaaaagatttccaagaaagtaaagaaaggggagaaataaacataagacgtatgtaaacaaaaacaactgggggaatcaaatcaaacagttggattcagaaccaagacctaactcctgcagagacagactctgaatgcatgacctttggtacatgcctgttaatattcatgttctgaaaatattttgttaaaagtgtaaatctaaacataaaagaacaattaaaatattctttaatacttcacacagaa

SEQ ID NO: 288121 - DNA, 1000 bp, Homo Sapiens
ctaactcgtcttctttccgccggtggaaaactggactgtggccagggctggcccccaccgctgtggccggcactccattccggaacctcctggaccctctatctgactctcgctgtgggacagggaccgggcctggaaagggggtgaagggaagtgtctgatgcacggcgagtgaacaccgttggcgccgaggccaagactttgatttaaaagaaaacacacctcggcgacaatgtcttgctgctcggattaggtgggggaggggcgacagtagtgagcgcctgagccgaacaatcctcgaactaaaagccttcccttgcccatgtgaaaagatccgctaagacagcatgtctgccagcggaaacttctcgagctcccccctctaccccgccccaccttgccccactactttagggggcagctaaatgtgatcctgccttgctgtgaaatttctgtaccttcaacctggtgttaggtgtgcaaagtccgtgtcctacctccgtcttcgccaaggccccgcccgagcctagttgttctccccctgaatgtgtagaaccttcctttgaaatttcttaatcggtgcattgaggtttccacatctttttccaagcagtgccccacttcatggatttatagctatagtctatgcagtcgttacctcttttttttttttttttttaagaaaattgaagattggggtggtggaggcagtagggagatgggattgggcacctcccccgtgctggggcctggatttttgtaaataaatttcccaagcgtttctttccacctggagggaaagggggggacgcccccagtgagattcaaatcacgcatctctactcctctgcgtgagtgcgtgtgtacatgtgcactccccaccctgctcccttcccagagggattgctgtgaaatttttttggtggcaaataaagataaatttcattctgttcaaaaaaaaaaaaaaaaaaaaaaaaaaaaaaaaaaaaaaaaaaaaaaa

SEQ ID NO: 288122 - DNA, 1000 bp, Homo Sapiens
acatggataacaactctcgcttgtggcagatacagcatcatttaatggtcaggggagtacaggagctgttgcttaagcttttgcctgatgactaacctggtgctgggattctacgaagatatgctcctttgttctgttcagtatttggcaatcacttcatccactactgcagtgcacccacccttgggcctggggggagggagtgggttgaaaaactgctcaagaaacagaagtttagcaagggtcatgaagaatactgcaagtgaaactgcagagagaggttacgtaggcagaaagcaagtcaacaaaagcacttagtcaggatccgtaacttgaaattgactcctttggaaattgccatagaacccttaatggacatcatcggctggacctgggatctgatgaatcccacaaaagtcagcaccttctacagaacagatgccctgatcaccaaggacttggtactgatttagagagaagagagcagctcctagcagcatcaacatctatttgtcgcttatttgccctgcagcaattcacctgcctttccttctcccatcctttttctggatatgccgcagaaggatccgtgccagaagcaagcctgtgagatacagaaatgtttacaagccaacagctacatggaatcaaagtgtcaggctgtcatccaagaactgcgtaagtgttgtgctcagtatcccaagggaagatctgtcgtctgttcaggatttgaaaaagaagaggaagaaaacctaacacggaagtctgcatcaaagtaaagttcttctgaagtgctgctccatgtttccaccaaatgaattttttttatcctcctgactcttcaggccaggtagcagcaaatagcaaatgaaaaagtcagctacaaaagttaatgaatatgccatctatgcagaacaggcagaaatataaacacattaaaagacaaatatgtagaatgtaatatactgagctgctaaaataaacctgtttaagagaaaaa

SEQ ID NO: 288123 - DNA, 859 bp, Homo Sapiens
ggttgggcagggcaatacgcctgcgtgttgccggatgcgcatgcgcaggcgccgtgtggcactcggcggtcgaaaggggagttcaaggagacgggggcgacgcggctgagggcttctcgtcggggtcggggctgcagccgtcatgccggggatagtggagctgcccactctagaggagctgaaagtagatgaggtgaaaattagttctgctgtgcttaaagctgcggcccatcactatggagctcaatgtgataagcccaacaaggagtttatgctctgccgctgggaagagaaagatccgaggcggtgtttagaggaaggcaaactggtcaacaagtgtgctttggacttctttaggcagataaaacgtcactgtgcagagccttttacagaatattggacttgcattgattatactggccagcagttatttcgtcactgtcgcaaacagcaggcaaagtttgacgagtgtgtgctggacaaactgggctgggtgcggcctgacctgggagaactgtcaaaggtcaccaaagtgaaaacagatcgacctttaccggagaatccctatcactcaagaccaagaccggatcccagccctgagatcgagggagatctgcagcctgccacacatggcagccgcttttatttctggaccaagtaaagatgggtccgtggcccacactcggtcatgtgctcagacaacgactgatgaaaacgcccatgcggtttgcatcgactgatagtgtgttctttccgggatcacaaacattaacaaaaaagttaacttatgtgacttggcagttattctataccatttcctgtccattaaaatttttaaaggaaaaaaaaaaaaaaaaaa

SEQ ID NO: 288124 - DNA, 1000 bp, Homo Sapiens; identical to SEQ ID NO: 116950

SEQ ID NO: 288125 - DNA, 1000 bp, Homo Sapiens; identical to SEQ ID NO: 222179

SEQ ID NO: 288126 - DNA, 1000 bp, Homo Sapiens
tagcatgtgtggtaccttctgaatgcgtgaaacactgtggcgttgatgttggctgcaccaactacgcataccccacgatggtgctggaactgatgccccaaggactgcgaggcctgatgctttcggtcatgctggcctctctcatgagctccctgacctccatcttcaacagcgccagcaccctcttcaccattgacctctacaccaagatgcggaagcaagcgtcggagaaagagctcctgatagctggacggatatttgttcttctattaactgttgtgagcattgtgtgggtcccactggtacaagtttctcaaaatggacaactaatccattacacagaatcaatttctagctaccttgggcctccaattgcagctgtctttgtgcttgccatcttctgtaaaagagtcaatgaacagggagcattctggggtctaatggttggacttgcaatgggcctcattcgtatgataacagagtttgcttatggaacagggagttgcttggctcccagtaactgtcccaagattatctgtggagtgcactatctgtacttttccatcgttctcttttttgggtccatgctggtcaccctgggaatttccctcttaacaaaacccattcctgatgtacatctgtaccgcctgtgctgggttcttcggaacagtacagaggagcgaatcgatatagatgcagaagagaaaagtcaggaagaaacagatgatggtgttgaagaagattatcctgagaaatcacgtggatgcctcaagaaagcttatgacttgttctgcggtttgcagaagggacccaagctaaccaaggaggaggaggaagccttgagcaagaagctcacagacacgtctgagaggccctcgtggaggacaatagtgaacatcaacgccatcctcctcctggctgtggtggtctttattcacggctactatgcctgaactctatctgagccattagaataatgaataattcttaaaaaaaaaaa

SEQ ID NO: 288127 - DNA, 1000 bp, Homo Sapiens
gggctacagaggctcttgaggctccgaggccctggggatcaaaggtcaatgagttaggtggggagaaagatccctgggggctcctgtatgcaggactcctgaaggaggtgggagctgagggccctggaggatggggaaggtttgcagagagaggaagaagagggcagggtggggaggagctctgggccagaggatgctgagctgcctgggcagagaccaagagggttggagacactagttttaccaggttacaggagggttcaagacagaaggaaaactaacagagggggagccagggatgatggggtgggcaggggatttgcatgatgaggagtatcattccagatctgtgcagagcggatcggacgggacagggtggagcggggaggcctgtgcaaagtgggaaagagctgccggtggcctgagccagggtgctggggctgcgggtggggaaaggaggccccagcacttcagacaaagaccaccccttcacccactggaccccaagccgcaaaagctggggaggtaggaagggtcactgtgagggcccagggcccctctcttcccatctcccttgtcctggtggccttcagtgtctcttccagttccaggagctgctgggaagctggccttcattgttggtgacagggcaaccatgggactaggaggtggcccatacacatggctggctggtcctgaggccacccaccttgttccaggacatgggcccgggcccggtgtgggggtagacgcagagggcagagggtagcccttggtactgtgggtccctcaaagaggagagtggggtgcagaaatgcctcagcatggctcatgcacacagcattctcccgtggggcagggttccctcatgcaacaggcctccctgtggccagcctctctgcctgtctctcgctgtgtccccccaaccccttgtgttctattggttcattgttaataaatatcaaatgaggtcacgctccttaaaaaaaaaaaaaaaaaa

SEQ ID NO: 288128 - DNA, 1000 bp, Homo Sapiens; identical to SEQ ID NO: 116951

SEQ ID NO: 288129 - DNA, 1000 bp, Homo Sapiens; identical to SEQ ID NO: 116953

SEQ ID NO: 288130 - DNA, 1000 bp, Homo Sapiens
aataaacgtaagagcatgaccaagctgcgaggcccaaaccccaaatccagccggactactctgcagtccaagtcggagtccgaggaggatgatgaagaggatgaggatgacgaggacgaggatgaagaagaggaagatgatgagaatggggactcctctgaagatggcggcgactcctctgagtccagcagcgaggacgagagcgaggatggggatgagaatgaagaggatgacgaggacgaagacgacgacgaggatgacgatgaggatgaagataatgagtccgagggcagcagctccagctcctcctcctcaggggactcctcagactctgactccaactgaggctcagccccaccccagggcagccagggagagcccaggagctcccctccccaactgaccacctttgtttctcccccatgttctgtcccttgcccccctggcctcccccactttctttctttctttaaaaaaaaaaaaaaaaatacggtgggggtagggggctggaggagcccaggccaggactctgcagcctcagagacatcagcccttgggggtcctcctccagggacagcaactatcagactaagccagcaccggaccagcctggcccaccccacccacttctgcacttgcggttccggcatggacaatggaccggagagtgggggtggggggtcccaaagagtttgatgaggccctccacacctgcggcccaatccaaggtggggtggaagcttggggaagacccattccttcccagaggggcctgccacctggacccctgcattggaactggaggcagggaacatggggaggaggagggtcggtgccttcaagaaaacaggcactgccctggtggccctctcccctgccccctgcaggaaggagctgcctggacccgttcatgggggagggggcagaagtgttttttatatatgtgtatatatttttttttaagctctgagctgtcaacgagacgtttcctaccgaaaaa

SEQ ID NO: 288131 - DNA, 1000 bp, Homo Sapiens
cattcttctgcattccaacattgccagccttgtcaaagaccaggtgattctgaaagtggactccggagactcggaagtggtcgatgggcttatgctccagcacatcactctcctcatgtgctcagcttataggaaccagctgctcaacatttttgtgcgcccatccttagtagcagtagcattgcagatgacaccagggttcaggaaagaggatgtctacagttgctttcgcttcctacgtgatgtttttgcagatgagttcatcttccttccaggaaacacactaaaggactttgaagaaggctgttacctgctttgtaaaagtgaagccatacaagtgactacgaaagacatcctagttacagagaaaggaaatactgtgttagaatttttagtaggactctttaaaccttttgtggaaagctatcagataatttgcaagtaccttttgagtgaagaagaggaccacttcagtgaggaacagtacttggctgcagtcagaaaattcacaagtcagcttctcgatcaaggtacctctcaatgttatgatgtattatcttctgatgtgcagaaaaacgccttagcagcctgtgtgaggctcggagtagtggagaagaagaagataaataataactgtatatttaatgtgaatgaacctgccacaaccaaattagaagaaatgcttggttgtaagacaccaataggaaaaccagccactgcaaaactttaataatcaacaaatagttatggaaaattcggtcacgtaattactctcatcgaaggactcattacaacaaacagggaagtaaaggaagagacacatcctctcatactccctgagactctgagaacagtggacgcagagggaagagatgatcattggaagcaatcagtttactcttccccaccacagtggttaaaaggcgtttgtatctgacactatgtgtgtgttttaaaataaacttttggaaacatgaaaaaaaaaaaaaaaaaactcgag

SEQ ID NO: 288132 - DNA, 1000 bp, Homo Sapiens
tgctgtgattataacacatgtaaactgaagggctcagtaaaatgtggttctggaccatgttgtacatcaaagtgtgagttgtcaatagcaggcactccatgtagaaagagtattgatccagagtgtgattttacagagtactgcaatggaacctctagtaattgtgttcctgacacttatgcattgaatggccgtttgtgcaagttgggaactgcctattgctataacggacaatgtcaaactactgataaccagtgtgccaagatatttggaaaaggtgctcaaggtgctccatttgcctgttttaaagaagttaattctctgcatgaaagatctgaaaactgtggttttaaaaattcacaaccattaccttgtgaacggaaggatgttctctgtggaaaattagcttgtgttcagccacataaaaatgctaataaaagtgacgctcaatctacagtttattcatatattcaagaccatgtatgtgtatctatagccactggttcctccatgagatcagatggaacagacaatgcctatgtggctgatggcaccatgtgtggtccagaaatgtactgtgtaaataaaacctgcagaaaagttcatttaatgggatataactgtaatgccaccacaaaatgcaaagggaaagggatatgtaataattttggtaattgtcaatgcttccctggacatagacctccagattgtaaattccagtttggttccccagggggtagtattgatgatggaaattttcagaaatctggtgacttttatactgaaaaaggctacaatacacactggaacaactggtttattctgagtttctgcatttttctgccgtttttcatagttttcaccactgtgatctttaaaagaaatgaaataagtaaatcatgtaacagagagaatgcagagtataatcgtaattcatccgttgtatcagaaagcgatgacgtgggacattaatattgcacagaacttccatagcaaataa

SEQ ID NO: 288133 - DNA, 1000 bp, Homo Sapiens; identical to SEQ ID NO: 116957

SEQ ID NO: 288134 - DNA, 1000 bp, Homo Sapiens
cctaagaatgttggccttactgacacacctttgctccatgttcaagaccagaagtagctgggatttgtttgcaaattgggtaattagtttaaaaatctgtgattacatttttaaatgaaattttcaaagtggcctagattgaggtgattcagataggtttgcgaatataccattttatattgttgagaaagaacaaaaagggaatttccagatgtcctagaaatcctagcaacagatttctctggttgtcagtttccctggagaaggcgccagataggaatctccaatcagttgtttttctcttcgcttcaggcccttacacaaaagccatgaagagatgttcacctacccggtattttaaatgttctgtaaattattagccaaatagaactgtaatggggttgtatttatgggcgcctagaaagaaaacacaaggacttggtaggccaggaagaaaagattttaaaatttagaatgaatagcccttctgggttttctttttgacaattcttggacttgaggtaaaacaaggaggattgtggccggatttcagatcccaaagccagcctccatcttaggcctttgcctcattgtgccttttaggttttcttacccaccgtctcctgttttgtcttttttttcttttctcctacccctatcttgggacattcagaaactgcctgggtggtttgagaagagacaacccagtttgatctgcaatacaaggatccattcgtaatctctctctcactgatgttattcccccatctgccgtcttggttcatctcaccacagaagggcatttagtcctacccagccatcggctgcggtatgacagcaggatggcacttcccatttctctgtggttagtgctcgagtgaaaacctctttcagctgagtcctctgaggttctgctgttgagtcctgggtggctgatggaatgattgaggaggtctggtcaccctcaagcgccgtcatcgccttgtttccatgggcttct

SEQ ID NO: 288135 - DNA, 1000 bp, Homo Sapiens
cgcgctgcacatggggcgcctgacggaagcggcggcagcgggcagcggctctcgggctgcaggctgggcagggtcccctcccacgctcctgccgctgtctcccacgtcccccaggtgcgcggccaccatggcgtccagcgacgaggacggcaccaacggcggcgcctcggaggccggcgaggaccgggaggctcccggcaagcggaggcgcctggggttcttggccaccgcctggctcaccttctacgacatcgccatgaccgcggggtggttggttctagctattgccatggtacgtttttatatggaaaaaggaacacacagaggtttatataaaagtattcagaagacacttaaatttttccagacatttgccttgcttgagatagttcactgtttaattggaattgtacctacttctgtgattgtgactggggtccaagtgagttcaagaatctttatggtgtggctcattactcacagtataaaaccaatccagaatgaagagagtgtggtgctttttctggtcgcgtggactgtgacagagatcactcgctattccttctacacattcagccttcttgaccacttgccatacttcattaaatgggccagatataatttttttatcatcttatatcctgttggagttgctggtgaacttcttacaatatacgctgccttgccgcatgtgaagaaaacaggaatgttttcaataagacttcctaacaaatacaatgtctcttttgactactattattttcttcttataaccatggcatcatatatacctttgtttccacaactctattttcatatgttacgtcaaagaagaaaggtgcttcatggagaggtgattgtagaaaaggatgattaaatgatctctgcaaacaaggtgctttttccagaataaccaagattacctgagtccaagttttaataacaagaataaacaactttgtgaaatatcaaaaaaaaaaaaaaaaaaaaaaaaaaaaaa

SEQ ID NO: 288136 - DNA, 1000 bp, Homo Sapiens
cttccagtctttcaagaagtaaggtaaatgcaggaatgggtaatagtggtatcactacagaattgactctgaaatacattattactaatgttacaaccttagaaacaggtataagctctgtgaatgctgggcaagatgtgaacataattattacatataaaacatcactatagaataccaacttgggagatgtcgctaaaggacttcagtcaagtaattttggtgttaatatacaaacgtacaccccatctttaactccacagaccaagactggagtaagaccttttaaccctggtagaatgaatgtggcaggagacttatttcagaatggagaatttgcaactcatcatagtcctgattcttggatctcccagtcagcttcatttcccagtaatcagaaacagccaggggtggattctttatcaccagtggccttacttcgtaagcagaatttccagcctacagcccaacaacaacttactaaaccagctaaaatcacttgtgcaaattgcaaaaagcctttacagaagggacagacagcttatcaacgaaaaggatcagctcacctcttttgctctaccacctgcctttcttccttctctcataaacgtactcaaaacacacgaagcataatatgtaaaaaagatgcatctacaaagaaggctaatgtcattcttccagtagaatcaagcaaatccttccaagaattttatagtacatcttgtttgtctccctgtgaaaacaactggaatcttaaaaaaggagtttttaataagtcaagatgtacaatttgtagtaaattagcagaggtctggatttttatacctaagttgttgtttaggctaacagtgataattttaacttttaagtgctattatgtactctttcatctacataatgcacgtgttctggatgtataacatgaagctgaaaggaagaataaggatatgttagaactatcttatgggatattttataaataaaattccatttgcatagc

SEQ ID NO: 288137 - DNA, 1000 bp, Homo Sapiens
acaatgcatctgactgcaataatgtgctaataatttatgtcagtagtcaccttgctcacagcaaagccagaaatgctctctccagggagtagatgtaaagtacttgtacatagaattcagaactgaagatatttattaaaagttgattttttttcttgatagtatttttatgtactaaatatttacactaatatcaattacatattttggtaaactagagagacataattagagatgcatgctttgttctgtgcatagagacctttaagcaaactactacagccaactcaaaagctaaaactgaacaaatttgatgttatgcaaacatcttgcatttttagtagttgatattaagttgatgacttgtttcccttcaaggaaacattaaattgtatggactcagctagctgttcaatgaaattgtgaattagaaacatttttaaaagtttttgaaagagataagtgcatcatgaattacatgtacatgagaggagatagtgatatcagcataatgattttgaggtcagtacctgagctgtctaaaaatatattatacaaactaaaatgtagatgaattaacctctcaaagcacagaatgtgcaagaacttttgcattttaatcgttgtaaactaacagcttaaactattgactctatacctctaaagaattgctgctactttgtgcaagaactttgaaggtcaaattaggcaaattccagatagtaaaacaatccctaagccttaagtcttttttttttcctaaaaattcccatagaataaaattctctctagtttacttgtgtgtgcatacatctcatccacaggggaagataaagatggtcacacaaacagtttccataaagatgtacatattcattatacttctgacctttgggctttcttttctactaagctaaaaattcctttttatcaaagtgtacactactgatgctgtttgttgtactgagagcacgtaccaataaaaatgttaacaaaatat

SEQ ID NO: 288138 - DNA, 521 bp, Homo Sapiens; identical to SEQ ID NO: 116960

SEQ ID NO: 288139 - DNA, 1000 bp, Homo Sapiens; identical to SEQ ID NO: 116962

SEQ ID NO: 288140 - DNA, 1000 bp, Homo Sapiens
ttgtgccactgcactccagactgggtgacacagcgagacttcatctcaaaaaaaaaaagaaaagcaattgtacttaactatgccatatgtagtatgtattcactgaccaaaaattcactgaccaaccaaccaaactccacacttcatctgatcccccatagacttggggatggacagctgttctttggccatatggtataagaggatcattcttgtcactacttaagttagcctcatcattttgtgctgctccaacaccagcagggtatctcccaataaagtgttcctaagcagcctgtatactgagtgcaagcaggctaacaattttaataatagtccataccatgtatgtgtttctgtcagcagaatgtacatgttgtacaaaacctccaggttccttaagctttttgctgtccatgaatcctctgtggcaactgtaatcacagagccagaagccagagggccagggatatgagaggctgacaaacatcaggggacatctggggaggagatccctgtcatgtctcttgtgccatggagctattatggctggtcttccatttgctttttctttaagtgaaaaccatttttctactttgcttttctctccatacttaaatggtcagtagctactgagtggtgctttatctgaataggcctggatcgaagtaaaatagaaatgggactggctttccacaggaagtaaactgcttcagagcccacagtcccctgctcagtgtccggaaagaagtcagtcatccctgttggcagtaaatcttcccacaggccgtccattagagatttaactagatatgttcaatagaaagagtctgaggcaagtggaaatgaggaacggaaacttaggttgggagaatattttttttttattcattctgtttgcttaattcagagtacagtttgtgctatttcatatctgtactccaggcagaaatataacttgaaaatactgtgtctaaagaaatttcagtggtctatcatt

SEQ ID NO: 288141 - DNA, 1000 bp, Homo Sapiens; identical to SEQ ID NO: 222182

SEQ ID NO: 288142 - DNA, 1000 bp, Homo Sapiens; identical to SEQ ID NO: 116963

SEQ ID NO: 288143 - DNA, 1000 bp, Homo Sapiens; identical to SEQ ID NO: 116964

SEQ ID NO: 288144 - DNA, 1000 bp, Homo Sapiens; identical to SEQ ID NO: 116965

SEQ ID NO: 288145 - DNA, 1000 bp, Homo Sapiens
tcaaaaaagcgaacaacagaggcttcatcttttgaaaacttcattggctaaaagtgtcttctgtaatactgatagtgaagaaactgtttttacatccgagatgtgtttgatgaaagaagatatgaaagtgctgcaagacaggcttcttaaggacatgctagaagaggagcttcttaatgtacgcagagaactgatgtcagtattcatgtctcatgaaagaaatgctaatgtgtgaaatctagtttttatcaccatactttatctaattattattctctgtatataactgaggaaataagaatagtcctacaaagagaaaaatatacatgtcaccgaagcaagtgtaccctttataggaaccctcaaattaaaaaaaaatgtcttttaatggatgagagggaaccactataacatgagtccaagcccagaagacttctgtctatacaatatttttttttaattttggagataaaagctttaagaaactttttgagttaattatactcataaaatgagtttctttaataaattaaattttattgtgtaaaatgtattattacataaaatgtgtttttgaatcaatgcagtttggggatgaatataattaaaatatgtttaataacttagaattcaactaataaaaatttagccacacttacaagggggaggaagtccctagtttaaaatgtataactgagtggtagatcagtactttcagcacactgttggaaacatttattcagatatggctctaatgtattaggaagcactaaatggcctaaaaaagctactacattgcctaaatatgttaattcaatatagaagtcctatttcataaccaggctgtttgacaaatacttttaatctagtagtcattgtaatatcttgctagattaatttataaaaatgagtatacatttgatttgcttttaatgaagttgaaataaatgcttatgtcacttgaataaatataaatcattataaaaaaaaaaaaaaaaaa

SEQ ID NO: 288146 - DNA, 1000 bp, Homo Sapiens; identical to SEQ ID NO: 222186

SEQ ID NO: 288147 - DNA, 1000 bp, Homo Sapiens
tggagaattctcctggtgctgattttgaggtttggttttatgatggggtaaaaatacacaaaacagaagatttcattcaggtgattgaaaagacagggaagtcttacactttaaaaagtgaaagtgaagttaatagcttgaaagaggagataaaaatgtatatggaccatgctaatgagggtcatcgtatttgtttagcactggaatccataatttcagaagaggaaaggaaaactaggagtgctccctttttcccaataatcataggaagaaaacctggtagtactagttcacctaaggccttatcacctcctccttctgtggattcaaattacccaacgagagatagagcatctttcaacagaatggtcatgcatagtgatgcttctccaacacaggcaccaatccttaatccctctatggttacaaatgaaggacttggtcttacaactacagcttctggaacagacatctcttctaatagtctaaaagattgtcttcctaaatcagcacaacttttgaaatctgtttttgtgaaaaatgttggttgggctacacagttaactagtggagctgtgtgggttcagtttaatgatgggtcccagttggttgtgcaggcaggagtgtcttctatcagttatacctcaccaaatggtcaaacaactaggtatggagaaaatgaaaaattaccagactacatcaaacagaaattacagtgtctgtcttccatccttttgatgttttctaatccgactcctaattttcattgattaaaactcctttcagacatataagtttaataaataacttttttgttgactttcaagtaaagtgattttttttaatttaacataaagtcttcagaaagcctttctatgaaagaattttaacctataatgtaaaccatgtatctgagataacaaagcagaatgaaacttgagtcacttactaaatatagtggatataaaatagaacacctgactttgctcttagaccataa

SEQ ID NO: 288148 - DNA, 524 bp, Homo Sapiens
cttgacaccagcagggtgacatccgctattgctacttctctgctcccccacagttcctctggacttctctggaccacagtcctctgccagacccctgccagaccccagtccaccatgatccatctgggtcacatcctcttcctgcttttgctcccagtggctgcagctcagacgactccaggagagagatcatcactccctgccttttaccctggcacttcaggctcttgttccggatgtgggtccctctctctgccgctcctggcaggcctcgtggctgctgatgcggtggcatcgctgctcatcgtgggggcggtgttcctgtgcgcacgcccacgccgcagccccgcccaagaagatggcaaagtctacatcaacatgccaggcaggggctgaccctcctgcagcttggacctttgacttctgaccctctcatcctggatggtgtgtggtggcacaggaacccccgccccaacttttggattgtaataaaacaattgaaacaccaaaaaaaaaaaaaaaaa

SEQ ID NO: 288149 - DNA, 1000 bp, Homo Sapiens
caaaaagcaattataaaatgatgtttgttaaatccagtggttcataactcccaaacgcttagtctttgtattaaaagtaagccttattgttacaatgcacagtggaggactgcttatagagcacagacctttgtattataatttttaaaaaggcccttttaaataattacaaagagtgtttgctttcaaatgccatgggttacacttttatgggcatgactataaccatttttgtaaagagtaagagttgtataaaataagaaataaatacagtactcaacttcctttcatattagcatcatcaaccctctaattcaccttatgggggaaatgcttctctttgtttgtgatagctattttatcatttccttcatatttttctcttataaaaatgtatttgatactgtgatatgttcacgaaaagtattctttaattattctttgttatagtagagctgttcattatggatatttctgctgccagtcacaatctaaattaattttggcaaaagattgggtacttagtttcctgttactgagttagctctactcttttggaccaaagcaacatgagagcaagtacttttcacacttgttaagatggagttataactgtcatacatttggaatattatgatcccaagtagtctttttataatttggattgtatcgtatgttagatttttgataaaatttggccaatttttacagaagaaattctctgatcatttagttctatctatttagaaatatgtaaaactggatttttttttaagtaatatgtgaccaaagttaattttgtcccaaaggtctaaataaagagcagtttcccatatttggctgtgatacctttatcctcattatctacaaatgaggaacaggcttactgataagaagctgaaacaagaaattctcttcattttatcccagtgctattttattgattaattactaaaaagtattactttccaaaaaaaaaaaaaaaaaaaaaaaaaaaaaa

SEQ ID NO: 288150 - DNA, 1000 bp, Homo Sapiens
acaaagggaaacagatacttgatatgaaagccataatgacggtgacttgtgtcgtgggggaaaacataaggtcattttctccctctactcacaatactaaagggaaaaaatggattcaaagctaggatttcagggcccagcagtgttcctccatcagcatgttagacaactacacagtatgttgttagttttgaaagacattcactcaaggaaaacaccatctcaactttgcccgctcaccatgtcccttgcccccatgtagcccatttcccaggttatgctcttttctttctcagggtcctctttggtgggcagccactccccgagatgttgccatcagttttctgcagtccaaagagggtatggttaggtacgggtcttcctgcctcattcctcttcctctttgtgtaggtttcagccacaaaactgtcattcactctaggggacccctactaaagggtaacttcaggtgtgcagccctgagctccaaggctctgcaccatgccacacacttgctgtaaggctagaagtgaagaccttattaataggagcataattgcgagggagaatcatggttctgcagtctggtgtagacactggaataacagcacagaaaaatctatgactcccaatatcttctagaataaagaattttccctctttaacacaagggccctccttgtcattgaccttagctaaaccatggcaattcataaatagaggaaacattaatgaattaaaagcattccttattttttaactaatatttgtacattttcttagtctctttccaagtctttgcctcttttttttctttatttttattttttcctttgacagatggtatcccttcctggatcattcatttcaccttggtttctaactttaggtttactttcacttgttatttgacttagcaggtgcaacaaaaacaagaaacaaatgtgcccaccccactttccgcttaactgaaaagcttaaaataaatttccgaattatg

SEQ ID NO: 288151 - DNA, 1000 bp, Homo Sapiens
cccaaggaaacacaaagaattttgataattctttcgagggcgcccagctgtctgtgggagccatcagcctggcgttttacaatggactctgggcctatgatggatggaatcaactcaattacatcacagaagaacttagaaacccttacagaaacctgcctttggccattatcatcgggatccccctggtgacggcgtgctacatcctcatgaacgtgtcctacttcaccgtgatgactgccaccgaactcctgcagtcccaggcggtggctgtgacatttggtgaccgtgttctctatcctgcttcttggatcgttccactttttgtggcattttcaaccatcggtgctgctaacgggacctgcttcacagcgggcagactcatttacgtggcgggccgggagggtcacatgctcaaagtgctttcttacatcagcgtcaggcgcctcactccagcccccgccatcatcttttatggtatcatagcaacgatttatatcatccctggtgacataaactcgttagtcaattatttcagctttgccgcatggctgttttatggcctgacgattctaggactcatcgtgatgagatttacaaggaaagagctggaaaggcctatcaaggtgcccgtagtcattcccgtcttgatgacactcatctctgtgtttttggttctggctccaatcatcagcaagcccacctgggagtacctctactgtgtgctgtttatattaagcggccttttattttacttcctgtttgtccactacaagtttggatgggctcagaaaatctcaaagccgattaccatgcaccttcagatgctaatggaagtggtcccaccggaggaagaccctgagtaacaagctccgtctcttgtagccaagtcagctgaatttattttcttaagcaatatttgtggttatttcttcctttttttcttacgaataaaatatactcagatgttaaaaaaaaaaaaaaaaaaaaaaaaaaaaaa

SEQ ID NO: 288152 - DNA, 1000 bp, Homo Sapiens
atcgagcagggagcagaatccagatgaggcccacacaaacagtgccatcctgccgctgttgccaagggagaccagtatatccagtgtgatatggtgacagaaaagcaagggacatcccgtccctgggaggttgagtggaatctgcagtccagtgcctggaactaaatcctcgactgctgctgttaaaaaacatgcattagaatctctagaacacgaggaaaaacagggtcttgtacatatgttttttggaatttctttgtagcatcagtgtcctcctgttttaccatgtcttttaccattacattttttgactttgttttatatgtcgttggaatttgtaaatttacattttttttaaagaagagactgatgtgtagatagaaaaccctttttttgcttcattagtttagttttagaatgggtttttattttatttccttttttaaaattttactttgcttttaacatttccttggggtgcttggacaaatctatccgatgggacaaggagcaccggattctttctcgggttctgcctagcatcaactgggccacgtcggccttcagagaacagtgcaacaaatgccagcattgccattcgggggaaaaaaaaaaaaaaaaaaaaaagatgagaagaacacttgttcataggagggccccaccagtcagagccctgaatctcttccttgtcccacctcattccccacctctacctttctaatggcggcatgatgtgtaaactctgtgcaggggtgggggcgggtctaactgtcttaacattcaagtcactgctcttcagaatacactctagacccaaaggtgtgctaatcacttcacagtgaccactacagagtactaagaagagaagatcaagggcatgaaattggggaagagtgttatttccgttttttaaatgagttgatgtacccttatatatatatacatatatatataaatataaatatatataaaaacaacaaaacaaaacaaaaaaagaaaa

SEQ ID NO: 288153 - DNA, 1000 bp, Homo Sapiens
cggtctggaggccggtgcgctgtagctccggccgggatgaggactgcgcccccgctggccggccccagcctgcccgccgctgccacctgcggccctgtgccacctggcactcaggcaactggagtaagtgctcccgcagctgcggcggaggttcctcagtgcgggacgtgcagtgtgtggacacacgggacctccggccactgcggcccttccattgtcagcccgggcctgccaagccgcctgcgcaccggccctgcggggcccagccctgcctcagctggtacacatcttcctggagggagtgctccgaggcctgtggcggtggtgagcagcagcgtctagtgacctgcccggagccaggcctctgcgaggaggcgctgagacccaacaccacccggccctgcaacacccacccctgcacgcagtgggtggtggggccctggggccagtgctcaggcccctgtggtggtggtgtccagcggcgcctggtcaagtgtgtcaacacccagacagggctgcccgaggaagacagtgaccagtgtggccacgaggcctggcctgagagctcccggccgtgtggcaccgaggattgtgagcccgtcgagcctccccgctgtgagcgggaccgcctgtccttcgggttctgcgagacgctgcgcctactgggccgctgccagctgcccaccatccgcacccagtgctgccgctcgtgctctccgcccagccacggcgccccctcccgaggccatcagcgggttgcccgccgctgactgcgccaggatgcacagaccgaccgacagacctcagtgcccaccacgggctgtggcggagctcccgccccctgcgccctaatggtgccaaccccctctcactacccagcagcaggctggggacctcctccccctcaaaaaaggtatttttttattctaacagtttgtgtaacatttattatgattttacataaatgagcatctaccattccaaaaaaaaaaaaaaaaaa

SEQ ID NO: 288154 - DNA, 1000 bp, Homo Sapiens; identical to SEQ ID NO: 222187

SEQ ID NO: 288155 - DNA, 1000 bp, Homo Sapiens
atataaacagacaatgaaactctttgcagagctggaaattaaaaggaaagagagagaagccaaagagatgcatgaaaggaaacgacaaagggaagaagagattgaagctcaagaaaaagccaaacgggaaagagagtggcagaaaaactttgaggaaagtcgagatggtcgtgtggacagctggcgaaacttccaagccaatacgaaggggaagaaagagaagaaaaatcggaccttcctgagaccaccgaaagtaaaaatggagcaacgtgagtgaccgcccaaggtcacaggcacagaacctttcccctgctatctcccttcctgcttcgaaggactcattctttcctcccacttccaccccaacatagagtagtatttgctttttagtccattttgttttcaatacgatttaatatcgatcagagtaattcttttgtacattgaaatgaggggcttggtttaaaaaaagacctttccctctccctgcccctagaacaaccagtattagaaggtgccaccattggtgctgccttctcttcccacagcctgtaactcagtgttttgtacttcactgaattgtgatggttagaaacttcgtggatagtttgtggaaatcatccaattaaacatactgcttaaaacagtgttgctgtgacttcagagacaagcctggaaggggcaccttaggaagccccttcgcttcagttgctcgcttctgggtgtgctcccttcgaaggcccagataagacagggaacacttgtgagcacacagagcagcatctgatgccctgtggtgtttggcatgtgccccctgtctactgaccaatcagtgtggcatgaggcccacgccacccaaacctttcactttccaaagagctagccgtcctccacccagtaccatgtcctagcctgtctgcatttgttagtggtaatattctttatgtataataaatttttatacccaaaaaaaaaaaaaaaaaaaaaaaaaaaaaaaaaa

SEQ ID NO: 288156 - DNA, 1000 bp, Homo Sapiens
ccctgtgacggcctccagcccacaggcctgctttctcctgtcctaacaccaagcctgggtggcagatgaacagtgcttccttgggttgccagctgagtcccggtattagggaatagtttcagctctttcaaagtgcacagtgttacagtcgaatgggctcccatcctggaataatatggagaatcctttgtcttccactcactgtcattcacaaggcacagtgccccatgaaattgccccaatagaaaacatggcatccctgacctccaaatggtctgttttggcctccattcctatatcctttaaatgactgagaatgcagctggtaaagttggaagaataaagttaaccaagcaggccaggcacggtggctcacgcctataatcccagcacttagggaggccaaggcgggcagatcacctgaggtcaatagttcgagaccagcctggccaacaaggtgaaaccccatctctactaaaaatacaaaaaattagccaggtgtggtggtgtgcacctgtagtcccagctatttgggaggctgaggtgggagaatcacttgaacctgggaggcggaggttgcagtgagctgaaatcgcgtaccacactccagcctgggtgacagagcgagactgtgtttcaaagaaaaaaaaaaacaagcagccttttgcttggttggaatctgattttctgttgcgtgttccttgtagccatagatgtgattatgtccacaccgggctgccttaatctgtcctgcttggagagtgacttgtaagatgctgaattattcatgataatacagtgaatgttctgggtccatgtactcagataaacatgaagaaaataagcaaagaaaaatggagactgggaaagcaaagctgttttcatcctataattgaagtagtgtggagcattaacttgtggatgattcagagttaaaagataaaaagacgccagagttctcgctgaagaatgtgagaaaaaaaaaaaaaaaaaaaaaaaa

SEQ ID NO: 288157 - DNA, 1000 bp, Homo Sapiens; identical to SEQ ID NO: 222190

SEQ ID NO: 288158 - DNA, 1000 bp, Homo Sapiens
tcctctgaataccttcctacattatgggtcaagctttacaaaagcgaaaacctcgacaatccaatccagacagtttcccttggccagtccctgttcttccatttccccccactgctcagagacggcgagaactatgttgtgcttctggactccacactccccagatcccagtatgactacatcttgcctcaagtttctttcaccgcagtgggctaccataaacacatcaccttgatttttaatcccacgaggaagctgcctgaacaggacatcgcacaaggatcctacattgccctgccattgacgctgctggttctgctggccggttacaaccatgacaagctcattcctttgctgctgcagttgacaagccggctacagggagtccgcgcgctcggccaggcagcctctgacaatagcggcccagaagatgcaaagagacaagccaagaaacagaagacaaggcggacttgaggaggaaggggacagttgcagtctcacttgggacaggccacagccaggggtccggccactacccgcccgtgggataaaagccaaaagcatgcgtcagctaacttcagcctgtgctgctgggcccgcaccccatgtcccttgtcactgtggcatcctgcacccatcctcacccctccgtagagcccctcgtgcaatgcaatgaatggaccctcctgtcactctgctgaacagaatttattttctgagtcaaatataatttattattatttttgtcaaagaagtatttaagctgtgctgtggtgtgagaatgtcattcttgatcttcagccttcgtttgcaaggagagttccagttgacgtggtgtttggttccatggcggggtaccctagggattcatctgttttcttcacttccctttgcatctgagatcctgctggaaaccacagcaacctgtatccactattaggaggtaaaaatcaataaaatggcccattcatttgtgttgtagctcaaaaaaaaaaaaaaa

SEQ ID NO: 288159 - DNA, 1000 bp, Homo Sapiens; identical to SEQ ID NO: 222192

SEQ ID NO: 288160 - DNA, 1000 bp, Homo Sapiens
ccagtggagctgactctcccaacagcaaaaatggcaacatgcccatgtcgggcaacactggagagaatttcagaaagaacctcacagatgtcatcaaaaagtccatggtggaccatacgagcgctttctccacagaggaactgccacctcctgtccacttatcaaagccaggggaacacatggatgtgtatgtgcctgtggcctgtcacccaggctacttcgtcatccagccttggcaggagatacataagttggaagttctgatggaagagatgattctatattacagcgtgtctgaagagcgccacatagcagtggagaaagaccaagtgtatgctgcaaaagtggaaaataagtggcacagggtgcttttaaaaggaatcctgaccaatggactggtatctgtgtatgagctggattatggcaaacacgaattagtcaacataagaaaagtacagcccctagtggacatgttccgaaagctgcccttccaagcagtcacagctcaacttgcaggagtgaagtgcaaccagtggtctgaggaggcttctatggtgtttcgaaatcatgtggagaagaaacctctggtggcactggtgcagacagtcattgaaaatgctaacccttgggaccggaaagtagtggtctacttagtggacacatcgttgccagacaccgatacctggattcatgattttatgtcagagtatctgatagagctttcaaaagttaattaatgactgcctctgaaaccttgacaactaattcagattttttagcaataacaaaatgtagtaggcttaaaaaaaatcttaactctgctacatggctctgactgctgtgggggattgaaaagaatatgcttatgtttgatgaaagatatttaacaagttttgttttaacagagttgacttttcaaagaaaattgtacttgaattattactataatattagaataaaaatgtttatcaatataaaaaaaaaaaaaaaaaaaaaaaaa

SEQ ID NO: 288161 - DNA, 1000 bp, Homo Sapiens; identical to SEQ ID NO: 222193

SEQ ID NO: 288162 - DNA, 1000 bp, Homo Sapiens
tttcccagcccacagggcttgaagtgaaggaacagaggcagggggtgggccagccccagggccagggtccccttggtgaagccgtgccagggggctcagctgcttcagggaatgtgtccctcccaccatgggccagagcttcagcccttctttagctcagctagagttcacaggagagccaaaaaagaaaaggaagctgagcatctcccgagtcctgggcagggaaggggagggaaattgctgcttctccaactcttgcttggggccaagccctgcaccagttgcttcccagctgttatctgccagatcttcccatcttgtggcatgtggtgcccccaccaacatcccaaggggaccaatccccttgccaccactttgcatcacctgggaccacagatttggacaggaagggctctgagaagaggccaaagccctcattttacagatgaggaagctgaagcccggggaggggagcgaccctcaaggccacccagctggacacgggagacttgagcccagccttctgactgcattcagccctctctaggacgcagcagcctctccccagcactgagtcccccctcctttgtgtgtcccagcacccttggcctgagtaaacttggaaaggggctccctcccagagaagggactactctcttcacccctttattccagctgcctgccaccccagacccccacctcccaccctgacccccgacccctgggtggggaaggggctcacatgggcccaggctgagtgtgagtgagcatgtcaagttgtctgacactgtgacattagtgcaccctactgacaacccctccccagccttgcccctttctcctctccctgttttgtacataaattgacatgagctgcaacatgtgtgcgtgtgtgtgcgtgtgtgtgtgtgtgtatgtgtgtgtgatctgtgtcatggttttgttacctttttgtttttgtaaacttgaatgttcaaaataaacatgctgtttactctga

SEQ ID NO: 288163 - DNA, 1000 bp, Homo Sapiens; identical to SEQ ID NO: 116971

SEQ ID NO: 288164 - DNA, 1000 bp, Homo Sapiens; identical to SEQ ID NO: 222194

SEQ ID NO: 288165 - DNA, 1000 bp, Homo Sapiens
gctggtgatggtgaaggataaccatgtggtggccgccggtggcgtggagaaggcggtgcgggcggccagacaggcggctgacttcgctctgaaggtggaagtggaatgcagcagcctgcaggaggccgtgcaggcagctgaggctggtgccgaccttgtcctgctggacaacttcaagccagaggagctgcaccccacggccaccgtgctgaaggcccagttcccgagtgtggctgtggaagccagtgggggcatcaccctggacaacctcccccagttctgcgggccgcacatagacgtcatctccatggggatgctgacccaggcggccccagcccttgatttctccctcaagctgtttgccaaagaggtggctccagtgcccaaaatccactagtcctaaaccggaagaggatgacaccggccatgggttaacgtggctcctcaggaccctctgggtcacacatctttagggtcagtggccaatggggcacatttggcactagcttgagcccaactctggctctgccacctgctgctcctgtgacctgtcagggctgacttcacctctgctcatctcagtttcctaatctgtaaaatgggtctaataaaggatcaaccacatggggttctgcggtgataatgagcacatagtgaggggtcagcaaatgtcagaagttacctgggacagccgggcacgatggctcacacctgtaatcccagcactttgggaggctgaggcgggaagatcacttgagttcaggagtttgagaccagcctggccaacatggtgaaaccccatctctaccaaaaatagaagaattagctgggtgtggtggcacgcgcctgtaatcccagctacttaggaggctgaggcaggagaatcgcttgaacccaggaagtggaggttgcagtgagctgatggtgccactgcactccagcctgggtgatagagcgagactctgtctccaaagaagaaaaaaaaaaaaaaaaaaaaaaa

SEQ ID NO: 288166 - DNA, 1000 bp, Homo Sapiens; identical to SEQ ID NO: 116972

SEQ ID NO: 288167 - DNA, 1000 bp, Homo Sapiens; identical to SEQ ID NO: 222195

SEQ ID NO: 288168 - DNA, 1000 bp, Homo Sapiens; identical to SEQ ID NO: 116974

SEQ ID NO: 288169 - DNA, 1000 bp, Homo Sapiens; identical to SEQ ID NO: 222199

SEQ ID NO: 288170 - DNA, 1000 bp, Homo Sapiens; identical to SEQ ID NO: 222200

SEQ ID NO: 288171 - DNA, 1000 bp, Homo Sapiens; identical to SEQ ID NO: 222201

SEQ ID NO: 288172 - DNA, 1000 bp, Homo Sapiens
gcgtcagcgccgcccatggccgagccgctccagccagaccccggggcggccgaggacgcggcggcccaagctgtggagacgccgggctggaaggccccggaggacgccggcccccagcccggaagttatgagatccgacactatggaccagccaagtgggtcagcacgtccgtggagtctatggactgggattcagccatccagacgggctttacgaaactgaacagctacattcaaggcaaaaacgagaaagagatgaaaataaagatgacagctccagtgacaagctacgtggagcctggttcaggtccttttagtgagtctaccattaccatttccctgtatattccctctgaacagcaatttgatccacccaggcctttagagtcagatgtcttcattgaagatagagccgaaatgactgtgtttgtacggtctttcgatggattttctagtgcccaaaagaatcaagaacaacttttgacattagcaagcattttaagggaagatggaaaagttttcgatgagaaggtttactacactgcaggctacaacagtcctgtcaaattgcttaatagaaataatgaagtgtggttgattcaaaaaaatgaacccaccaaagaaaacgaatgagaaaaatgaaaggaagttctgctgtcagaggcaaaacatctgtttatcatagacatcaacatgacctataagtaaagtgcgtgtctagtgtcttctattgagagtactactattaattaagcttatttccaatgtgcctttttaatgcttgaagttttatctacatacacaggtaacagaggacagtagtctgtaaacatataaatcggtcataactatcgtggtctttatttctgtgaggatctagggaaatttcatgtcacttccctccttcactgcatcacaatcatattcccttttttttttcttggatttgtgtcagttggatgatatcccctccagatagtatcaataaaatgttaaaatt

SEQ ID NO: 288173 - DNA, 1000 bp, Homo Sapiens; identical to SEQ ID NO: 116978

SEQ ID NO: 288174 - DNA, 1000 bp, Homo Sapiens; identical to SEQ ID NO: 115477

SEQ ID NO: 288175 - DNA, 1000 bp, Homo Sapiens
gcacagacctctgctgtagctttaatgcatacaaacatgtccctccgcacaactaacctgccctgcctctccatctctcaccaaggctgcgtcaaagcacagaggctccccggactcggagggggccagagactgagctctggtcacctgttcattcctcggttagctggaactttgccccgtttccagtttcttatagtgcatgcttgggaaacaagatttaaggagcctctgttttggaagggctgtctgtgattgaacgtgaaatgtgtagtgccattgggaccacgaagggaattcttgcacatgctcgtgctggtgtgggcatgggactggctggaaacgtctgtatgcagggagccagggtgagggcagagtgtggtgacagccgaacttggagtaatgtccgtgtagaaaaaggaccatgttcttatccagccaatactgggagtgctgtctccacaatttcagggcatctgaatgtttgatgtggttttgtgtgtgtgtatgtatgtgtttaatattgaagtggatcatgagatgtaaagaaaacaataatggcaatgacttatattcaaatctgtatttgtttctttatcaatgtaatctgctgaggaccttttgtctaagattcagtagtgttttaaggttctgatatcgaattaatgaagtaaagttgttgatggtggtgaaacaccgtagggcatgtggttcaaagagaagcaggagggcaagggaaagttaccctgatcttagtttgtagcttatgacttatttaatgaatggatgcccagccaagctcagagtaggcgcccaaagcattgtggattattttcctgttttgtctttttttttttttttttttaagccatgacatcccagaagaggacagtgaattactcctaggtcggctcttatagagtggccatagtgttctgtcaaaacacttgcttccattttcagagataaaaatcattgattacaaaaaaaaaaaaaaaaa

SEQ ID NO: 288176 - DNA, 1000 bp, Homo Sapiens; identical to SEQ ID NO: 116980

SEQ ID NO: 288177 - DNA, 1000 bp, Homo Sapiens; identical to SEQ ID NO: 222202

SEQ ID NO: 288178 - DNA, 1000 bp, Homo Sapiens; identical to SEQ ID NO: 116981

SEQ ID NO: 288179 - DNA, 1000 bp, Homo Sapiens; identical to SEQ ID NO: 222203

SEQ ID NO: 288180 - DNA, 1000 bp, Homo Sapiens; identical to SEQ ID NO: 116982

SEQ ID NO: 288181 - DNA, 1000 bp, Homo Sapiens; identical to SEQ ID NO: 222204

SEQ ID NO: 288182 - DNA, 1000 bp, Homo Sapiens
aatgattcggctaccacctgttccagaggtgcagacaagaggtggcgagagcccccatcatgcccctcaacctatcccgttccttctgcctacaaataaaaagtgcaggctggaatgatctcagtcacatttggatctttttaaacactgtatagacggaagagcctgcattcctgaccgaaccttcagttggtctcggttgtcgttttttcttgctgctcctccccccatcacctgagctgttttctgttggccccttttgttttttggccttaacgctcctgctgcacagggtgaggtgcctccttggcacagactgtggatgcctctcccccagcagagccacacagccttcgtgacaactgctttccgttcccacattcacctcatcctgctctttagaaaaagcagtctttgtgcttgtggctgaacgcatcaccctggactctgctagtgtcttctgaggacactgatgacactgattaatgatacagacctttgcaggacctgatgagtgacccttctggagctggccaggtcctctgcagcaggcaagaccaatcaatcactgaacctgcctcatggcaccagagtgaacagggcaggcaggtagtaggcccagctggggaaatgggagagttcctgtccccctccacatatccctacatgaaatatgggaaagttgctgctattgattcagggtctgtcttggaggcagaggacccttggtggatagttggtcagtgcctggaaaacctgtcccagtttatcaggaacgcaggcctggggagcccccagtggcggggacagggccagatttcatgttgaccctggggatgctgtgaatttctcctgcaggagagacatcattgaattttttcaactgtatcagtagcacagtatttttgtatgaaaagtgggagacttctgaacagtaattcatttaattgcaaagcattttgaaataaaaaaaatcaaacttaaaaaaaaaaaaaaaaaa

SEQ ID NO: 288183 - DNA, 1000 bp, Homo Sapiens
ggggctgcagtagacccgccatggtcctcacagacccacacacgccctacgaggaggagcagcggcagtcagtgcagtctgaccagggctacatctccaggagctccccgcagccccccgagggactcacggaaatggaggaagaggaggaagaggagcaggacccagggaagccggccctgccactctctcccgaggacctggagagcctgaggagcctccagcggcagctgcttttccgccagctgcagaagaactcgggctgggacacgatggggtcagagtcagaggggcccagtgcatgagggcggctccccagggaccgcccagatcccagctttgagagaggagtgtgtgtgcacgtattcatctgtgtgtacatgtctgcatgtgtatatgttcgtgtgtgaaatgtaggctttaaaatgtaaatgtctggattttaatcccaggcatccctcctaacttttctttgtgcagcggtctggttatcgtctatccccaggggaatccacacagcccgctcccaggagctaatggtagagcgtccttgaggctccattattcgttcattcagcatttattgtgcacctactatgtggcgggcatttgggataccaagataaattgcatgcggcatggccccagccatgaaggaacttaaccgctagtgccgaggacacgttaaacgaacaggatgggccgggcacggtggctcacgcctgtaatcccagcacactgggaggccgaggcaggtggatcactctgaggtcaggagtttgagccagcctggccaacatggtgaaaccccatctccactaaaaatagaaaaattagccgggcatggtgacacatgcctgtagtcctagctacttgggaggctgaggcaggagaattgcttgaatctgggaggcagaggttgcagtgagccgagattgtgccattgcactgcagcctggatgacagagcgagactctatctcaaaaaaaaaaaaaaaaaa

SEQ ID NO: 288184 - DNA, 1000 bp, Homo Sapiens; identical to SEQ ID NO: 222205

SEQ ID NO: 288185 - DNA, 1000 bp, Homo Sapiens
cgatggctgtggaaacctttggcttcttcatggcaactgtggggctgctgatgctgggggtgactctgccaaacagctactggcgagtgtccactgtgcacgggaacgtcatcaccaccaacaccatcttcgagaacctctggtttagctgtgccaccgactccctgggcgtctacaactgctgggagttcccgtccatgctggccctctctgggtatattcaggcctgccgggcactcatgatcaccgccatcctcctgggcttcctcggcctcttgctaggcatagcgggcctgcgctgcaccaacattgggggcctggagctctccaggaaagccaagctggcggccaccgcaggggccctccacattctggccggtatctgcgggatggtggccatctcctggtacgccttcaacatcacccgggacttcttcgaccccttgtaccccggaaccaagtacgagctgggccccgccctctacctggggtggagcgcctcactgatctccatcctgggtggcctctgcctctgctccgcctgctgctgcggctctgacgaggacccagccgccagcgcccggcggccctaccaggctcccgtgtccgtgatgcccgtcgccacctcggaccaagaaggcgacagcagctttggcaaatacggcagaaacgcctacgtgtagcagctctggcccgtgggccccgctgtcttcccactgccccaaggagaggggacctggccggggcccattcccctatagtaacctcaggggccggccacgccccgctcccgtagccccgccccggccacggccccgtgtcttgcactctcatggcccctccaggccaagaactgctcttgggaagtcgcatatctcccctctgaggctggatccctcatcttctgaccctgggttctgggctgtgaaggggacggtgtccccgcacgtttgtattgtgtataaatacattcattaataaatgcatattgtgaccgttc

SEQ ID NO: 288186 - DNA, 1000 bp, Homo Sapiens; identical to SEQ ID NO: 222206

SEQ ID NO: 288187 - DNA, 1000 bp, Homo Sapiens
aagcacttgcatgagggggcaaagtctgcatctgctgaggagctgaggcggcaggctcaggagctggaggagaatctaatggagctcactcagatctatcagcgtctgaatccatgccatacccactgaccccagaccagtgcagccagcaggggaggtgagccatacacaggccacgacaaaatgcaggcattttattagggggataaagagggcaaggtaaagtttatggagctgagtgttagtgactttggcatttctgtagctgagcacagcaggggaggggttaatgcagatggcaagtgcaccaaggagaaggcaggaatgctggagcctggaataagggaggagaggggactggagagtgtggggaataggaagaagaaatttcctttagactaacgaatatattggggggaggaatagaggggaggtgtgcaggaaccagcaatgagaaggccaggaaaagaaagagctgaaaatgcagaaagccgaagagttagaacttttggatacagcagaagaaacagcggctccactaccgacctgcccccggttcgatgtccttccaagaatgaagtctttccctggtgatggtcccctgccctgtctttccagcatccactctgtcttgtcctcctggaagtgtatctcagtcagccagtggcttcttgatgatggcggtggaggtggtggttgtagtgtgatggatcccctttaggttatttaggggtatatgtcccctgcttgaaccctgaaggccaggtaatgagccatggccattgtccccagctgaggaccaggtgtctctaaaaacccaaacatcctggagagtatgcgagaacctaccaagaaaaacagtctcattactcatatacagcaggcaaagagacagaaaattaactgaaaagcagtttagagactgggggaggccggatctctagagccatcctgctgagtgccctgtgtgtaagtcctaataaactcacctactcaccaa

SEQ ID NO: 288188 - DNA, 1000 bp, Homo Sapiens; identical to SEQ ID NO: 116984

SEQ ID NO: 288189 - DNA, 1000 bp, Homo Sapiens
gtctcgatctcctgacctcgtgatctgcccgcctcagcctcccaaagtgctgggattacaggagtgagccaccgctcccggcccagaacttttaataaatataaatacacaggtaattttaacacatattcctgatgaaatcattattatctgcaatgctttcattctgctttttctcttaacaatggcataaacatttttcaaggtcaataaatgtttttcaaaatcgcatttgtattagtggctgtatagttttctatcaaatgtggaataaactcaatttatttctcccttttgttcttgaacatttaagatcattggttcatagttactaatcatgttacaacaaatattcatgtattccaaattttgctcattcctgattatttccttagatttccaggtatggaataattaggttgaagtgtttgaaatctttttttgttggtttgtttgtttttgagatgtagcttccctctgttgccccggctggagtgcactggcatgatctcagctcactcactgcaacctctgctgcctggttcaagcgattctcctgcctcagcctcctgaatagctggggttacaggtgcgcaccaccacgcccggctaatttttgtatttttagtagagacagggtttcatcatgttggccaggtgggtctcaaactcctgacctcaggtggtccttctgccttggcctcccaaagtgctgggattacaggcgtgagccactgcgcccggccgaagtgtttgaaatctttaagcatcctggtaaatattgagttttgtcaatatttagaaaagttgcatgattgacatcgcttccacccatgtttcagagcatctgatttgtcagaccctcaccaaaaatgggcttttatcaaaatgtaataaaaaataaatacaacttttccaatgacaaaaaaaaaaaaaaaaaaaaaaaaaaaaaaaaaaaaaaaaaaaaaaaaaaaaaaaaaaaaaaaaaaaaaaaaaaaaa

SEQ ID NO: 288190 - DNA, 1000 bp, Homo Sapiens
gatgaagttaattttatgtttttaacatggtatttttgaaggagctaatgaaacactggacatataattggtttaaacataaggggaattaagtctttgtagtctgtcatttttttaagtggatcctcttggatgcgttattttctcatcagctggctctgatcatgaatttgttgtaattttatgttgtactcagtgcatttaagaaatggtagagtattttaatcctattacttgactaagagtgtgaaggtagtactttttagagtgcactgagtgcactttacatctttatttaaatttttttttaacatcttatgtttacaggcttcctgtttgatgaagatagcaacggaaaactcaaaatggtggcagttcttattaccagttgttagtattgtttctggaaactgcttgccaagacaacatttattaactgttagaacacttgctttatgtttgtgtgtacatattttccacaaatgttataatttatatagtgtggttgaacaggatgcaatcttttgttgtctaaaggtgctgcagttaaaaaaaaaacaaccttttctttcaatatggcatgtagtggagtttttttaactttaaaaacatcaaaaattgttaaaatcattgtgttatctagtagtttataattatcggcttatatttccccatgaatgatcagaactgacatttaattcatgtttgtctcgccatgcttctttactttaacatatttcttttgcagaatgtaaaaggtaatgataattagtttatataagtgtactggctgtaaatgatgctaaatatactttatgcaattaagggcttacagaacatgttgaaactttttttacttttattgggaataaggaatgtttgcacctccacattttattgcttctggatgtgaaatcatgtaattatttctgctgttatataaagtgccatacttttaataaaggaaaatgtacatatgaaatcaaaaaaaaaaaaaaaa

SEQ ID NO: 288191 - DNA, 1000 bp, Homo Sapiens; identical to SEQ ID NO: 222209

SEQ ID NO: 288192 - DNA, 838 bp, Homo Sapiens; identical to SEQ ID NO: 116985

SEQ ID NO: 288193 - DNA, 1000 bp, Homo Sapiens; identical to SEQ ID NO: 116987

SEQ ID NO: 288194 - DNA, 1000 bp, Homo Sapiens; identical to SEQ ID NO: 116988

SEQ ID NO: 288195 - DNA, 1000 bp, Homo Sapiens
ctgagggaagtgggcaatgccatcctcttctgcctcctcatagagcaagctctgtctcaggaggaggtctgcgatttgctccatgccgcacccttccaaaacatcttgcctagagtctacatcaaagagggggagcgcctggaggtccggatgaaacgtctggaagccaagtatgccccgctccacctggtccctctgatcgagcggctggggacccctcagcaaatcgccattgctcgcgagggtgacctcctgaccaaggagcggctgtgctgtggcctgtccatgttcgaggtcatcctgacccgcattcggagctacctgcaggaccccatctggcggggcccaccgcccaccaatggcgtcatgcacgtcgatgagtgtgtggagttccaccggctgtggagcgccatgcagttcgtgtactgcatccctgtgggaaccaacgagttcacagctgagcagtgtttcggcgatggcttgaactgggctggttgctccatcattgtcctgctgggccagcagcgtcgctttgacctgttcgacttctgttaccacctgctaaaagtgcagaggcaggacgggaaggatgaaatcattaagaatgtgcccctgaagaagatggccgaccggatcaggaagtatcagatcttgaacaatgaggtttttgccatcctgaacaaatacatgaagtccgtggagacagacagttccactgtggagcatgtgcgctgcttccagccacccatccaccagtccttggccaccacttgctaagcagaagatcctgcagacccttatctggaggaggaagagaagcaggagagagaaagccacagccagcctgccataggatccaactggacaacgtgtgggatggacctggaaacaagcacctccccaaacacatcaccactccctagggcggggcctgtgcatgctctcccatgacatctccatgctggtttctccatagcataaatgaaaaaaaaaaaaaaaa

SEQ ID NO: 288196 - DNA, 891 bp, Homo Sapiens
accccatcccccactcctataccggtcctccattttggtgcctgcaaagctctgggaaagaatcccgggaaacgaaaaatggtgggtttgggggaagggaggtaaggggagaaagctggagggaggggctttaattggaggccccgtagaggacgcgcggaacttctaaggtgggaaaaaacgaaattaaaaaatcctttgatatcagggctctgaatcctgctggtcagagcaccaagcattcagtctctctccttgcctttgtcttacttgtgttcaaagaaaaacaaccagaaaaaaaaaatctcatcatggcaaatattcaccaggaaaacgaagagatggagcagcctatgcagaatggagaggaagaccgccctttgggaggaggtgaaggccaccagcctgcaggaaatcgacggggacaggctcgccgacttgcccctaattttcgatgggccatacccaataggcagatcaatgatgggatgggtggagatggagatgatatggaaatattcatggaggagatgagagaaatcagaagaaaacttagggagctgcagttgaggaattgtctgcgtatccttatgggggagctctctaatcaccatgaccatcatgatgaattttgccttatgccttgactcctgccatttatcatgagattaatactgtgattcccgctgttttctttttccttgcattttcctaatatgcctttactgatccgtttgctgtgaaccctatgttatttccatgtgtcaagtgggtcttgtgttgccagcttctatttgaagattgcctttgcactcagtgtaagtttctgtcagcagtagtttcacccatttgcatggaaaaatttaaagctaataaagcaatttaaaaagc

SEQ ID NO: 288197 - DNA, 1000 bp, Homo Sapiens; identical to SEQ ID NO: 222210

SEQ ID NO: 288198 - DNA, 1000 bp, Homo Sapiens
atattaacatgtcttcctttttgaggtaaagatatatactttgtcaaatatcattttgtcatcctctaaatataaatccaaatacctcagctaagtaattctattttattatttttactgttatgtatgtttttaatcatatttcttaggaagtataggctactggacttagaataaaaagtccccaaacccaaacaaatggtttatgaaccagagtatatgtggaagattctttgctggtcttgctctgtgtgcatctgaagcttctttggcctagattttagcacaaacctgagtatatctcttctactttcatcatgtgttctgtaccttctttttgtttcattgggcatgctagggaaataggtggattttgtgtgtaatgccatcagtttttatgaaagcttgatgaggtataggtcatttgttttgagtatgtgggccagaaatttaaaattagaaatttgtttttctgttgagtatataaacaaaaattggtcccaattctaacaggtttaatccttcttgaagccaataagttttatcttttataatctgtcaggatgaaccactccttagcttttatccaatattaaactgcaagtgttagcactgaaatattgtcattgatagggaaaatatctattctttgagtcattgttactgaggcagttgagtgtaaggagctggctgcagtttattctacttaaccctttaaggctgaattgtcaaatgtacattgttccatgtcgttagatggaacatggaagccattgtctaatcaactctatcattagtgacttgatgtctcataccttaattttgtaatgatttttattctctgttacaaagacttgaaatacgtattaaatgcacgttaatgttttgctttgcattttaggttcagattatgacttgattgaaataaatgtgcctatacattcatttgctttgtactataaaaataaaaatgatttcttaagttaaaaaaaaaaaaaaa

SEQ ID NO: 288199 - DNA, 1000 bp, Homo Sapiens
gaggccccttggttggtggggggccagcctgccctgtggagcatcctgctgatgccgcccagatatggcattcccttctaccatagcacccccaccactggagcctggcaggaggtctggcgggaacagaggatcccactgtccctaaatgcccccaaagggctctggagccagaaccagttggcctcctccagccctaccccaggttccctcccccagggccccgcacagctcagccctggggagatggaagagtctgatcaggggcacacaggcgcacttgcaacctgtgcgggtcatgaggacaaggcaggctgcccacctcgcccgcaccctcccccggcccctcctgctcggtctcggccctatgcgtgctctgtctgtggaaagaggttttcactcaagcatcagatggagacgcactaccgagtccacacaggagagaagcccttctcctgtagcctttgtcctcagcgctcccgggacttctcggccatgaccaagcacctgcggacacacggggccgctccgtaccgctgctccctgtgcggggccggctgtcccagcctggcctccatgcaggcgcacatgcgcggtcactcgcccagccaactcccgcccggatggaccatccgctccaccttcctctactcctcctcgaggccgtctcggccctcgacctctccctgttgtccttcttcctccaccacctgacggggtgtcggtagcgtcttagccaagagtccaattaaagaacgaaaagcgggccggctcggcttctgacctggcaccgctgctacggcggcctagcaaattccgccccagaagcgccccaggaagggcgccgagtgccctctcctggacgatcgcgggtcgcagaagcccaggccagcgagccctacagagtgaggacactgaagtgtgcaggagcgaaggttaacagtaggggagattgtcgatctcatcaccataataaagagtttcctgtgccctcccttca

SEQ ID NO: 288200 - DNA, 1000 bp, Homo Sapiens; identical to SEQ ID NO: 222212

SEQ ID NO: 288201 - DNA, 1000 bp, Homo Sapiens; identical to SEQ ID NO: 222213

SEQ ID NO: 288202 - DNA, 1000 bp, Homo Sapiens
cattgactacggcaacagagaggtcctgccatccacccgcctgggtaccctatcacctgccttcagcactcgggtgctgccagctcaagccacggagtatgccttcgccttcatccaggtgccccaagatgatgatgcccgcacggacgccgtggacagcgtagttcgggatatccagaacactcagtgcctgctcaacgtggaacacctgagtgccggctgcccccatgtcaccctgcagtttgcagattccaagggcgatgtggggctgggcttggtgaaggaagggctggtcatggtggaggtgcgcaaggagaaacagttccagaaagtgatcacagaatacctgaatgcccaagagtcagccaagagcgccaggctgaacctgtggcgctatggagactttcgagctgatgatgcagacgaatttggctacagccgctaaggaggggatcgggtttggcccccagcccccgtcacgccagtccctcttcctctgccgggagggtgttttcaactccaaaccccagagaggggttgtacattgggtccagctttgcttcagtgtgtggaaatgtctcgtggggtggcatcggggctgcggggtggggaccccaaggctttctggggcagacccttgtcctctgggatgatgggcactgctatccacagtctctgccagttggttttatttggaggtttgtgggcttttttaaaaaaaaaaaagtcctcaaatcaggaagaaacatcaaagactatgtcctagtggagggagtaatcctaacacccaggctggccgccagctggcacctgcctctatcccagactgccctcgtcccagctctctgtccaactgttgattatgtgatttttctgatacgtccattctcaaatgccagtgtgttcacatcttcgctctggccagcccattctgtatttaaagctttttgaggcccaataaaatagtacgtgctgctgcagcccttattgatcaaaaaaa

SEQ ID NO: 288203 - DNA, 1000 bp, Homo Sapiens
cagagaaggagataccccgttgcatgatgcggtgagactgaaccgctataagatgatccgactcctgattatgtatggcgcggatctcaacatcaagaactgtgctgggaagacgccgatggatctggtgctacactggcagaatggaaccaaagcaatattcgacagcctcagagagaactcctacaagacctctcgcatagctacattctgaggcaaacgacagactcttaatcagtaaatgttcactggcattttgaaggcatggcccaagagaagagacactagccataaaatctagtttctatttatcaacgtgttgtgaagatgtacctaatgaagttttgagaaagcacagggttataggtgtttaaatttcctttagtgaaactcttatttatttttatgtattcctgtttatttatttactgccacgctactgatattcagaccttcatgatcatccatctggtgagcagagcttcatttgtatataacactttcagagccttcccacccataggtagttcttaaaccaggtgaaagagcaaagttcaagtgcctacttatgtgtcattcgctcatgtaagagtttttaagagagggctgattatcacagccctcttttctcctgaatttttaatgcagaagtttgaatgaagcaagggaaggcatgtagggacaggaaaggaaacaatggaaggaaagtgattctgtgaaaaggacagtgaagccagctattttacccccaggctggattttttttttttttttttttttttttttttaccgagtacacagagtacccaagtgaagagaacgtcatgagtgtaagtgcaaatcagtggaaggagcggcaaactgggacatgcagaattgaatttgctcaaaaaagatgaaaggaaatgcaaactgtaaatgtataaatgtatattgtattgtatgtacattttatattcataataaaggcaatcaaactcaaaaaaaaaaaaaaaaaaaa

SEQ ID NO: 288204 - DNA, 1000 bp, Homo Sapiens
tctccgtaggatgaattagaaataaattgtgatgaaaagaaattaactgcttatttatgaatctaatcatttagaaatgtctgagagtaacactgcattcttatagaaacaaagcacaaattgcattcaagctctgaattgattttttgcttggagctgttgttacagtagctgtaattttgctaccagaatgtcttaattttttaaatttgtttttatttctaagctcttggcaatgacaataattataattttaacatatcttcactgtagtcaacatgtagagtctgcttccctcattattgcattgctaaggcctttttaaaaagcttatgcttacataatatactcttttttatggacacgttatatgtttccaaatctgtgtattgtgatttttacatactaatgaatataaacaggtgattttaaaatattactgtgcttctttggttgaatgagctggtattgatgtaaaatactctgtcattgatggaccactacctgcagctaagcagtgagcagaatctccgggaaatgacttagtctggccacatgcatagcccatcttcataatgtcgcagcagaaggttctttgtggttaaaagttttaaagcctatttctttataggtaaccctctcaggtatatttacctggtagaaaaacatgtagattgtttctattacttaaatgttttaattggactgtagtttagaaattacaggaccagcttgttacagattatacactattctgttacttttatttctgaaacttaaaaacaataaattctttttctgtgtttctaggttagaacttttttattttattgcacactgaacagatactgttgcttattgaatattgtgtaaacccttctttggctttccttgcccattgcaatttgatttaagcctactagagccattgtatgtgacagctatattgtattacaaagtaaaaatatatgagtgtattgaaaaaaaaaaaaaaaaaaaa

SEQ ID NO: 288205 - DNA, 1000 bp, Homo Sapiens
acattttcaattctcatgtttgagtgattttaaaatgttttggtgaatgtgaaaactaaagtttgtgtcatgagaatgtaagtcttttttctactttaaaatttagtaggttcactgagtaactaaaatttagcaaacctgtgtttgcatatttttttggagtgcagaatattgtaattaatgtcataagtgatttggagctttggtaaagggaccagagagaaggagtcacctgcagtcttttgtttttttaaatacttagaacttagcacttgtgttattgattagtgaggagccagtaagaaacatctgggtatttggaaacaagtggtcattgttacattcatctgctgaacttaacaaaactgttcatcctgaaacaggcacaggtgatgcattctcctgctgttgcttctcagtgctctctttccaatatagatgtggtcatgtttgacttgtacagaatgttaatcatacagagaatccttgatggaattatatatgtgtgttttacttttgaatgttacaaaaggaaataactttaaaactattctcaagagaaaatattcaaagcatgaaatatgttgctttttccagaatacaaacagtatactcatgaattgctaagtgtttttttatttttgcatatttattgaactgtctaattgaatacagcttgctcttgtcacctcttcaagctttcaagcctttatagaaaagcttctttgtggcttacactggaaattatgaaagcagtttttctcctaagacttttggtttctcgcattgcctctcagactaagcactaaaaagcaaagcaaaacagaactagttctgtcttaatgaaatatatcaacccaaaagtgtaatgaggaaaatgcttcattagtttcccctagcagacttttacttctcttacactgctacaccattactttcttgagacatttgtaagtcctttgatacagaagagttatatttaggaggctttaatgaaggg

SEQ ID NO: 288206 - DNA, 1000 bp, Homo Sapiens; identical to SEQ ID NO: 222215

SEQ ID NO: 288207 - DNA, 1000 bp, Homo Sapiens; identical to SEQ ID NO: 116992

SEQ ID NO: 288208 - DNA, 1000 bp, Homo Sapiens; identical to SEQ ID NO: 116993

SEQ ID NO: 288209 - DNA, 388 bp, Homo Sapiens; identical to SEQ ID NO: 116994

SEQ ID NO: 288210 - DNA, 1000 bp, Homo Sapiens
tcttattttttgagactccttgatccaccctggaacagtcgcctgtagtcctggtagctgttgtgcttggaaataacgagcgcatccttgcctcagctacctgctcacagcccatgggtggactcggccccctggggttcagacccaggtccgttcggcctagtgatgatgtcatcgtccatcccatcttcctttgcccccaggaaaggacgcatccaccggtagcggccccagctgactgtcgccgtgtgctggggatctgaaatgaggcctgccagggcccctgtgtgctgtgctccagagccttcgctcccatcagggttggcatcatctgatggcatgtccaagtgtgcccagcagcggatgctgaagcaccagagctcaaggccttcacctgctctaggccagccctgtcaccacctccactgccatgaccaggccgaaggcagggaacgccctccccagtcccgctgtccagcaaggccccgagacttttcttctgtgatttccaaaagcaaggcagccgtgctgttctagttcctctccatccgccacctcccctcccgctgccccagaagtttctatcattccatggagaaagctgtgttccaatgaatcctacctcttgcccagtcccaggcagagtaagcagggcccacctagggaccaagaaagagtaggaagaaggggacgagccgggagcaaaaccacctcagacacccgggccttctcagccttctccccgcggccagctgggtctccggggaccctgggccctgggccgcccattcctggccctcccgctgcatctcagacctgacacccaacggggggatgtggtggcctgtgcccaccttctctccctcctcccgacccgccccctcgcccccacccctgtgtgtttcgccagttaagcacctgtgactccagtacctactactggttttgggttggttgttctgtcttttttttaattaaataaaaacatttttaaaatgtt

SEQ ID NO: 288211 - DNA, 1000 bp, Homo Sapiens
aatttagtaaaggaagcgatcaattactagaaaagcaagtaggccagctagcagctgcaggaattaatgtggcagtggtgttgggggaggtcgacgaggagaccctcacactggcggacaagtatggcatcgtggtgattcaagctaggtcttggatggagatcatttacctgagtgaggtgttggacacacctctgctgcctcgtctgctccctccccagaggccaggcaagtgccagagggtttacaggcaggagctgggagatggtttggctgtggtatttgaatgggaatgtacaggcacacctgccctcactgtggttctcaggggagccaccacccaggggctgcggagtgcagagcaggccgtctaccacggcattgatgcctatttccagctatgtcaagatcccagactgattccaggagctggggccacagaaatggctttggcaaaaatgctttctgataaaggaagcagattggaagggcccagtgggcctgcattcctagcatttgcctgggccctgaagtatcttcctaaaactttggcagagaatgcaggcttagctgtctcagacgtgatggcagaaatgagtggagtgcaccaaggtgggaacctcctaatgggtgtgggaactgaagggataataaatgtggcccaggaaggggtgtgggacaccctaatagtcaaagcccaaggatttcgagcagtggctgaggtggtgctacagctcgtgactgtagatgaaatcgtagtggccaagaaaagtcccacacatcaggagatctggaatcctgactctaagaagacaaagaaacacccacctcctgtggaaacaaaaaaaatccttggattgaataactagtgataccctcaataaaacagggattgccaagaagggaacaatcaccccaaaaatgaatgtttgcctttattccgtgtttggtacttgattcactttctttaaataaaaacatgaaggaaaaaaaaaaaaaa

SEQ ID NO: 288212 - DNA, 1000 bp, Homo Sapiens; identical to SEQ ID NO: 116995

SEQ ID NO: 288213 - DNA, 1000 bp, Homo Sapiens; identical to SEQ ID NO: 116996

SEQ ID NO: 288214 - DNA, 1000 bp, Homo Sapiens; identical to SEQ ID NO: 116997

SEQ ID NO: 288215 - DNA, 1000 bp, Homo Sapiens
cccccgagatggagcccaattaggtgcctgcacccgcccggtggacgtcagggactcggggggcaggcccctcccacctcctgacaccctggccagcgcgggggactttctctgcaccatgtagcatactggactcccagccctgcctgtcccgggggcgggccggggcagccactccagccccagcccagcctggggtgcactgacggagatgcggactcctgggtccctggccaagaagccaggagagggacggctgatggactcagcatcggaaggtggcggtgaccgagggggtggggactgagccgcccgcctctgccgcccaccaccatctcaggaaaggctgttgtgctggtgcccgttccagctgcaggggtgacactgggggggggggggctctcctctcggtgctccttcactctgggcctggcctcaggcccctggtgcttccccccctcctcctgggagggggcccgtgaagagcaaatgagccaaacgtgaccactagcctcctggagccagagagtggggctcgtttgccggttgctccagcccggcgcccagccatcttccctgagccagccggcgggtggtgggcatgcctgcctcaccttcatcagggggtggccaggaggggcccagactgtgaatcctgtgctctgcccgtgaccgccccccgccccatcaatcccattgcataggtttagagagagcgacgtgtgaccactggcattcatttggggggtgggagattttggctgaagccgccccagccttagtccccagggccaagcgctggggggaagacggggagtcagggagggggggaaatctcggaagagggaggagtctgggagtggggagggatggcccagcctgtaagatactgtatatgcgctgctgtagataccggaatgaattttctgtacatgtttggttaattttttttgtacatgatttttgtatgtttccttttcaataaaatcagattggaaca

SEQ ID NO: 288216 - DNA, 1000 bp, Homo Sapiens; identical to SEQ ID NO: 222221

SEQ ID NO: 288217 - DNA, 1000 bp, Homo Sapiens
gttcctctctggaaaatatcaatttggaaatgctgcctttcaaatcaatgccatgatcatccatattgttgagtttgttgttggtgttccagaagtgtccccattttacaactttatgcacacacctggcaaatcattaacatgagcattcaacagtactgggatgggtggggtgggggtagggggctcaccaacagaactggccagttgacattgcctgaaaaggcaccacctttaagggccagttgtggggttggtaagcacagttatgaaaatttctatctagcctccgttttgaatggttttaagaaattttgtatatggaggatggaaatgcttatatatttattgaaaatccttttatttgaaattaaaattatttggtatataattgtttgatatttggggagggttttggaggggagataatgtcactgataaattaaaagcctgttgattttgcagaaaggtactgttagtgactgataaggatgcctttgttttgtacatgaaccaaatctttgttttacatttcttttatccaaaatatttaggcatctgacattttcaaccagaatttcaattatatactgtgatttttatttgttgcaatacattacaatttcagaggtactttggggctcaaaagctaggatttctaagtcagtatgtgcatttcacacgataaagctgttaatggtgagcaaagtattatatactaactagatttttccacatctgtatagtatattatatgtattttgtggtattgagagtatagaaagtttagagtgtcaaacatgcgtttaatgtgtatttttaaacaaatttatggcaattaaaatatttggagacaagggtatcacatttcaatttgtaaagatctttttaactctactgtgtcattaagatgctttgtacaatgccaaaccatagttggagaaactaagtttaataaatatcaaatagattttctgtattaaagttactgaacactgta

SEQ ID NO: 288218 - DNA, 1000 bp, Homo Sapiens; identical to SEQ ID NO: 116998

SEQ ID NO: 288219 - DNA, 1000 bp, Homo Sapiens
gctctggataaggcccggttaaagagcaaagacgtcaagttggctgaggcacaccagcaggagtgctgccagaaatttgaacaactttccgaatctgcaaaagaagaactgataaatttcaaacggaagagagtggcagcatttagaaagaatctaattgaaatgtctgaactggaaataaaacatgccaggaacaatgtctcccttttgcagagctgtattgacttgttcaagaataactgatatgccttcactcagaagaaaagaaatgaatgtgaaagaaagccaagcatcacttgcacttaaatcattaccacggaagatatattagcttcaactttagtttaaaattatgtgaataaatattttgatttctacaaatcttaacatttaaccatgttggtttaaaaatattattgcttgctacttggacataactaatttttccttgtgcatttaatacctctgggcagaatccaaatactgggttctcccgtagttcgtctttagttactaagaaagggtgtaggacacattagccttctggaaacaagtagaagccatcacctggcccatgtccctacaaacccatgattgtcagggaggtgccagttacagcaggtgattcagctacttgaggtcggtaacagaccttccattcctcactgaaggtggggtttgtgtttttgttttgccctgttactccactggtagtcatctggtgtttgtactataacaacagcaagaaaatctcatttatctttatatactctttgcacctcctttttttagtcgagatataaatatttgaggggagagaaatatctacaggtatatatggaaacaaataatgtggtctgctttataagatggccagatctacattaggaaaagtataagccccctccctaatggccgctggggggtgagggcggtgtgttgtatgtctttgggtgtttgtttttttataaagcatataataaaataatcgtgctactaa

SEQ ID NO: 288220 - DNA, 1000 bp, Homo Sapiens
tctctggggcaatgtgaaaataaaagaaaaatctctgaggataagctgaagaatcttcgtataaaactggcactattgttgcagaaactccaactgggtggtccagaaggtgacctggagcagactgacacttatttagaagctttgcttaaagaagataatcttctcttccagaacaatttaaataaagtaactatagatgcaagacatagactccctttagaaaaaaatgaaaagacttcggaaaattaagtcagagatggtattaccttttaaaaaatgctaataagaaaattggaagattcttttaaaaatttttcttttttgttgttgttactgtaaagtctattctgtttaacaataagaaataagaaataatttttttcaaataagaaaattgtgtactctagaaatggagaccgatttacaatttatgtattccctaatccaattatctaaatcttccttttctttcagaaatattaataatatctagagttctctaattttcatgtgagctactgaaaaaaatgaaaatgtcactcaagcttaacttttgttattccttaaaagattgttattgtaattttgttattccttaaaaacatttaaaagcagattttttcaaaatcgatatgtgaaggactacagaatcacctcctcttgaagatattgaaaaagaaagacattatgccctttctccactatagccaacactcagtcaagcagaaaatacaaatccccccaaaactttgagacatagcttatataattttattatttagtcatagtaaaagaataaatctcctaagcataatatgtatacatattacacatatgtaaaaattgttgttttacatttacatatacgtaaagaagtatgtttttacacttttcttgataagtgttttttttttgtttagaaatgtctgaaactttagacaaaaacagtaaaacatttaatattcatttgtgaaaaaaaaaaaaaaaaaaaaaaaaa

SEQ ID NO: 288221 - DNA, 1000 bp, Homo Sapiens; identical to SEQ ID NO: 116999

SEQ ID NO: 288222 - DNA, 1000 bp, Homo Sapiens; identical to SEQ ID NO: 222224

SEQ ID NO: 288223 - DNA, 1000 bp, Homo Sapiens; identical to SEQ ID NO: 117000

SEQ ID NO: 288224 - DNA, 1000 bp, Homo Sapiens
cttcaagagaggggcaggggagattgatgatcaggtgcccctgttctcccttccctcccccagttgtggggaataggaaggaaaggggaagggaaatactgaggaccaaaaagttctctgggagctaaagatagagcctttggggctatctgactaatgagagggaagtgggcagacaagaggctggccccagtcccaaggaacaagagatggtcaagtcgctagagacatatcaggggacattaggattggggaagacacttgactgctagaatcagaggttggacactatacataaggacaggctcacatgggaggctggaggtgggtacccagctgctgtggaacgggtatggacaggtcataaacctagagtcagtgtcctgttggtcctagcccatttcagcaccctgccacttggagtggacccctcctactcttcttagcgcctaccctcatacctatctccctcctcccatctcctaggggactggcgccaaatggtctctccctgccaattttggtatcttctctggcctctccagtcctgcttactcctctatttttaaagtgccaaacaaatccccttcctctttctcaaagcacagtaatgtggcactgagccctacccagcacctcagtgaagggggcctgcttgctctttattttggtcccggatcctggggtggggcagaaatattttctgggctggggtaggaggaaggttgttgcagccatctactgctgctgtaccctaggaatatggggacatggacatggtgtcccatgcccagatgataaacactgagctgccaaaacatttttttaaatacacccgaggagcccaagggggaagggcaatgcctacccccagcgttatttttggggagggagggctgtgcatagggacatattctttagaatctattttattaactgacctgttttgggacctgttacccaaataaaagatgtttctagaaaaaaaaaaaaaaaaaaa

SEQ ID NO: 288225 - DNA, 1000 bp, Homo Sapiens
gggctttagccgccagtcttcactcctgttcaagattctctccagtgttcggaatcatcagatcaactcagatttggctcaactactgttacgactagattataacaaatactatacccaggctggtggaactctgggcagtttcgggatgtgaaaatttctggctcataaattgaaataacagccacgttcccaaggttgtaacagaagattcaaaacatcccattctagccacacacaaataaatatctgcggcttagtgataggactctaccttttctcctagaagcagttactgaacatccaggagtacaactccttcccatcattcccatgtggaagggtctctcccatcaaggagaacatgtggcatctctgatcctttacattgagaacatttgttggatatgttcatttattcaatagtcatttattgagcacctactacgtaccttggtactgttcaagctgtgggagatacagcggtaaacaaacaatatagagcagaaagttaaatattttatggttcatatgtgaaaaagtaattatgtttataaatagactaactgctggatgttaccaccaagtaagaaagcaacaggtaagataggctttctctctccctataccaagtaatttatacctacacagattgggcaattctagctaatgaaaatatacttaaaagtatttcttaggccgggcatggtggctcacacctgtaatcccagcactttgggaggccgaggcgggcggatcacctgaagtcaggagtttgagaccagcctgaccaacatgatgaaacctcgattctactaaaaatacaaaaattagccaggtgtggtggcatgtgcctgtaatcccagctactcaggaggctgagacaggagaattgcttgaacctgggaagcagacgctgcagtgagctgagattgtgccattgcattccagcccgggcaacaagagcgaaattccgtctcaaaaaaaaaaaaaaaaaaaa

SEQ ID NO: 288226 - DNA, 1000 bp, Homo Sapiens
aatttcttttggttcataacaaaacctgcttaagagaatttttttttttgacaggtggacgtgggaatggaaattcttaatggtttctggagtagaaatctgtacttagaaaactagtttttgggtcagttccattttgatagaagtgaatacatagacagcttttattgacttccatatgtaacaataccgtttaagccttaaatcacagatatgtgccttctcagatacagtaattcttgttcaaccaatgtacaaaatccataaagaaacccctgttggataatgtttgatgtgtctattccttccatggaatggagcactatgtatgaatgttgggtttctttgtacttgttaagccacatttgaggtttatggtaaaaatcatcttttgagtttgctctttggtttttcttcattccttttgaggattgggaaaacagaaagattctttgatttgggtaatgaagaggtaatttgggacagtgtggtggtaccaggaagaaagaggattggaaaggccagtactgttttagttgctcggcactgttggttttgttttaatgtggttgccctgtccactacatggttctatcagtagtgtaatccattttcaatgtaaagctcttttagtttttgtcatagacataaattaatattttgagaggcatccctcacctgttcatttcttctgtgttgaaatgaagtacttaaaattaccgttatacatgaactttgtggactgtaagatttgttatatatgttcaaatgccttttagctggctttttaattaatatgcctgttttgagtgcttaatacaatgtaatgtgattgtaaatcatacctattttaaatcattccttcctgtatatttgtactcagagagccttattttattcttccagcagaattactacttgtgatagttcatttacattccccagaatgtgcctctagtgtgaattttgtattcttattaaacgtgtttgctgcagtaaa

SEQ ID NO: 288227 - DNA, 1000 bp, Homo Sapiens
cccaccactaaagttttttaagttccatattttctccattttgccttcttatgtattttcaagattattctgtgcactttaaatttacttaacttaccataaatgcagtgtgacttttcccacacactggattgtgaggctcttaacttcttaaaagtataatggcatcttgtgaatcctataagcagtctttatgtctcttaacattcacacctactttttaaaaacaaatattattactatttttattattgtttgtcctttataaattttcttaaagattaagaaaatttaagaccccattgagttactgtaatgcaattcaactttgagttatcttttaaatatgtcttgtatagttcatattcatggctgaaacttgaccacactattgctgattgtatggttttcacctggacaccgtgtagaatgcttgattacttgtactcttcttatgctaatatgctctgggctggagaaatgaaatcctcaagccatcaggatttgctatttaagtggcttgacaactgggccaccaaagaacttgaacttcaccttttaggatttgagctgttctggaacacattgctgcactttggaaagtcaaaatcaagtgccagtggcgccctttccatagagaatttgcccagctttgctttaaaagatgtcttgttttttatatacacataatcaataggtccaatctgctctcaaggccttggtcctggtgggattccttcaccaattactttaattaaaaatggctgcaactgtaagaacccttgtctgatatatttgcaactatgctcccatttacaaatgtaccttctaatgctcagttgccaggttccaatgcaaaggtggcgtggactccctttgtgtgggtggggtttgtgggtagtggtgaaggaccgatatcagaaaaatgccttcaagtgtactaatttattaataaacattaggtgtttgttaaaaaaaaaaaaaaaaaaaaaaaaaaaaa

SEQ ID NO: 288228 - DNA, 926 bp, Homo Sapiens; identical to SEQ ID NO: 29969

SEQ ID NO: 288229 - DNA, 1000 bp, Homo Sapiens
gattcctttagtttctgctatttttctgtggaaaaccactgctggcacaagcagtgactgtttggcagcttcaagtttagagctgtgaagacaggctgccattcacagtattttgctttttgacagtacaagatgctgtgtaactgttttaatacagcaaatagtaactctccaaatcctgttgcttttatgttaaataagataacaagaattggagcatgcaaagaatgggacttggataatgacttaagctttatatgtaaagaattttagaagatcttggtgctgctattcctgctggaggaatgaatagatggctgtttcagttaagctattagtaataaaagtgaacattgctactatctgagcctacatacataacttgtgtgatttcaaattaaacttgcattatgtgttaattttcttgcatctaaaaaagcatagaattcctactcacacagctcagcaacaaccattttgatggtaacagttaatttctttcattagttttttaaattcagggttctggatattaaattaaaatggcattcttaaagattttcttcaaaaagcaatcctaaatgaaagtgtgtaaattataagaagctggcgatcttttgatatgctgtttcacaggatcctgacactggagggcagctgtcttgtgcattacttgtgttcccagcaccaaagttgtgggacatgttgctgtagactgctgcgcagtcctgggtgcattcagtctctctgcctctgcctgcctcctggtccccactttaaaggctgtgcagctccttaaataataaagctggaaaatatttttagtcgggttatcaaatttgatttacaaaaacgctaactttgtttgaaatgcaaacaggtttgaaaatatgtattaagtactttgtattctggaagcgtgaattgcttttgaagtctgtcagtattactggtatttttaaataaagaagaatttttctccaaaaaaaaaaaaaaaaaa

SEQ ID NO: 288230 - DNA, 1000 bp, Homo Sapiens
ggaatactacaacacatctttgcaggattctttgcaaattctgccattcctggatctccacaccctttttcctggagcgggatgctgcactccaaccctggggactatgcctggggtcagacagggcttgatgccattgtaacccagcttttaggacaactggaaaacacaggccctcccccagctgacaaggaaaagatcacatctcttccaacagtgacagtaactcaggaacaagttgatatgggtttagagtgtccagtatgcaaagaagattacacagttgaagaggaagtccggcagttaccttgcaatcacttctttcacagcagttgtattgtgccgtggctagaactgcatgacacatgtcctgtatgtaggaagagcttaaatggtgaggactctactcggcaaagccagagcactgaggcctctgcaagcaacagatttagcaatgacagtcagctacatgaccgatggactttctgaagctaaagaccacacctgaatcagggctgtggtaatcatcttaccatagctgtaaattgtatcaaaacaaaaaattagtagatggatttaggaatatgtaagaaactcaacacataatataaatgcaatgaatgtttttcttctttaaatttaaagttagtatctacagatggaattgtatctacaaccaaatgcctcttatccctgaattcagagtgataattttataagtgtgaaacttaattatgtagggctccccccgtctgaatagaattaattccttaaagtctagttagggtcctgctgtctgtcatgttgccttgtaacggatgtttccacctccttctccaacctctaccccaccattagtgtattttactataaaaacagtggaaccacagccctaaagtcctgctgatataaagtccttttgtcttaattgtatttaaaaaaaaaaaaaaactactcttgatcacattagctatgaggcgaggtcaaattcaggtaaaaa

SEQ ID NO: 288231 - DNA, 1000 bp, Homo Sapiens; identical to SEQ ID NO: 222226

SEQ ID NO: 288232 - DNA, 1000 bp, Homo Sapiens
ctgtggatgccgcgagggacggacacacgtccggggcacccacgaggagggcccccagcctgggagactggccctgcggcctccacgtcaaactctcttcccaaagccctaacagaccagtggccgaggtgtggctcttattgcatccatccctgaagatgtgtggctgttgctgtcacctggagtccttttggggccaagatgtgtgtgcacccggggtcgtggccattcactcccaggcaggggtgagggtggcctggcccaggaggccaggaaggagggccctgtctgcctccacctctgggtgcaccccctgcctaccaccctcccttctagagagcacatcgcctgaccggggagaagtggggccgtggttcgagggagggctggccaggggtgggacccttatgagactcagtctgtgagtaaaactgggggctcaaatgcccaggatgaggggatcagtgactgtctaggaggatcccttgccttgtaggtgccccaagaccgcagggtagaaatcagccgggatgcctgcatcccacccccggccccagggcccaccacataaaatctgggagcccagagctgctgaggtgtggtcagctcccctaaaatgggcacggcccagcctgtcccatgaggaataaaggcccctggcccccttgagagagggcttgttggtgagggctgactcctgggggcccccaaggctcccctcctgtggggaggccaccttttaaggcaccactagcagtcaggatatggtggcatcagccctggggcctcctgggtggcaggggggcagcagctctcctccccactcacaggccctgcagtgctcatttggaattcctcccaagacccctggccacccagaccccccattcttcctaacactggcaataaaccctcaactgtgaaaaaaaaaaaaaaaaaaaaaaaaaaaaaaaaaaaaaaaaaaaaaaaaaaaaaaaaaaaaaaaaaaaaaaaaaaaaaa

SEQ ID NO: 288233 - DNA, 1000 bp, Homo Sapiens
ctgtggaatcatcaaggtttgtctacagaaatgaaagcatcatcccactgtctccctttgaagtcaaagtgggtgtgtataataatgaaggagaaggatccctgagtactgtgaccattgtctactctggggaagatgaacctcaactggccccaaggggaacttctctccagagtttttctgcttctgaaatggaggtttcatggaatgctattgcctggaatagaaacactggaagagtgctgggctatgaggtcttatactggacagatgactccaaagaatccatgataggtaaaattagagtcagtggaaatgtcacaaccaaaaacatcacggggctgaaagctaataccatctactttgcttccgtaagagcttacaacactgctgggacagggccctcaagccccccagtcaatgttaccaccaaaaagtctcctccaagccaaccaccagcaaacattgcctggaagctgacaaactctaaattatgcttgaactgggagcatgtaaaaaccatggaaaatgagtctgaagttttggggtacaagattctgtaccggcaaaacagacagagtaaaactcatattttggaaacaaacaatacatcagctgagcttctggttccatttgaagaagactacttaattgaaataagaacagtcagtgatggtggagatggaagcagcagtgaggaaattaggattccaaaaatgtcaagtttgagttccagaggaattcaattcttagaacctagcacccattttctttccattgtcattgtgatttttcactgttttgctattcagccacttatctgatgaataaaaccataaatctttgagagttttttgaaagcaaatcattctgtatatatgctctccagcctctgacacaagatgcgttcttaatacagacttgtttgcaaagaaaaaaaaaagtatattattaaaatcctgtaaatatctatggtatattaataaaacaattttaaaca

SEQ ID NO: 288234 - DNA, 1000 bp, Homo Sapiens; identical to SEQ ID NO: 222227

SEQ ID NO: 288235 - DNA, 1000 bp, Homo Sapiens
gggcagaccagatcgtgggctctctctgtccatggaaaggggctgccctccccagcgtgattcttacagccggtcaggctgcagggtgcccaggggcggaggccgtctaggaggccgcttggagagaggaggaggccggagcagatactaagcaggaacagacttgggaccaaaaatcccttttcaacgaaactaacaaaaagaagaacctgttgtatggtaactacccaaggactagtacaaggaagagttgtttttaccttttaagaatttcctgttaagatcgtctccatttttatgcttttgggagaaaaaacttaaaattcgtttagtttagttttggaattgttaacgtttctttcaacaagctcctgttaaaagtatatgaacctgagtactagtcttcttacatttacaagtagaaattcgattaatggcttcttcccttgtaaattttcttgataaatgaggcaaacagttctaagatctttgataaacatctgctcacctaaaatggaaaaacggatcattctgctcatttaaaccaactagattttgggtggagagtgggagggattggtgtatgctactcttaagatttcagggtatctttcaaactgaatctttgtttccagtattaaaaagcaaacaaccagcaacaacaacaacaaaagtgatttagatcaaatgtttatgtaaagaaaattattttcactcagtaaatctgaaaagtaaatggataatgttggccatgttttgcctttttgctttttctttgggaatctacaggatcacctgtcccctcactcccaaaagtactatctatgttttgaacaacagtggaatactatatcaaaggtttggccaaccaaccacaaagctacaaaacaagcaaatcccaaatccttcaattgatagcattcattttcactaccaacaaatttattaagaaacaagtagaaaataaatcagtggtcgacttggggaccgtaatggcttc

SEQ ID NO: 288236 - DNA, 386 bp, Homo Sapiens
ccaggatcagcatggccgtccgccagtgggtaatcgccctggccttggctgccctccttgttgtggacagggaagtgccagtggcagcaggaaagctccctttctcaagaatgcccatctgtgaacacatggtagagtctccaacctgttcccagatgtccaacctggtctgcggcactgatgggctcacatatacgaatgaatgccagctctgcttggcccggataaaaaccaaacaggacatccagatcatgaaagatggcaaatgctgatcccacaggagcacctcaagccatgaagtgtcagctggagaacagtggtgggcatggagaggatatgacatgaaataaaagatccagcccaactgaaaaaaaaaaaaaaaaaaa

SEQ ID NO: 288237 - DNA, 1000 bp, Homo Sapiens
ccacaagagcagccaaggccaaagctagagcttatgctgagttcctccagccagcaaaggagcgtcctgagacttcagcagccctagccagaaggttagtcatcagtgcccttggggttcgaagtaagcagagcaaaaccgaacgagaagcagagctcaagaaactgcaagaagccagagagagaaagcggttggaagccaagcaacgggaagacatctgggaaggcagagaccagtctacagtttgaacatcactcaatgaaagggataattccatgaatcagaaaatgtttccatagccttcagataagatgatccttccagagctctatgtacatgcagatgtgcatgttaaagagataaagtgatcgagacaaggactgactgggtatagaaggaagacagactcctgtcttcactcctaaatgcagttctttggaatcaccctactgtggtgggcgtagtagggagccatcagctaggaagaaacgtgggagatgtgaattccaagagttgcctggacagggcaagtcatgttagcgtgggtcacacttccaagatatttaaagcaaatacaaaacagaacagaggattcaaaccgcaagtatgggagatttaggccctgcagaggcagaccattccttagtatctcacaaagcagagtaatactggaggcagagtagggggtggttggagagcagttagtacaaagaggcagaacagtgtctggtttacttggcatacacagaatctgcactgccggttccagaactccaaagttggtgaactacaggagatgtgggtatttagactccaaagtttatactgagctcagtgcctgggaccgctccagctgcactgcagccaggggggataccagcttcattcctcagagtaaaccaaccttgggagctgtgtgccagttccagtgtaagcagtaataccatgttgtaagagggaacattaaagcccattttatgacataaaaaaaaaaaaaaaa

SEQ ID NO: 288238 - DNA, 1000 bp, Homo Sapiens
ctttgatgaacgagcccacagcctcggtgccccccgagtcggacgtgtaccggatgctccacgacaatcggaatgagcccacacagcctcgccagtcgggctccttcagagtgctccagggaatggtggacgatggctctgatgaccgtccggctggaacgcggagtgtgagagctccggtgacgaaagtccatggcggttcaggcggggcacagaggatgccgctctgtgacaaatgtgggagtggcatagttggtgctgtggtgaaggcgcgggataagtaccggcaccctgagtgcttcgtgtgtgccgactgcaacctcaacctcaagcaaaagggctacttcttcatagaaggggagctgtactgcgaaacccacgcaagagcccgcacaaagcccccagagggctatgacacggtcactctgtatcccaaagcttaagtctctgcaggcgtggcacgcacgcacgcacccacccacgcgcacttacacgagaagacattcatggctttgggcagaaggattgtgcagattgtcaactccaaatctaaagtcaaggctttagacctttatcctattgtttattgaggaaaaggaatgggaggcaaatgcctgctatgtgaaaaaaacatacacttagctatgttttgcaactctttttggggctagcaataatgatatttaaagcaataattttttgtatgtcatactccacaatttacatgtatattacagccatcaaacacataaacatcaagatatttgaaggactctaattgtctttccttgacaagttgattttgcaattgtggtaaatagcaaataacaatcttgtattctaacataatctgcagttgtctgtatgtgttttaactattacagtgcatgttagggagaaattccctgaatttctttagttttgtattcaaacaattatgccactcgatgcaacaaacataataaatacataaaggatttaaaaaaaaaaaaaaaaaaaa

SEQ ID NO: 288239 - DNA, 1000 bp, Homo Sapiens
gaggcgggacgtcatggaagtgaaggatgccaattctgcgcttctcagtaactacgaggtatttcagttactaactgatctgaaagagcagcgtaaagaaagtggaaagaataaacacagctctgggcaacagaacttgaacactatcacctatgaaacgttaaaatacatatcaaaaacaccatgcaggcaccagagtcctgaaattgtcagagaatttctcacagcattgaaaagccacaagttgaccaaagctgagaagctccagctgctgaaccaccggcctgtgactgctgtggagatccagctgatggtggaagagagtgaagagcggctcacggaggagcagattgaagctcttctccacaccgtcaccagcattctgcctgcagagccagaggctgagcagaagaagaatacaaacagcaatgtggcaatggacgaagaggacccagcatagaagagcacagctggccccggcgtttcatgaagtcagaaggcctggcagccatttcctggacgttgagaggattgtttatttgatttttatcctcatcccagcaggcctggctttgtggttagttgggtacatcacaaaaataagttaaaaagaaatatttgtgccttggggagaagaaacatggtgaaaacaggctgaggttgtcagggcagagagctgaaggtggggacagtgaccgcggacccctctgtgcttgaaagatttcctccacggcctttgccccagttgtggggaggtctctgtgcacagcggggaaaatgcttgtgtcgcctttggtgggccatgtcctaattagtttcatctgcttccctgggaacttactaaggggcccagagcactgttggaagtctggttagagtccccagagagttactctaagttaaaatgagccactgaccttggctcaccttagaggaatttcctcgagaacaacagagataagaaaagaaccggcctggccaatccttcaacagctctaga

SEQ ID NO: 288240 - DNA, 1000 bp, Homo Sapiens
tccagttatgatactttccttattcaacatgagaaagctcatgggcaagaaactctatgaataaccaagatggagccgggtgcagttgccaacacctgtaatcccagcaccttgcgaggccgaggcaggtggatcacttgagcccaggagtttgaaaccagcctgggtaacatggcaaaatcctgtctacaaaaaatacaaaaattagcctagcatggtggcgcatacctgtagtcccagctactcaggaggctgaggtgggaggatcacttggacttgggaggcggttgttgcagtgagctgtgatcatgccatcacaccgctgccttgtgagagattgagacactctaaataaataataaccaagatgggaaatttccctgccagaccttgtttactagaaatcaggtggccaaaacatgactctcagagtggggcttcatgaccatgtgcatcagaattgcctggagtgtgcactgaaactgtgtattaccaagctcactctagccaactaaataaaaatctctggcagtaaaatccaggagtctgcagtttctaaaatcacacaggtgagtgggcatggtggctcatgcctgtaatcccagcactctggaaggctgaggtgggtggatcacctgaagtcagaagtttgagaccagcctggcaaacatggcaaaactgtctctattaaaaatacaggccaggggctgggcacggtacctcacacctgtaatcccagcacttaggtaggccaaggtgggtggatcacgaggtcaggagattgagaccatcctggctaatatggtgaaaccctgtctctactaaaaatacaaaaaaattagctaggcatggtggcgggctcctgtagtcccagctactcaggaggctagagcaggagaatggcgcgaacatgggaggcgtagcttgcagtgagctgagatcacaccactgcactccagcctgggcaacagagcaagactgtctcaaaaaaaaaaaaaaa

SEQ ID NO: 288241 - DNA, 1000 bp, Homo Sapiens
cttgtttgcatttttcggtaatatacataggagctggggattctacagtatctgtgaatacgtggactcctttttataaggagttttaaaaattgttatgtattggatgaatgacttattaatggattataccgtttctgagaaccatcattttttttttcagcacacggaggatgtcttggacatgtgagatgtaacgtgacaggattttgcattttaaactgcagatcatttacatgtccttattttccacctcccccagtcaaaatgctttctaaatcattttcacagattatatacttcggatctgtttactgttcagttaagaaattcttggatcttattaatatttcagatgatagaatacatcctacagaaatacatgtttaaaatgtaaattgttttaattattcagaaagagggtcattctatttggccttttgaattagtatcaaaatgagattttttttttttttttgagatggaatctctctctgttgcccaggctggagtgtagtggtgcgatctcagctcactgcaacctccgcctcccaggttcaagcgattctcctgcctcagcctcctgagtagctgggattacaggcgcacgccaccacgcctggctaatttttgtatttttagtacagagggggtttcaccatgtttgtcaggctggtctcgaactcctgacctcgtgatccgcctgcctcgacttcccagagtgctgggattacaggcgtgagccaccacaccctcccgagatctttaaagtttaccaaaataaaggaaaccacctttgtagtctgtcagtgtctcttataaattgctactgttttcttaaagttaacttcagggtccaccttatgttgcacacatatcacatcgtttaaattgcatactatggtttgacttgctttggaattttcaagtcaaagtcccaaccctttgcctctccccctttaatttgccttttctcttttgatttaatgtttttttattc

SEQ ID NO: 288242 - DNA, 1000 bp, Homo Sapiens
caacacgctccctgaaatttggcaggcagactggaggtgaagagggagatggagcttctgggtatgatgcttattggaagaacctttcatctgataagtatggtgataccagctaccacgatgaggaggaggatgagtatgaagcagaggatgatgaagaggaagaagatgaaggcagaaaggattcagatactgagtcatcagatttgtttactaatttgaatttaggaaggacctatgctagtggctatgctcactatgaggaacaagagaactaggggagctgctctggtggccgtgtgtgagaggagcaggagtgagtgtgtgtgcttgatgaattgtgtgtggttgttcaaaagtaccttagccacttagccttgtgcagaagactagttacacttaatgggccaagcaatagggtgtagcgtttttatagaactgataatcaggcttatggcataagaaaaatgagtttcaaatttaagatgttattgatcgaagcaattgaagtatcatggattggattgttactgatttcagtaaagtatgttttgccaattagatacatatatacaagataaaggaataggatggtaatatatttgtttgaaattaaattactgtttttattaaaaaatactgcttcattgggctgattttgtaaaatgtaatgagtaaaatgaattactgtatttttccttttatgtccacagaatgagagtcatatgttgttatattctaaattttcattaaatattcatgtcaccttgagttgtcatgataagtatgttttgatatttgacttattcttctctttcttcacaatgtatgtcctcagtggtacctattattgatgccttaaatgtattgataaggtgactagttagccatttttcagagatacagtatcagaaatagtattattacagaagctttacccaggacattttatttctctttgaataaatctattatttcacttaaaaaaaaaaaaaaaaaa

SEQ ID NO: 288243 - DNA, 1000 bp, Homo Sapiens
tgggcaacaagattgacctggctgaaaggagagaggtttcccagcagcgagctgaagaattctcagaagctcaggacatgtattatctggagacctcagccaaggaatctgataatgtggagaaactcttccttgacttagcatgccgactcatcagtgaagccagacagaacacacttgtgaacaatgtatcctcacccttacctggagaagggaaaagcatcagctatttgacttgttgtaatttcaactaaaggctgaggcacggagaagaaaaggaatcagcaactgccctgatgggccatgagatgctggggagatctggcgatgactgtggctcccgctctctgaccttctgactcctgtgggctcctgagcttacaaagcatggcaggccaagggcctcgaccacaggccagcattagcagaacatataatggtttcacccttttccagtctggagttggagcaaggagaaaattgcactaggcactccatgatctgcagagcatgttgcttttgtttttttaaaaagcaagtaaaagcgcattcctaaacagagtccggggggaaatgtactgtagggatccctcctgcacatcagtgggtgcatgtgggaactcttctttagggcttcggtggtaatcatctgggggccctggttttcttgtctaccagataaaccaaaactgggaaggccaagtacagtctctgtggtgcgtattgacgaccccatggagattttgaaaagtgttatttctcttgtccacaggcactttcaagaactttgggatgtaaaaatgaaatgaaacctttacccatgaccaacagtaacaatcattgttttaataatatatacaagctccataactccttttggtgctaatgattccgctatttcacagaccaaacgttttagtacattaatgtccttaaatgtgttatatagaaataaaaaaatgggggaagtccatgaatcagcaaaaaaaaaaaaaaaaaa

SEQ ID NO: 288244 - DNA, 1000 bp, Homo Sapiens; identical to SEQ ID NO: 117005

SEQ ID NO: 288245 - DNA, 1000 bp, Homo Sapiens
agtgatatactatatgtaataagtaagacagttgactatcttcattgtcaaggagttgttcatcgtgatcttaaacctagtaatattttatacatggatgaatcagccagtgcagattcaatcaggatatgtgattttgggtttgcaaaacaacttcgaggagaaaatggacttctcttaactccatgctacactgcaaactttgttgcacctgaggttcttatgcaacagggatatgatgctgcttgtgatatctggagtttaggagtccttttttacacaatgttggctggctacactccatttgctaatggccccaatgatactcctgaagagatactgctgcgtataggcaatggaaaattctctttgagtggtggaaactgggacaatatttcagacggagcaaaggatttgctttcccatatgcttcatatggacccacatcagcggtatactgctgaacaaatattaaagcactcatggataactcacagagaccagttgccaaatgatcagccaaagagaaatgatgtgtcacatgttgttaagggagcaatggttgcaacatactctgccctgactcacaagacctttcaaccagtcctagagcctgtagctgcttcaagcttagcccagcgacggagcatgaaaaagcgaacatcaactggcctgtaagatttgtggtgttcctaggccaaactggatgaagatgaaattaaatgtgtggcttttttcctattcttatcaaaggcatcgttgtctgctaaattacttgaatattaagtaatattaaatccccatttttaggggaagtgagatttaaaaaaccattcacaggtccacaatattcatactatgtgtttgcagtagtgttcaagtgtttatttaagcatataattggtgtccaccaggtcctcacaacttctctgcacacaagcttctaaaattcctttcaaataaagttactttaatatttaaaaaaaaaaaaaaaaaaaaa

SEQ ID NO: 288246 - DNA, 1000 bp, Homo Sapiens; identical to SEQ ID NO: 117006

SEQ ID NO: 288247 - DNA, 1000 bp, Homo Sapiens; identical to SEQ ID NO: 222230

SEQ ID NO: 288248 - DNA, 1000 bp, Homo Sapiens; identical to SEQ ID NO: 117007

SEQ ID NO: 288249 - DNA, 890 bp, Homo Sapiens
ggcggaccgaagaacgcaggaagggggccggggggacccgcccccggccggccgcagccatgaactccaacgtggagaacctacccccgcacatcatccgcctggtgtacaaggaggtgacgacactgaccgcagacccacccgatggcatcaaggtctttcccaacgaggaggacctcaccgacctccaggtcaccatcgagggccctgaggggaccccatatgctggaggtctgttccgcatgaaactcctgctggggaaggacttccctgcctccccacccaagggctacttcctgaccaagatcttccacccgaacgtgggcgccaatggcgagatctgcgtcaacgtgctcaagagggactggacggctgagctgggcatccgacacgtactgctgaccatcaagtgcctgctgatccaccctaaccccgagtctgcactcaacgaggaggcgggccgcctgctcttggagaactacgaggagtatgcggctcgggcccgtctgctcacagagatccacgggggcgccggcgggcccagcggcagggccgaagccggtcgggccctggccagtggcactgaagcttcctccaccgaccctggggccccagggggcccgggaggggctgagggtcccatggccaagaagcatgctggcgagcgcgataagaagctggcggccaagaaaaagacggacaagaagcgggcgctgcgggcgctgcggcggctgtagtgggctctcttcctccttccaccgtgaccccaacctctcctgtcccctccctccaactctgtctctaagttatttaaattatggctggggtcggggagggtacagggggcactgggacctggatttgtttttctaaataaagttggaaaagca

SEQ ID NO: 288250 - DNA, 1000 bp, Homo Sapiens; identical to SEQ ID NO: 222231

SEQ ID NO: 288251 - DNA, 1000 bp, Homo Sapiens; identical to SEQ ID NO: 222232

SEQ ID NO: 288252 - DNA, 1000 bp, Homo Sapiens
agcagatcggcgaggtgttcgagtgcaccttcacctgtggcgccgactgcaggggcacctcgcagtacccctgcgtccaggtctacgtgaacaactctgagtccaactctagggcgctgctgcacagcgacgagcaccagctcctgaccaaccccaagtgctcctatatccctccctgtaagagagaaaatcagaagaatttggaaagtgtcatgaattggcaacagtactggaaagatgagattggttcccagccatttacttgctattttaatcaacatcaaagaccagatgatgtgcttctgcatcgcactcatgatgagattgtcctcctgcattgcttcctctggcccctggtgacatttgtggtgggcgttctcattgtggtcctgaccatctgtgccaagagcttggcggtcaaggcggaagccatgaagaagcgcaagttctcttaaaggggaaggaggcttgtagaaagcaaagtacagaagctgtactcatcggcacgcgtccacctgcggaacctgtgtttcctggcgcaggagatggacagggccacgacagggctctgagaggctcatccctcagtggcaacagaaacaggcacaactggaagacttggaacctcaaagcttgtattccatctgctgtagcaatggctaaagggtcaagatcttagctgtatggagtaactatttcagaaaaccctataagaagttcattttctttcaaaagtaacagtatattatttgtacagtgtagtatacaaaccattatgatttatgctacttaaaaatattaaaatagagtggtctgtgttattttctatttccttttttatgcttagaacaccagggtttaaaaaaaaaaaaaaggtgaggacatctgggtctcatttgcttctgctaggttaaacttttacttgacaacaaggattcctgctgaagtctgaaccttactgtgtaaccctcagtttccactattaaagagtatcttttga

SEQ ID NO: 288253 - DNA, 1000 bp, Homo Sapiens; identical to SEQ ID NO: 117008

SEQ ID NO: 288254 - DNA, 1000 bp, Homo Sapiens
gcggaggaggaggcgccctgggcggcgacggagcggcgaatgccgggccagtgctccgtgctgctcttcccgggccagggcagccaggtggtgggcatgggccgcggtctgctcaactacccgcgcgtccgcgaactctacgccgccgcccgccgcgtgctgggctacgacctgctggaactgagcctgcacgggccgcaggagaccctggaccgcaccgtgcactgtcagcccgcgatcttcgtggcatcgctggccgctgtcgagaaactacatcacctgcagccctcggtgattgagaactgtgttgctgctgctggattcagtgtgggagagtttgcagccctagtgtttgccggagccatggaatttgctgaaggctctacggtttctccagaagaattcctctaagtttcatttcagacgcaccaggatgttgccggttagtggcgcattccacacccgcctcatggagccagccgtggagcccctgacgcaagctttaaaggcagtcgacattaagaagcctctggtttctgtctactccaacgtccacgcgcatagatacaggcatcccgggcacatccacaagctgctggcccagcagctggtctccccagtgaagtgggagcagacgatgcatgccatatacgaaaggaaaaagggcagggggttcccccaaactttcgaagtaggccctggcaggcagctgggagccatcctgaagagctgtaacatgcaggcctggaagtcctacagcgccgtggatgtgctgcagaccctcgaacatgtggacctggaccctcaggagcccccgagatgactgcagggggctcaaatgcgatgaccccctctgtcctcctgaggagaggctgtaggctgtgcctgtcgccccctaccttcctaatggctcctcctctgaggagtgaaagggatttgtttgcaacgtgctttgaaggccacataaaaagccctaaaaatgagaaaaaaaaaaaaaaaa

SEQ ID NO: 288255 - DNA, 1000 bp, Homo Sapiens; identical to SEQ ID NO: 117010

SEQ ID NO: 288256 - DNA, 1000 bp, Homo Sapiens
actagatgttatcaatcaaacactaaaatgtaccatacaaatcccttaagcctctcaaatattgagctttagtacaatcatggatagacattctggtgatgatttaggggctttttatacaccacatactagcttctttctctataagagtgcctctttcataaaaccaaatgcttgtctgctagcatacttttcaaagggaatccactgttttctcactttcatcccatatctccgtccttcatccaaaaccttcccagaatccatcagcaagcatgtttgaggcctgtggtgtaggggactgaatttttttttaacttctattccattttaattgtaggatatctttgtccatatacccaggtgtcctgatttgaatgtactatttgatcctcattgtgttcaggcaaaaaataggaaatgagtaattttgagtttgaaatctctcccagaagacaaactacttcagtgagtaaaagctttgacattttatgttttattcataaagggggttaattatttgctacaaagaagcacgatctattttcatcatcgatttgaaaatatctgtaactcctatagatcctataggcagagagttttcctttctgactttttccctttgctttcgtgtgaccacatgttttctgtaccagtcactggggaaagaagtgagtttatctcgtttgttttaaaagttttgcttgtctatttagcattcctttttgggtctcaagatttatggaacaataaatgtcatttaatgctgtgtgcttattttgaattcctcatcaggttttagaagcggggtaaaaatacttagatgcttatcagacttgaaattatactgagtggcattgaacgtgagtttgtcccagtgaaacaggctaaataaattttggcaccagcaaatttgttactttgtttttttaatagtaggatgtacacatttcagtataataaatgttttctgattgttttgcgaaaaaaaaaaaaaaaa

SEQ ID NO: 288257 - DNA, 1000 bp, Homo Sapiens
agagaaaggacttgaaccagagccgcaggtcccaggccctgcacatggacctgcacaggaagagccatgggagaagaaggaatctctgggagcagcccaggaagcactgagcatccagctccagcctaaggagacccagcctttcccaaagagtgaacaggtatatttacattttctgtcagttgttacagaagatggcccagagcccaaggacaaaggatcattgccacaaccacccattactgaagtggaatcacaggtgttctcagaaaaacttgctactgacacctctacatttgaagctacctctgagggtaccttagaactgcagcagagaaatcccaaagcggagagactgaggtggtcccctgcccaggaggaaagtttcaggcagatggttgtcatccataaggaaattcccacagggaagaaagaccatgaatgtagtgaatgtggtaaaaccttcatttataactcacatcttgttgtccaccagagagttcattctggagagaaaccctataagtgtagtgactgtgggaaaactttcaaacagagctcaaacctcggtcagcatcagagaattcatacaggagagaaacccttcgaatgtaatgaatgtgggaaggccttcagatggggtgctcatcttgttcagcatcagaggattcactcaggagagaagccctatgagtgtaatgagtgtgggaaggcctttagtcaaagctcatatctaagtcagcatcggagaattcacagtggagagaaaccttttatatgtaaagaatgtgggaaagcttatggatggtgctcagagctcattagacatcggagagttcatgccagaaaagagccttcccattgaattgaaggggagaacgtctccagacagaattctacatcggtctaatctactttaggactggatcccataaaagttataagttccttaaaaaaaaaaaaaaaaaaaaaaaaaaaaaaaaaaaaaaaaaaaaaaaaa

SEQ ID NO: 288258 - DNA, 1000 bp, Homo Sapiens; identical to SEQ ID NO: 117011

SEQ ID NO: 288259 - DNA, 1000 bp, Homo Sapiens
gtggacaggaagaaaacttcatgaccgaatcagagccttggtggccactgactctcgtgcttattgcagatgctgtggttggcctcacaagcaacgccttatgctgatgtgcagaggtgccagctgccatttgccaaactctgcatttcatttcatctaaggcttaacccctcttccttcctggtgtacctgtgtctcctcggaaggaagtcatagtttagatgaaaccattttttgtacaatgtaaagatcatctgagcaagatgagcattttgtaaaaatgaaaatgtgactcacataaaatcaggaacttgacacagtgttgcattaataactttagggtgcagacatgctgtgtgaatctcacaatgcgtcgtagatgtcgcgtgttggaagggagcaggaggaaggactgatactggcaaatcagtagagtgaggtgatccttagcaacgtgccaggacacttcctgtgtgcctgcagttgtcagggaccatttgggatcccgaatctcattctctaaaactgctttcttgaaacatgttacttccttagtataatcaatgtatactcccttactggcctgaaacgttgtatagctacttattcagatactgaagaccaacggactgaaaaaaagaacaaacattagctattttatgctgcaagaaccaggacacacaattcgccaatcatcccaccatataaccttcgattgtgcttctcaactccaccccataatttctcccagagaccatctatcaccttttccccaaagaagaaacaaaaccagttgcaccttaaaccatggatattttttcctcaggggctttaaatagtttcctatgcaacgtgtcttgtagcacaaataaaattctacaaaagttgcagtaaattttatttggatattttaacctgttaagtgtgtgtgtgttttctgtacccaaccagactttaaataaaacaaacatgaaacctaaaaaaaaaaaaaaaaaaaaaa

SEQ ID NO: 288260 - DNA, 1000 bp, Homo Sapiens; identical to SEQ ID NO: 117012

SEQ ID NO: 288261 - DNA, 1000 bp, Homo Sapiens; identical to SEQ ID NO: 222235

SEQ ID NO: 288262 - DNA, 1000 bp, Homo Sapiens; identical to SEQ ID NO: 222236

SEQ ID NO: 288263 - DNA, 1000 bp, Homo Sapiens; identical to SEQ ID NO: 222237

SEQ ID NO: 288264 - DNA, 1000 bp, Homo Sapiens; identical to SEQ ID NO: 117013

SEQ ID NO: 288265 - DNA, 1000 bp, Homo Sapiens; identical to SEQ ID NO: 222239

SEQ ID NO: 288266 - DNA, 1000 bp, Homo Sapiens; identical to SEQ ID NO: 117016

SEQ ID NO: 288267 - DNA, 1000 bp, Homo Sapiens; identical to SEQ ID NO: 222240

SEQ ID NO: 288268 - DNA, 1000 bp, Homo Sapiens
tggtcctggtgggcgacggcggctgcgggaagacgtcgctgctgatggtcttcgccgatggggccttccccgagagctacacccccacggtgtttgagcggtacatggtcaacctgcaagtgaaaggcaaacctgtgcacctccacatctgggacacagcagggcaagatgactatgaccgcctgcggcccctgttctaccctgacgccagcgtcctgctgctttgcttcgatgtcaccagcccgaacagctttgacaacatctttaaccggtggtacccagaagtgaatcatttctgcaagaaggtacccatcatcgtcgtgggctgcaagactgacctgcgcaaggacaaatcactggtgaacaagctccgaagaaacggattggagcctgtgacctaccacaggggccaggagatggcgaggtccgtgggcgcggtggcctacctcgagtgctcggctcggctccatgacaacgtccacgccgtcttccaggaggccgccgaggtggccctcagcagccgcggtcgcaacttctggcggcggattacccagggcttttgcgtggtgacctgagcggctcggggcgtcccagcgacgcgggaaggggcagggcgctgacctgctgctgagctggctgggctggacccggtccctaggctgtgaccgccgaactccactgcaacagacgggcgccaccaaagccaggccctgaggcctgggagtcctggactgagaaagggggttcctgggcccacctgctctgtgtagggctcgtcctgcggtgcccgagaatcactcgctaacccctatgcccggtcccggaccgacatcctggagccgcctgtgcagcctgatgccccctcgtggctgctcccagggctgcacctgccaggacctaatgttcttaggtccctctggccagaacccacacccggccccttcccacctgtcatactggtaactgtaacaagaaaaacgacatcaaaaaaaaaaaaaaa

SEQ ID NO: 288269 - DNA, 1000 bp, Homo Sapiens
agcaggaaaagccagagggggcagagaccactgctgctaccaccaacggcagtctcagtgacccgtccaaagaagtggaatacgtctgcgagctctgcaagggagcggcccctcctgacagccccgtggtctactcggacagggcaggctacaacaagcagtggcaccccacctgctttgtgtgtgccaagtgctccgagccgctggtggacctcatctacttctggaaggatggtgcaccctggtgcggccgccattactgcgagagtctgcggccccggtgctccggctgcgatgagataatattcgctgaggactaccagcgtgtggaagatctggcctggcaccgaaagcactttgtctgtgagggttgtgagcagctgctgagcggccgggcgtacatcgtcaccaagggtcagcttctgtgcccaacttgcagcaagtccaaacgctcctgaagggctgcccacccacagccagaatccacaggatcccaccgagaaggagagccaggtgtgccgagaccatcctaagggtccgatgtgacagcaagcaagtgaaataaacaatgatttgcttttcagtgagaatatatatatgagatatatatagatatatattctaggttgggtggtggtagatccttgagggtcagtagtttcaaaaccaaaaatattctaagaagtcttaggatggagttccttttctttctgttgttgtttcccagctacaaccaactaaagacacaaatggcgttctgcaaggggactctgggaggagttttccagaatgcaattccgagtgagcaaatcgcatagctgtagaatgtgcgtgcttttttgtggacacaggagctcctccaggagcaggctgggatcccaactatcgcttgttgcctctttttcaagtggaatttgaattttaaataaacaactttttttggcatgataaacagatcaataaaagttttgtgaattccaaaaaaaaaaaaaaaaaaaaa

SEQ ID NO: 288270 - DNA, 1000 bp, Homo Sapiens
ttgagctggtctggagcagagtttctccctcaaagaacacagagaaatcagagagtggctgccatggtcagagggggatgtcaacaacagatcaagccgtcatcacaacaggtatttctgaagttcctgcagggactaggtcttgcatttttaagtccttttcaaaactgtgcagcttcctgaaccttatgctgtttgtcccatccactcttgaagctggggaaagacagctttctttgggaactctgtctttctcagttgacttcccaagtaagcagcaaacccctggatagccttgttatctactttaggtattaagaggctattgggttttactagattaaatcaataaaacatttcctatagagccatatcatacactgaagcaaattcagaaagaatgcaaaactgctatcttttgggggagtctggaagcctgttggttagtgtatttattttctttgtggggtcttctgtgagctacaggcacagtaagaataattcagagcggtactgggagttggttcaatttcatgtcatcacttttcaatgaagggagtgcatttcctgagtagtaaatgagtatattatttgtggcagcttttctgttaagggagctttccagacatctggttgcaaagacaaataggatatatatttgtacttcttctctgtggacatgtttttgtgacacacagttatctctaggagttgacgtctgtgggcactaagggactgaggttgggggagaaagctgaggaggctttggaagagaaggtgaggagcatttcaggatttgcagtccccctccacatgtatccacatctgagctggtggtgttccaataatgaggcatttggggcaaccaattttggaaggatagaatagctttatgtggagcaaacttgaggatcaattggagttgagtggtttaaaacttaaagatggcacaggaagctgtatcatttacaggtgaaaaaaataaatgggtctgacttca

SEQ ID NO: 288271 - DNA, 1000 bp, Homo Sapiens; identical to SEQ ID NO: 222243

SEQ ID NO: 288272 - DNA, 1000 bp, Homo Sapiens
gaaagccaacagtctgaaaacagtgagaatgaagaggatactttatgttttgttgaaaatagtggccaaagggagtcattaagtggagacacaggaagtctgtcatgtgacaatgcattgtttgtaattgacacaactcctggaatgagtgctgataaaaatttttacttggaagaggaagacaaggcaagtgaggttgccattgaggaagaaaaagaagaggaagaggatgaaaaaagtgaagaagattcatcagaccatgacgaaaatgaagatgagtttagtgatgaagaagacttcctaaatagcacaaaggctaaacttctgaagttgacaagcagcagcatagaccctggtctgagtatcaagcagttgggtggtttgtatattaattttaatgcagataaactacagtctaacaagagaaccctaacacagatcaaggagaaaaagaaaaatgagcttctgcagaaagccgtcattacacctgattttgaaaaaaaccactgtgttccaccatatagtgaatcaaagtatcaacttcagaaaaaacgcagaaaagaacgacaaaaaacagcaggggatggctggtttggtatgaaagctccagaaatgacaaatgaactgaaaaatgatctcaaagcactgaagatgagagccagcatggacccgaaaagattttacaagaaaaatgatagagatggcttccccaagtacttccagattggaaccattgttgacaatccagctgatttctaccattcacgaattcccaagaagcaaaggaaaagaactattgtggaagaactgctggctgattctgaattcagaagatacaaccgaaggaagtactcagagatcatggctgaaaaagcagcaaatgcagcaggaaaaaagttccgaaagaagaagaaatttcgcaattaagatttaccaagcaaactgcaacattttacattgctcctttatttacttattaaagacgtttggaaaactaaaa

SEQ ID NO: 288273 - DNA, 1000 bp, Homo Sapiens; identical to SEQ ID NO: 117024

SEQ ID NO: 288274 - DNA, 1000 bp, Homo Sapiens; identical to SEQ ID NO: 117025

SEQ ID NO: 288275 - DNA, 1000 bp, Homo Sapiens; identical to SEQ ID NO: 222245

SEQ ID NO: 288276 - DNA, 1000 bp, Homo Sapiens
ttggcagaactcctaagaatttatgggagcctatataaacatatcttgcttttaaaaagttcttgagggaatagcaactttcccatggctgtgcctatttcctagaccttttaaaagatgtgcagagcagcttagcattcgttgcagctgagcctaattttttcttgctcatccttgtccctttgacaataaggttaattgatagacccaccacctcttgcactctcgcttttggagcaagttgcattaactattttgagtctctatattgtccaagaaaagtagaaataataaatttactttccctttttctatcaccttatgtcctctaccattttctccttcctcccttcccttattttctccttttcgtaccctgtgtcctccctgattttcctttcgtttcttctttattttatcccattctctgttacttgactcagtgctcccttcctctcctctccttctagtggatgcatgcagcctttttttcaatttttatttaaattgcaaaatttttactcagattttttttcctcttccctaattgctaagatttaaggacgttctttattatgaaactttatcacattcgaaatgtttgtttacagtgggattttaggggggattgtgtttaaatcaaatatatgtattttaaaaataatgacatgctcaaccttcctcatcatggagtaagaaaattctacatgattaaagaatccatgtaagtctaattttaaattcctagtaactagagaaaagacttatttatataaaatgaagtatttatgaactgtgataaagcatcaaatcttgatgaaggattgtagatttttgctttttctttttgtttttaaaacttattccaattgctaaattggtagtttttcagtctttataaatacaggattaaaaatatatatacagttatatgaaatgtttattttctatgtgtgtgcatatagttcaatattatgcaataaatttggtgttttaactt

SEQ ID NO: 288277 - DNA, 1000 bp, Homo Sapiens; identical to SEQ ID NO: 117026

SEQ ID NO: 288278 - DNA, 1000 bp, Homo Sapiens; identical to SEQ ID NO: 117027

SEQ ID NO: 288279 - DNA, 1000 bp, Homo Sapiens; identical to SEQ ID NO: 117028

SEQ ID NO: 288280 - DNA, 1000 bp, Homo Sapiens; identical to SEQ ID NO: 117029

SEQ ID NO: 288281 - DNA, 1000 bp, Homo Sapiens; identical to SEQ ID NO: 117030

SEQ ID NO: 288282 - DNA, 1000 bp, Homo Sapiens; identical to SEQ ID NO: 117031

SEQ ID NO: 288283 - DNA, 1000 bp, Homo Sapiens; identical to SEQ ID NO: 117032

SEQ ID NO: 288284 - DNA, 1000 bp, Homo Sapiens
tatatgtattcagtagtgcaggcatttattaacaattcttaaaagttttacctgattcagattcacgacttttatttatattctatatttttgaatttcagagtaaaatttgttaacaattttaaaagccaggtaacacctaccagtccagttagcatgatttgctttcagaagtgagctgggttttccaaagtggtataatgtgtgtactgtatattttaacaaagtaatatttttgtattgcatttttctattaaaaaattaacagttaatgtttcagtcaatgtattatctgtagcatttcacaaataatgtttgctttgaaccaaaatgctcagtgcctatcaacatttggactcaagcatcaacaccaaattattcctcccttctcgtataaatagagtgactatccacaggagaaaagtgtgtgctttagtattagaggagataggcagagaagtcttgcttagttccttcgtgcagcttcttgcccctgttgacgtggaatgctgtgtctgctttagcacgcacgctccgaatgactcctggtgctaggccatgctggctgctgtcactgagcgggactcaggccaagaggcgtgacctcgggccagcctgtctgttgtgcagacgcctcctctgcagaacgcatcagtttctattctgcagttgcagagccagccccgcgtgagaacgtgcataatgagtgcacaccatcatgtcaaggtgcatacttagtgagcgccatcctgctgaacgtgtatttcagtgtttcacttactggacggataacaagaaaaaaatcctaacacaggcaggcaccagaaataaatgtctcagcactttacagatgactaaaaatgttaattttatgacttagccaaatatgttctaggttgcatatatcccccatgtgaaagtgatttcttcccaagcttctcaaactgttagctgctgtctgacttcatcaataaagtatttttattttaaaatgcaaaaa

SEQ ID NO: 288285 - DNA, 1000 bp, Homo Sapiens; identical to SEQ ID NO: 117033

SEQ ID NO: 288286 - DNA, 1000 bp, Homo Sapiens
tcaagttgtatggctcaaagagcagtgaccacaatgggtcatacagtagggacccacctccacaaattagaaccagagttcagactccattgggcacatctgggaggaaggcaacctcctttgtcgtcttgttggtaccagtcattctcaagtatctctgacacctgtggtggttcagtttgctgagcctgccacctggtatgaattagactgggtgtgatgaacattcatccatggatataccctaccattttgcgttgccttataaccaaggcacactccccataagagtttactgcagagaaagaacagcaaaacagccaccctccttgaatttacaactcattatctgcaacaggttttctttaaatccaagacacaggatgggaaatgggtttccccaccaggtactcagaggtctgcaggaagtgactcccgggcaaggcagacttcagtaatccctgaagcgtgagcatgtggactgcatggctgggtggggactggtggatgtctctggagctccagaaccttggagaattcctcatggaattcccctcccagctcttagtgggctctgtggggtcaggaggagcccttcctccaggttttccttctttcctcctcagcagagaaactggagaaaggacattaaactcagtgcagtcgatttgagtgctgaaatatttccagaatcaatggtggtgctaaactatctccatgtttctagcatttttaatagtggagttggtttgtttttaatctcatcacaaaaatgcagtgcccttggggaagggaccagccccttggcctgccactttccaggtgtcctttatcactttgacgggactctttggtctgcagaaaatgctctgtcttggcatgcttctagactgtaagatttgggttttgttttgtattttatgtttacatgcatcttatatttccctgaaaactaaataaagttttgggcctttttaaccgaaaaaaaaaaaaaaaaaaa

SEQ ID NO: 288287 - DNA, 1000 bp, Homo Sapiens; identical to SEQ ID NO: 222250

SEQ ID NO: 288288 - DNA, 1000 bp, Homo Sapiens; identical to SEQ ID NO: 222251

SEQ ID NO: 288289 - DNA, 1000 bp, Homo Sapiens
gccagggacactggtctgtaaattgtaatcctttctccagcccagctctccacttgttccttgtgtgagctgagcaggcagtgcacctctgagtgtcccttttgtaaggcccaggggttgcactgagtctgcagaggccgcgacctcctagaacgctgtgggtgcaggtgagccggcgtgtcctggggagatgctgccagcacacaggggccctcctgctgccagcaggttggggtggttaagtcttattagtgtctattcttaaaattaagtgggctggagaagaatggagctccacatgccagcaccgtatatggaatacaaaagctggggaagcagggcctgccttacaggtgtggctgactctgagcccaggcctgcaggggtggagggcagtccctcagaatcccagaggcagtcccagcctcagaacccaggataggaaatgggtgtgtttagtggggaaagggacggggtgcagacggcagggccagtatggggccccctccctctcctctcctctcctatggtgagcccagcgtgggcaccgggccgtctcagccgtgttcccagggctgggaggacagctctggcccttcttaggcctagcctcgtcccaagctaaatgtaagccagttgggctgtgttaaaggaagcagtgtttttggttcgattctgcctctgtagctcaaggggggcagcccccagagtcctgtgcattctgccaaggctccatagctttgccaaatgcacggagctctgccattccggtgcagtgcaggccttgcgaagggtttatctgcgttcgtctcggtgggcttctcctgcatgggagttgtgttcctgtgcaagggggagctttgctccaggacaggatgactgtcttccctattcttagggacaagtcccaagatgccagaaaggcagtctcccaaggacccaccatgcagaagtgtcaataaaccacaagttctgaactctgaaaaaaaaaaaaaaaaaa

SEQ ID NO: 288290 - DNA, 1000 bp, Homo Sapiens; identical to SEQ ID NO: 117034

SEQ ID NO: 288291 - DNA, 1000 bp, Homo Sapiens; identical to SEQ ID NO: 222252

SEQ ID NO: 288292 - DNA, 1000 bp, Homo Sapiens
cattttcttggagctggggtttgaataggaaccagatgatgttcactgctgaaattccataatgcttcccattgaagggaagttgagaaccaggaaagctgctttcacgtcattgccatccagtactgacagggaagaaagatgtagttttccagtagtgatgaatcaaattattgaattaaatttcttcttaagaagtaaaaactcagaatgtaccatcttgtttcctttcagtttattaaatggcatcataaagatgactttgctaagttaatagagttaaaaatttttttaatataagccaaaatattaactttaatgaaacattgacttggcaaatgaatttcctataaattatcattggtcagaatgctgttttgtttaataatattacgcaacataaaccataggtgttattagaagtggagaactgcctttttcatctggggcttttaaggacttgctataaatgattattttttaaatgctttataaatcttcatggtttttctatttctgatacactcagctatagttaataccagagtatcctaccaggagtaatatttggaatatttaaatctagtaaaagaagaaagttgtacttcctggctgggagtattaggagatgggagtagagattcacttttaagttcttgaaaatatatgcattctcctaaatattaacaaaaatgatttggggaaatgacatggcttgattgttctgtttaaatttgtactgtggcttatgttacacatgttcatgttcacctctcattcacctgttttatatggtttaaaattctctttaacaaaattcagaaaattcacctgaaacgtattttgacctaaaagaaacatatttttgtatcagtattgaattttggacagtgcccccatataaggaagttactgttttaaaataaagcaaactaactgttttaaaaaaaaaaaaaaaaaaaaaaaaaaaaaaaaaaaaaaaaccaaaaaaaaaaaaaaa

SEQ ID NO: 288293 - DNA, 1000 bp, Homo Sapiens; identical to SEQ ID NO: 117035

SEQ ID NO: 288294 - DNA, 1000 bp, Homo Sapiens; identical to SEQ ID NO: 117036

SEQ ID NO: 288295 - DNA, 1000 bp, Homo Sapiens; identical to SEQ ID NO: 117037

SEQ ID NO: 288296 - DNA, 1000 bp, Homo Sapiens; identical to SEQ ID NO: 222254

SEQ ID NO: 288297 - DNA, 1000 bp, Homo Sapiens
tttctgtgaaagagatgccctcgagtgtgtttgtacacaaacccttaggatggtgagttgaagcatcaccctcgcgctatcttcagtgacgggtgacggctcagggagatggcaggcagattgggctctaagtcattattctctcagttactccattggtgaaatggccctttccctctttgcagttcagtctaagtctcgtatttgctttgctgtctgtgtgctgaagctcgtcccgtgtgagttgctgtctgccccttgtcaggctgtgaggtgctcgtgtagacctggagcatgcaggctgcctccgtttttgggtactgtgttgtgttttgctctgtctaaaaacatctgcatagttttcaactggaaaaagaaaaaacttaaaaatgggatgtcctaaaatgaaagctgctcaaagtcacagaacaaccgagggacaaaggagattggatgactgggaagcgctggcccggaacagcccctgcaactgtggggcctgcacacagcccttccacagttggcactgcaggtgcaggccaaccctttaaagaataaacaaggaagtcagctctttcactttttacaagttggcaaaaacagacttccggggaatttcgatgttttcccgtgttgtagagcttccagggtttaataaaactggttaaaaattgagtctttccctgaagtaagtgctctttccagatgaaaactactcttttggttttgtttgaaagtaagaaagggaggggaaactttgctcttttaataattatgttcagcctatgatgaagtatttgattattagacagcaatgtcactaataagttttaagttgtccaaagttaattgtaaacatcatcagtacagtactcttagttacagtaaagcaattgttgcaagatgaatggctaatattttggtgcagtgtttgatgttcaaaacaaaatgttacaacaataaacgaacataacataaactgaaaaaaaaaaaaaaaaaa

SEQ ID NO: 288298 - DNA, 1000 bp, Homo Sapiens
ggaaatgtttatatttggtaacttctagaaagccagaaaatggactctgatttcatagcattttgataaaatgccacaaaataagggctatagagagatttttacaagtcagattttttgttccccaaatcttttaaatgaagccagtgactcccagttctcaacacatggccccagtcaagacagaacaccatggaaaaaaccctgtaagtattatggcactctccgaatcctcctgaaggcatttcctctacagacatagtgttacaggaagtgaaatgcaaatgtgcaattttttttaaaggagcttttaaacaaagtaataataattggtgttgagaacatcagttgccttattctaagatttcataaggctgagtttgcacgcttggacttcagttctgctagcatgtaaagagtggtggactttaaaaccgtaagaggtatcattacaagtcacctggaacagactcaaagaacaggttctttgggcaacagacaaagaagaatcaagttctgtgctgtcccgtgagtgtgtctgagtaccattcactggagttgctgcttaggtctgggacgtgtgtgtgactcttaacaattgctgtctgaaaatgagagagaagacttcggaagcacattgtgttcataatgtactccacaatggccagtccaattgctatctatttttttatccagaggcttaattaaatgatgtggtaaaatgatgtttgagcattaagacaatgtaattctttatttctgggtggaaagatataccggattaaatttatctgtttaaaaaaatgacaaaagttatcaccaaaaccccctttcccatcttgcactgtttgttttggattgggtttgggggaaagagatgtttttcttagttgtctactttgtttgaacacttttgttgtggttcaagtgctgttttgtgtgttgggaccaaacagttgtcaataaactttacaagcgagcatctaaaaaaaaaaaaaaa

SEQ ID NO: 288299 - DNA, 1000 bp, Homo Sapiens; identical to SEQ ID NO: 222255

SEQ ID NO: 288300 - DNA, 1000 bp, Homo Sapiens; identical to SEQ ID NO: 117038

SEQ ID NO: 288301 - DNA, 1000 bp, Homo Sapiens
agccagccaccagccccctggtggtgacagaagtcccggaagagcccagccagagagccaccaccgtctccactaccatggctaccactgctgccacaagcacaggggacccgactgtggccacagtgcctgccacagtggccaccgccacccccagcacccctgcagcacccccttttacggccaccactgctgttataaggaccactggcgtacggaggcttctgcctctcccactgaccacagtggctacggcacgggccactacccccgaggcgccctccccgcccaccacggcggctgtcttggacaccgaggccccaacacccaggctggtcagcacagctacctcccggccaagagcccttcccaggccggccaccacccaggagcctgacatccctgagaggagcaccctgcccctggggaccactgcccctggacccacagaggtggctcagaccccaactccagagaccttcctgaccacaatccggaatgagccagaggttccggtgagtggggggcccagtggagacttcgagctgccagaagaagagaccacacaaccagacacagccaatgaggtggtagctgtgggaggggctgcggccaaggcatcatctccacctgggacactgcccaagggtgcccgcccgggccctggcctcctggacaatgccatcgactcgggcagctcagctgctcagctgcctcagaagagtatcctggagcggaaggaggtgctcgtagctgtgattgtgggcggggtggtgggcgccctctttgctgccttcttggtcacactgctcatctatcgtatgaagaaaaaggatgagggcagctacacgctggaggaacccaagcaggcgagcgtcacataccagaagcctgacaagcaggaggagttctatgcctagtggagccacagtgcctccctgcagcctcaacaccaccctgctgtccagtccccagcctggccccaccagcccaagctcct

SEQ ID NO: 288302 - DNA, 1000 bp, Homo Sapiens; identical to SEQ ID NO: 117039

SEQ ID NO: 288303 - DNA, 1000 bp, Homo Sapiens; identical to SEQ ID NO: 222258

SEQ ID NO: 288304 - DNA, 1000 bp, Homo Sapiens
atcaggcctggccctcgctcgttcaccgactcacacgggacgcccccctggcagtgcttagagccttcaaggttttacgtaccctgggaagcaagtgtggtgactttcttcgcagccggttctgcaaagatgtcctgccaaagctggctggctccctagtcacccaggcccccatcagtgccagggctggaccagtttactcgcacacgctggccttcaagttgcagctggctgtcttacagggcctgggccccctctgtgagagactggacctaggtgagggtgacctgaataaagtggctgatgcctgcttgatttacctcagtgtcaaacagcccgtgaaattacaagaggctgccaggagcgtcttcctccacttgatgaaggtggacccagactccacctggttcctcctgaacgagctttactgccccgtgcagttcacacctccccaccccagcctccaccctgtgcagctgcacggggccagcgggcagcagaacccctacacgaccaacgtgctccagctgctcaaggagctgcagtgaccctgctcccccaccacagaggccaccgatccctcccctactgccagccagaagctgggctgaccccaccccggccataggcggtggcagcggcagcagagaaggtgaattagttagccaatcgatttataaattgatcgatcacacaactgcttagaaatggattgaaggaaagtagctgactattatttatatttcataccttgtgttttcaagtgacattgtctggtggctctaagggtttaaccccttagcctaccatctctatagccccagctccctcacaggccacacacacacacacacaagaggtcagttcccctccatctgcatacacctccctgtcttcaaataatgagatggaactaatttgttttacctaacctgatctttgggaaacaaacggaaataaagacacttcttggatgaaaagtaaaaaaaaaaaaaaaaaa

SEQ ID NO: 288305 - DNA, 1000 bp, Homo Sapiens
ctggccagctctcaccagcggtgtctggggaagtagttctctttgtatgaagcatacctgtgccagagctgtggttgaggaggagccagttttaggttcgaagaagccattggctcctcacttagccattagacttgaataggatttccttggggtgggttggtctgtcattacccagccttctctgagcatcctaggaaatcacagattgttaaaggaaatgccgcttcactgctgaagacaccatctggcgacagcaaatgcaaaagaggggactctagggtcttcacttttctggggaaatgttcacgacttctcaaggtacgcttagaccatatgtgcattcaggggactcttgtctttgccagcactcctcaggtgagcccgggatggctatctgaaatgtctggaaaatagagtcccttccccaaacatctgacatggccactaaatctttagacttgccttatagatccttccatatcatccccaagtgccccttctgcctcagtcctgttcctctgggcaatagctctagggaaaagtaggtattagactgctgtgcaaaattcagagcaactacttaaaatgctctagaggattcttagccagtctgtgaaagtgggcctcctctgtggtggggctgtttggcttaggagatgctgtagtagtagagataatcaggttctattttaagcaatcagcagagatcaatattgtacagatacaagcaaaggtttaataaatatatatatatatatttatttctgtagttgtgccagggacagactggccaaagaccaaacactgcagggtccccaagaaatttgtccttatatcattgtgtctgagggccagatatgattatgaagctttttccaaagatccagggatgggaatgggagtgggtaggaggggtaatgcggtcattggagtcgggggctggaacattatgagtgctcaataaatataaactaatgagaatggtggtgatggaaaa

SEQ ID NO: 288306 - DNA, 1000 bp, Homo Sapiens; identical to SEQ ID NO: 222259

SEQ ID NO: 288307 - DNA, 1000 bp, Homo Sapiens; identical to SEQ ID NO: 117040

SEQ ID NO: 288308 - DNA, 1000 bp, Homo Sapiens
tcaaggagggcagcgagcacctgtttgatagctttgaacccgaaacgtactgggatcgaatgcacctcttccaggaagccattgcacacaggtttgggtttgtacaagataaatattctgcctctgcttttaacttccctgctgagaacaagcctcagtatatccacgttacaggaacagtgtttctgcagctgccctactccaagcgcaagttctcagggcagcagcggcggcggcggaactccaccagctccaccaaccagaacatgttctgcgaggagcgggtcggctacaactgggcctacaacaccatgctcaccaaaacatggcgctccagcgccacaggggatgaaaagtttgctgatcggctgctgaaggacttcacggacttctgcatcaaccgtgacaaccggctggtcacgttctggacaagttgcctggagaagatgcatgccagtgccccgtgaggccaggctgcacctgtgctgggggaaggtgggtgagccactgccctcaaacccggggcggaggattccaggcaggctctaggagtcaggtgtccgtttgctgctatcagtgagtgggggccattgttttttgtttgtttgtttgtttgtttgtttgtttttggcccccacgacaagtcttctactctagaagaaagactttggaagcagctgctgctgctgccaccactcctgtcagcaagtgctcagagcaggtgggaggcacagattgtccgtgggagggctccagtgtctgggaagagggcaggcggcccccatgaatgtcctcggaagggggtggctcctggtagcatccttttccttcaccatctatgggatattaggggcagaatctgccacttcttgcccaggagtgtgcacagatgtaagataattttgtgaaataatgtaccatagactctcaccaactgtatatacctgtacatatcagaagcaaataaagagctccacgtgcatcaaaaaaaaaaaaaaaa

SEQ ID NO: 288309 - DNA, 1000 bp, Homo Sapiens; identical to SEQ ID NO: 117041

SEQ ID NO: 288310 - DNA, 1000 bp, Homo Sapiens; identical to SEQ ID NO: 222260

SEQ ID NO: 288311 - DNA, 1000 bp, Homo Sapiens; identical to SEQ ID NO: 117042

SEQ ID NO: 288312 - DNA, 1000 bp, Homo Sapiens; identical to SEQ ID NO: 117043

SEQ ID NO: 288313 - DNA, 1000 bp, Homo Sapiens; identical to SEQ ID NO: 222261

SEQ ID NO: 288314 - DNA, 1000 bp, Homo Sapiens
ccagtacttctatttcctcagggatgagaaagatagtcaaggagaaaacatgtttctgcgctgtgtgagtgagcttgtgattgaaagccgagagttcgatatgattcttgggaaactagagaatgacggaagtagaaagcctggagtcatagataagtttactagtgacacaaagcctattatcaacaaagttgcttctgtggcagaaaataaaggactgtttgaagaggcagcaaagctgtatgaccttgccaagaatgctgacaaggtactggagctgatgaacaaactgctgagccctgtcgtcccccagatcagtgccccgcaatccaacaaggagaggctgaagaacatggcactctccattgccgaacggtatagggctcaaggaataagcgcaaataaatttgtggactccacgttctatcttcttttggacttgatcaccttttttgacgagtatcatagtggtcatattgatagagcttttgatatcattgagcgcttgaagctggtgcccctgaatcaggaaagtgtggaagagagagtggctgccttcagaaatttcagtgatgaaatcaggcacaacctctcagaagtgcttcttgccaccatgaacatcttgttcacacagtttaagaggctcaaggggacaagtccatcctcgtcatccaggccccagcgagtcatcgaggaccgcgactctcaactccgaagtcaagcccgcactctgattacctttgctggaatgataccataccgaacgtctggggacaccaatgcgaggctggtgcagatggaggtcctcatgaattaagtgccatgctttgtgggagtctgggtcggcacactgtcagtacatcaggcacatgggcccactaggctggggtttctggttttgtttctgttgtgttttgttttggtttctgtattatgtatttttgtcaacgccaataaatttctttgatttgtaaaaaaaaaaaaaaaaaaaaaaaaaaaa

SEQ ID NO: 288315 - DNA, 1000 bp, Homo Sapiens
tcataatgtggcagaggtggtgggaagaagaaagttgagctttttccccttgagaaacttctgcatttagtttctatctttccaggcaaaacaaatgggtattcttttcatacaaccattttcaaatgaaccttagaaaagtcttaacatttaaggtattttatgcacagaatacacttagattgataggaaagaactcgtaatggagtttgagtaaagaaaatgactgatgtactaaacccagtaaaaattgttgaaaatgttaaaggtcagcatgttctaattgggaatctagatatagcttagatttcctattggcttagagtatttgctataacaaatgaagtgcaatgacaattatatattcctactcggtcatactggactggcttcgttctcttaatatactcagtaatgactcaagcctctggctattaacataccctagttgccgttttttaattgccatgagccaaatacttcttggtatacaattgatccatttattttaatggctgccttttcattttcatcttttcttgctgctacccatctatgtatgtagtcattggggggaaaatgtagccacattttttatgggaagactttgtgttaaaagtgaacattttgaaggtttttaactggtgaaactagcctggaataatgccaccagagactgagtggaaatcgccccttttgaaggtgccattcttatgagccaaaagtttgtcatttaaaagttcattttgagggaataacatgtaatataatttgaaataaaggtatagtaaccttaaaaagaacattataactgattgttgtgaatggggtgaatttgttaaaatgagtaactttgataaagtttttcatgcacaggcaaaatgtattcactagatttctacgtagtgatctgcttttactttgtaatttgtagttctcaaaagacttttttttaaaaaaataaagtccatacttacacttaaaaaaaaaaaaaaaaaaa

SEQ ID NO: 288316 - DNA, 1000 bp, Homo Sapiens; identical to SEQ ID NO: 222262

SEQ ID NO: 288317 - DNA, 1000 bp, Homo Sapiens
tcctaggccggaagcacatgctaagacggagttcccagtggagtcgggatgagatggaagaggtgcaaaagcaagccagctgtttttttgctgatgacatctcggaggatgatccattccttctgtatgccacactgcactccgggaatcactgcaggtttatcacaagagacctgatgcgggaccacaaggcctgtctgcctgatgccaagacccaacgcctgttttttaagtggcagcagggacatcagctggcaattgtaaataggtttccaggatcaaaactaacctttcagcgtattctcagctatgacacagtggtgcaaacaactggagactcgtggcacataccatatgatgaagacttggtagaaagatgttcctgtgaagtaccaaccaaatggctttgcctccaccaaaagacatagagattcttacctctatgctaagtttgtgtttgggtaccctctaggttggcatcagaggctcttgagctggtgtttgtttagggcattgcctctgtcctgaagataaaaggattctattaacagcattgacattgattttttaatgaaatgagatatatcttttcataaccagctgcgtttttttcccctaacatttgtttttggaggcttatcaagagttggagaacttagtgtagagcaaaacctgcatttctcctactgggccagctattccacttagcttgggtgactaatagtgcttttggtatccattttttgctacttctgaccttgccttccaggcctaccaatagcagaatcaatccatctgtccctgagatactcatgttgtttcaaatgcctcctcccatttctggcatagtctcattctctgtatgttatgccctatccacatggaatcatttatcgtcctctgtaataaactggccaagatactaaaaaaaaaaaaaaaaaaaaaaaaaaaaaaaaaaaaaaaaaaaaaaaaaaaaaaaaaaaaaaaaaaaaaaaaaaaa

SEQ ID NO: 288318 - DNA, 1000 bp, Homo Sapiens; identical to SEQ ID NO: 222263

SEQ ID NO: 288319 - DNA, 1000 bp, Homo Sapiens; identical to SEQ ID NO: 117044

SEQ ID NO: 288320 - DNA, 1000 bp, Homo Sapiens
cctttccaaagcaaccattaaacatactttgtttctactattggtggagtttttctatatttaaaaatacatatatatttcagaggatttttattttgctttttggcatttcagactttgatcagtgttaagtgcacttgtattgctttttaatctgttaattttttaaagacccaagcagtcattttgagttatatctataaaaattataaaaggatttttgaaagtataaacaaattgtcagtgaaataaatgagattttggaataaagtgagaatgggagaagggatatgttgtgagcatataccttcacagttcttaatacctgttttgtaatcatgatattcagtcaaggcattatggtttttaatcttgaaacttagagaaccctttgaatatttgcttttactggtgtacagtatgagtggaatataaactgtacacataattatcatgttgatataaatcataatttcaactagatcaagacatgttaaccttttataaatttaaagtcaataaagcacctttttaaaggaaacactgcaactttccttaacagcctgttaataaaggctttgtgacaagctctcaaaaaatgcatttctaaataggaggacatcaatgtattgatgaagagaaaaaactagtacttagttgccacactcatgcttacatagaaagagagcccaagaatattagatttcctcatgatacaagatactacagtaacaggctttaatttaggatccttaagattttggggtattatttgtgactctcctgaaattgtaaacttgtgcttctgtgtccagttttctaatgagtaggttcgtagcttgattgaattaataattgtgagcccatagacacaagggaagtgagaaacagtgctctggtgacatgataaatatatgtgtcaaccaccatttcagctattaaaaactcctgttatctccttgtttgaatttcaggtcattaaattgtataaccatcattt

SEQ ID NO: 288321 - DNA, 1000 bp, Homo Sapiens; identical to SEQ ID NO: 117046

SEQ ID NO: 288322 - DNA, 1000 bp, Homo Sapiens
accatcccagccaccccccatcttcctggcctctttggcagctccaccctgtccccccaccccacaaaggggggctacgcagtcactgacttcctcacctacaactgcctcacgaatgacacagacctgtacagcgactgtctccgaaccttctggacctgcccccactgtggcctgcatgcgcccctcacgcccctggagcgcatcgcccatgagaacacctgcccccaggccccacaggatgggcccccaggggctgaggaagctgccctcgaaaccctccagaagacatctgtcctgcagaggccctaccactgcgaggcctgcgggaaggacttcctctttacacccacagaggtgctgcgccaccggaagcagcacgtgtgagctgggccaggagccctgcccacctccgtgcagctgacctgccctccagcccaggactaggggcaggactcttgcctgaacccccagcctgggcttagccctgtggtcctgtcccagtgcagagggcctggagcacggattgtgaataaagcctcacatgctgatacacactgttgttaggcctgcacctgcccatccagaaagcagcagctgccttgttagtcctccccagggtctagctttccttcttcctgctgcagggtgctgcctgaggggtcctgggtaggaggggcgttagagccagcagggacctcccatgtctccagattccaggtgcaggttcttagcacctccgcagccgctctctcttgagtccatcctcagtctctcctaccccttgaagtagggggaccctgaatttgcccatccacctgggtcactttgagagttgtgcaggggggctgggagcactggtgttcacgtgggaccacaggctgcaccataagacccactcacaataaaaaaataaaaggccgagccgggcatggttgctcactcccgtaataaaaaaataaaagaacaggctgagccgggaaaaaaaaaaaaaaaaaaa

SEQ ID NO: 288323 - DNA, 1000 bp, Homo Sapiens; identical to SEQ ID NO: 117047

SEQ ID NO: 288324 - DNA, 1000 bp, Homo Sapiens; identical to SEQ ID NO: 222265

SEQ ID NO: 288325 - DNA, 1000 bp, Homo Sapiens
atcgcttgaacccgggaggcggaggttacagtgagctgagattgtgccactgcactccagcctgggtgacagagtgagattccgtctcaacaagaaaaaaaaaaaagaatatatatatatgtatgtatgtatgtatgtaaacacacacactaatttgagaggacccgtagggtgtctgagcccagccacctgagtttttagtactgtgttgtcaggctcttcccaggcctcaggtgttgtcttttgtgctgtgtggggatgcattgctgcctgtatttatgatcttttgccgtggttctgagcattcacctcaccatgtttacaaagaactgttttgtatatagacattttcaggcacgtgctttgcaccaaccctgcgtggctcttgtctgtgttagctgtcacggtgtgcacactaatctctgttaaagttgtctatggctgttctacttgtaagatagttttctatttccttcagtaatgtgtccacagtaccctgtatttcgagttccattatactgaagtactcatgttttaatagtgcctctccaaaggcctcaccttggacagaggtcaatccttgatgctccagcacaggtgacgtcactaattgtcactttccagtttgtttttctctattaaggaagacattttctaattgcatctccatgggctgtgagactgtgtgaagccgtttgtgtggtctccatgtaggtgctgtgttcccggcaccgccttgctctgaacactggtaattccaggtgctgcgcttggcagaggggtctcgccaaagcgcatgtgtgtgcatgtgtgaacgtgtgtgtcctttgcatggttgggcgtgggtgccttgctagggcatcagcaggacattgtgtgtatagttacaatgcttccaaactggaactctacattttgtatcttttaaagctcctataagtaaaataactattggctttattaaaaatatacatttaataataaaaaaaaaaaaaaaaaa

SEQ ID NO: 288326 - DNA, 1000 bp, Homo Sapiens; identical to SEQ ID NO: 222267

SEQ ID NO: 288327 - DNA, 1000 bp, Homo Sapiens
tgccacagggatcctggcctttcccaaactagtggcgtcagtgagcgagtctgggctgcaggctcagcatggggtgaagatccactgtaggttgtctggggggctccctgggcactcccattgctgtgcccacctttggggtcccgctgggttagtcccagagcctggctctaggaccaaagatgtgtggaccatgacctcagccaatgacttggcccctgcagaggcatccccgctgtcagcccaggatgctggtgtgcaggcggccccagtggcggcctgcaaggctgtggccaccagtccgtccctggaagcgcctgcagccctgcatgtgttcccagaggtaactctggggtccagcctggaggaggcgccgtcccctgtgcgggatgtgcgatgggatgctgagggcatgacatgggaggtgtacggagctgcggtggacccggaggtgctcggtgtggccatccagaagcacctggagatgcagtttgagcagctgcagcgggcgcctgccagcgaggacagcctgtctgtggagggccggagggggccgctgcgggctgtcatgcagtccctgcggcgccccagctgctgcggctgctctggcgcggcccccgagtgaggagctgtggcccttggagctggcctgggcccactgacttagtcctagacctgggccagggacagtgggggctccgtgccccctggacccaccggcagctgggcacatgtctcacccgaatatcggctgcctccagaccacaggactgcagcctggggcttccggccccacacagctgggctgttttcttaagggcttgatttccaagggccacatctctgcaccttccaggctctgaactttgagacagggctttagcactgtgcagaggggagatcctgagttttctttaaaaaatgaccttttgttcaaaaaaaaaaaaaaaaaaaaaaaaaaaaaaaaaaaaaaaaaaaaaaaaaaaaaaaaaaaaaaaaa

SEQ ID NO: 288328 - DNA, 1000 bp, Homo Sapiens; identical to SEQ ID NO: 222269

SEQ ID NO: 288329 - DNA, 1000 bp, Homo Sapiens; identical to SEQ ID NO: 117049

SEQ ID NO: 288330 - DNA, 1000 bp, Homo Sapiens; identical to SEQ ID NO: 222272

SEQ ID NO: 288331 - DNA, 1000 bp, Homo Sapiens
tctggaaatatttgatttaaaaacatatattaatagatgttttccctagcagacttttggagcaaaaatattattttagttcagcagaggattactgatattatgggctgatctcagaaaggaataaggatgaggcagagaggagtacttgagtttgtgtgtgtgtgtgtgtgtgtgtgtttgtgtcagtgtcacataagttctccatattgccttatgtcccaaagccaaatataaaaatataaatgatgctttgtataattcattttatcaaaaattacccataactttcatttgtttttatatcgacaatgaagatgatcatatttcattttgcagatgtggccataaaatattatttacttctatataggtgattttaccaggtttagttatcctgagaaaacatctggacttaagagtttctgcttccctacaaagatctttaaagttatttttaggcacatttgtgacaaacaactacttgatattgaaatctccttcagccattagaagctatcaaataaagtaggtgtaaaaacaactgtctgtggcatttgtatacatcgagaacatttttctttccctcattttctgcagtgaactccagtaaagctaagtgtcttatgaaatctaaactcatatatgtacacagttcactctagcttcttccaaaatatctctaggtagtacaactgaagccaaacctgcctgacttcctgctcctggccacccaaaactccatatggcttctcgtacactgacatcctctctctacccatttaactgctaattgagtctgataaaagtcttctttgaaaaaagtttttacttctaagatttgcatttacatcataaaattaaaccattttcaggaaaatcagatttttttattacagtactatttgctttaaattcggcatgtttttcttaagtagcaagtacatgtatcggaacttagaactggtgggcgcggtggctcttgcctgtaatcccagca

SEQ ID NO: 288332 - DNA, 1000 bp, Homo Sapiens; identical to SEQ ID NO: 117050

SEQ ID NO: 288333 - DNA, 1000 bp, Homo Sapiens
tattttgcagcagtcctaaagaaggaatgattaagggtctgtggaaaaaccacagccacgagtccatggcagtaagattggtgactgagctgtgtttagaatacaaaatctatgacctgcagctttggaatggactcttgcaaaagcttctgggcttcaatatgattccttatctaaggaaagttttaaaagccatctccagtatccattctttatggcaggttccctacttcagcaaagcgtggcagcgtgtgatacagataccactgctttcagcctcttgtcctttaagtcctgatcagctgtcagattgttctgagagtctcatcgctgtcctcgaatgtccagtctcaggtgatcttgacctgatcggagtcgccaggcagtatatccagttagaacttccggcttttgcattagcttgtctgatgctcatgccccactcagagaaaagacaccagcaaattaagaattttctgggttcctgtgaccctcaggttattttaaagcaattggaagagcatatgaacacgggccagctagcaggattttcacatcaaattagaagtctgattttgaataatatcatcaataagaaggagtttgggattttggcaaagaccaaatactttcaaatgttgaagatgcatgcgatgaataccaacaatatcactgagctagtgaactatttggcaaatgacttaagtttagatgaagcttcagtcttgataactgaatattcaaagcactgcgggaaacctgtgcctccagacactgctccctgtgaaattctgaagatgtttcttagtggattatcgtaaatcactgaacctttttttcaagaaggacaagaattttggagtctgctattaatggaccatatttattacagtttttaaattgtacaatctctgtattatagctatttgtctaacattaccccacatgtaataaataaaacaatatgagcataattgccccataaagaactcaaaaaaaa

SEQ ID NO: 288334 - DNA, 1000 bp, Homo Sapiens; identical to SEQ ID NO: 117052

SEQ ID NO: 288335 - DNA, 1000 bp, Homo Sapiens; identical to SEQ ID NO: 222276

SEQ ID NO: 288336 - DNA, 1000 bp, Homo Sapiens
aggctgagacaggcgaattgcttgaacctgggaggcagaggttgcagtgagctgagactgtgccattgcactccagtcgggttaacagagcaagacactgtctcaaaaaaaaaaaaaaaaaaaaaagtatcaaccaacaaatgttaccaagataacgtgacttcatgagggagaatgtcactattaatttatcataccatttccaaaaagggctttgtgcttttcacataaaattgagacagtgtatatttaatctaatttaaattttaaagagatactggtattttgaaaatgcaacctatatatattcttaatatccttttaagaatatggagatgaagattgttttctccaattttctgtgccattttaaatttaactttgacatccagctatagacagaaataataagccaccctgggtgtaaacttgattttctttattgagatgtatcatgtattgaatgagtgaaccagaaaattagaagatggtcaaaaaaagtccaagttaccaattttttaaaatttataggcaaagtatcaaattgtcttcttaatatgataaactgtgctttatcattctgaaaactcaggatacagcttattcatagcattgtgggtctctccagtaagaaagatgctaaaagttttgtgcactttttgtgtgtgtaatgcaaattagttaaaacaaatagttttggagaaagttaaaactagctttagagtaaggatgagaaacttgagtgtttttaatttaaagataaaagcctgtgttttacacattcttttttggtgttcatagcttcttctcatacaggtgccagacactgtttgtgcttttgatggatttttatttatatactttttttgcttatttttactttgagtggaatgttcattaatgtaaattgtatttatttttatacttttattttcactagttttgcttctaggcaaaaagcaaaataaacttttcatcttaaagaaaaaaaaaaaaaaaa

SEQ ID NO: 288337 - DNA, 1000 bp, Homo Sapiens; identical to SEQ ID NO: 222277

SEQ ID NO: 288338 - DNA, 1000 bp, Homo Sapiens; identical to SEQ ID NO: 222278

SEQ ID NO: 288339 - DNA, 1000 bp, Homo Sapiens
gtccttgcagcatcctgaaacacagatccatgcagaatgagccctgcgagcaatagagttgaagcagcctctgctggacagtggactgttctatttttttcaataaccaaaaagattaaacaaaaaatactataaaacccctgaccacatttaaaaaatgataataaaagtaaacaaatcagcatctttttccccttccctgcttcattaccccctcttccatctatagactttgtcatttttgtctttagaaaagatctgaaggatggtaaagccccgtgctgaaacccagtagagaaacctgtctcaggacacacttgccatctagggctagcttgaaagagcctgaggactgcctttaactgaatttgaattcagcattgtcctttcttcttagtatttgctgcataattgagagcagttcacatcgatttcctggtaggcgtctgcattccctgttgtgttcctgcttctccttcagtagctgcacaacttgcgcagatcgacacactgttgtcacttcattctccccgtctgagaaggatcttgtgttcagttagagtcgtggaaaaatccctgatccttcaaggtcagtcagacagttggcaacattataattaaaaataagaaattaagactttaaattaaacatttggtagagtcatcataaaacaccagaccacttagactcaggctgaaccatactctttctattcttatttttcatccttgttcctcacggttcagtgaacaggctcatatcatgacagaatggacttttaaaagttagtacttaaggaaacttctttaggtggaagaaagtaaagttcttattgtcagtgaactttattagcaccagaaatctctattgatgcttttaatgcattgcctgccttcaggttttcttcttaccccacccctcaataagatttggtgaattgtaattctagtaaaacatgtcataccattggttttcctaaattatcaactttctttcatt

SEQ ID NO: 288340 - DNA, 1000 bp, Homo Sapiens; identical to SEQ ID NO: 117053

SEQ ID NO: 288341 - DNA, 1000 bp, Homo Sapiens; identical to SEQ ID NO: 222279

SEQ ID NO: 288342 - DNA, 1000 bp, Homo Sapiens; identical to SEQ ID NO: 117054

SEQ ID NO: 288343 - DNA, 1000 bp, Homo Sapiens
atacctgagctggttaaatgatttctctccatcttagctaattctgtttaaaactctgtcagaggcctgcaggctgtgagttatatttataaatatatcttcagaaattaatcttaaaagaggcattagttcagaatacttttttaaaagtttaaattaaatatttaggcacgtcagaaattacttttccttattttgaaatgaggctacttatgtcttggttttattttgttccatgtttaaatcattcactttgatttgagtgggaaaagcctgaagcctttatcatgtggttgctggtgtgtgtaattattaatgaaatgttcactcctagtcccttatgaggcttagaatttcaaccacgtgtcaggtcagacagtattataaactgtactttgctgtctgagacagcacatttgtgaatgatgcttgctgcctgccattttcaacctattctctcttaagagtgctaggtaccaaattgtgaaagtttgttttcagttatattacttttgaggctggtgaaaaatttaaatgtaactttgtgggaacactgattcatatttagaaaatgtaaatgtctgtagcactttcttgcagttaatttgaaaactttggatgctgaaccttgtttgtcagtgatttagatgatttaaaaatgcatgtgtgatttgaattttataattgttttgacaagcataatttacttggacaacttcgtaggtagccttaacttctggccaagtttgttttttatataaatatatatacatatatacatattatgtatggttgtaaattcatacacttatcacatgaatgtgttactgtatacaaaactcttaatgctttattctcaaatgctgggttgaaaaatgttttgaaagccttttaaaatatatatctttataaagtaatattcaggatgatgataaaaattgtttatattgttatgataaaaatgacagtataatgttaaaaaaaaaaaaaaaaaaaaaaa

SEQ ID NO: 288344 - DNA, 1000 bp, Homo Sapiens; identical to SEQ ID NO: 222280

SEQ ID NO: 288345 - DNA, 1000 bp, Homo Sapiens
gctctcctggggccttcgatgggcttttcttcttgtcagtggagggagcagctccccactcagccctgggacaggccctgggactgtggtggccggtggccctggcccagctctggagtgcatgtgtgtgtgctcagatcccgcatctatgcaaaggtgcaggctgcctgtgaggctccaggcggtggaggtgcggcagctgctgctcaggtgccatgccctgaagaggcagggtacacatggggctgggagggcaaagatggggcggggcctccccctgagagagctcaccctccacagtgacccttttccttcctgcctaatacctcctcccgttgggctgtgacttttcctcctgccctcagcctctgaaacagaaatctttggggcctcccctttccccagcgtctggcaagagctgatgaggtcctgaggaacagtgtccccaggaaccaccttctggagcctagcggccagacgtggcttctcctgagttctagggctcgggccagagtggcactactgcccggccagtccaggctcaggcaggaatcggacgctggggcccgggctctgcacagagagctgggcttgagtggagtttattgtagatttctcccaaggggatcacttagcttctcactgacacacccttcccaattgccacaagcgcaggggtatcttacagcactttggggaggggtgggacaaactgcaaggttctggggccaaggcctacccaggggcctctgcccagagaactcacaaccccctctctgacctaggggacaatgcaaacaggtcacagtgcattcccatattaggccatccccttcacgaagaattcaggggatgtgggaagtggggaggcggggagggatcttgactcttgtctcctttgtccttttgttcagacagagttgtacctgcagcagacaactctgaattaaagcatgaaaacacagcaaaaaaaaaaaaaaaaaaaaaaaaaaaaaaaaaa

SEQ ID NO: 288346 - DNA, 1000 bp, Homo Sapiens; identical to SEQ ID NO: 117055

SEQ ID NO: 288347 - DNA, 1000 bp, Homo Sapiens
ttggggccaacgctggctctgaagtgtctttttcagaggaattggactggagtgaatgggcacaggggtggagcgcagggcagccccagtcaccacgagctgtttcatttgtgtaaatacgatgctgaattttatgaggctgagttaagagtgggcactgacgggcccctaatatgtgacatgacgatttggcatagatagggatgtgagagtggagtaccttcctttctcaagtctcgagatgccagtgaaaccagtattccctgacttgggtttcacactttatcgaccaccccatggggtcctgtgtagcctttggccacgcactgacactgcccaggccaagcaaaagcagagtgtggttaagagacaagggtctatgtcatcatcccttttgcttatggtagtgggctaacataacagcccctttctcaagcagagacctggcccctgggccagccagatggaagggcctatcttagccagctggagcttaagccaaacctgttctgtcccactggccagccatctttgctcacatggaaattcaaatgccattcaaaggccactggtgctttatttttctatctgctgagtaaactgaaatgagatgggtcccaaccaccactgtaattttcaagcctattttatttgtacctgtaaatactgtacagctaatatatatatatatatatatatgtgtgtgtgtgtgtgtgtgtgtatatgtgtttatagagatacacacacatatatatgtgtgtatatatatacacatacatatatatacacacacgcatttgcacagacacacacatatatcaattctcatgagtgtattataatctctggtgggggcaagtgtctggaaggcctgaggggcacttcagatgagaatggagaggtagggagccaggtgcagcaggatccctcaaatcaataaagcattaccagagatgcaaaaaaaaaaaaaaaaaaaaaaaaaaaaaaaaaaaaaaaaaaa

SEQ ID NO: 288348 - DNA, 1000 bp, Homo Sapiens; identical to SEQ ID NO: 222282

SEQ ID NO: 288349 - DNA, 1000 bp, Homo Sapiens
ccgttaccaccagcagggagagggccaggaggagccgcccctgaatccccatggggctgctcgggcagaggtctatctccggaagtgcacctttgacatgttcaacttcctggcctcccagcaccgggtgctccctgagggggccacctgtgatgaggaagaggatgaggtgcagctcaggtcaaccagacgtgccaccagcctggagctgcccatggccatgcgttttcgtcaccttaagaagacgtccaaagaagctgtgggtgtctacagatcagccatccacgggcgaggcctgttctgtaagcgcaacatcgacgcgggggagatggtcatcgagtactctggcattgtcatccgctcggtgttgactgacaagcgggagaagttctacgatgggaagggcatcgggtgctatatgttccgcatggatgactttgatgtagtggacgccacgatgcatggcaatgccgcccgcttcatcaaccactcctgtgagcccaactgcttctctcgggtcatccacgtggagggccagaaacacattgttatcttcgccctgcgccgcatcctgcgtggtgaggagctcacctacgactacaagttccccatcgaggatgccagcaacaagctgccctgcaactgtggcgccaagcgctgccgtcggttccttaactgaggccgtggctgcccaccacgacccctcacacctcctgctgccgtcgctgccatcttgcccctagcctgggggctccctagcccctcccagagcatctcacccccaccctcatgttcagggtggatgtgggcatgcaggtgacaagggccctgcctccacccctccagcccatccagcaatcgccccctttctgccctgggggcccaggatgtagatattgtacaaaggtttctaaatcccttcttttctatgcacttttttatttaagaggtggggtcccaggtgggaacccccccacaataaagtctgtcaatgtttgga

SEQ ID NO: 288350 - DNA, 1000 bp, Homo Sapiens; identical to SEQ ID NO: 222284

SEQ ID NO: 288351 - DNA, 1000 bp, Homo Sapiens
tgtctagcctgctatggggggccagattatcttgataagagcaggtgatttggggactagctgggttggcaggaaaagagcaggatggatctcttgggacaggttcccccaggagtataaacacaaggagccaggattgtgctggcagccaaggaaacagtagtgcctgtttgagttggcagagagggccttggcacctcttgcatccaggcagtcttgtgagatgggggcacatagcactggggaaagcagaactccattctcacctctattttgagcttcagtgctttatttcagtatgaggaaaaacaacaacaaactgaagtgcgctttccgtcctttcaaaggacaactgtcgggaagggagagccgagttgcgaggtaggaggggagcactggcagggagagacattcttgactcctctcttccctggtgtgttgtgatccagggaatgaaaagaaatttgaccctggattggttctctccttggacttaaggaatcttaccttttccttccacaaagttctcccaggcaaggaccagctgcccattctgagcccagggcagcctcttcaaccattattggtctaacctggcttgtcaggaaaccaagcccacccttccacattgggcctggctgctctattctgtaccaagtactggagaaaaagcatcaagttcttagcccttgtagcttctaccctagtttcccatcctctctctgtggaggccaaaccaactctttgccagcagccacaacatgcattgacagcggcacagtgagatataactgatgggctttgaacctggttggccggggaagctgtaggggtggatagagctggctttccttctgggctgtctccatctgaccctaccccttccatgtcccaccccactcccaccaaaaagtacaaaatcaggatgtttttcactgtccattgctttgtgttttaataaacaatttgcagtgacactctgaaaaaaaaaaaaaaaaaa

SEQ ID NO: 288352 - DNA, 1000 bp, Homo Sapiens
acagctattaagtgctacctgcctctcaggcactctcctcgcccagtttctgaggtcagacgagtgtctgcgatgtcttcccgcactctattcccccagcctctttctgctttcatgctcagcacatcatcttcctaggcagtctcttccccaaagtctcaccttttcttccaatagaaaattccgcttgacctttggtgcactgcccacttcccagctccactggcccaagtctgagccggaggcccttgttttgggggcggggggagagttggatgtgattgcccttgaagaacaaggctgacctgagaggttcctggcgccctgaggtggctcagcacctgcccagggtaggcctggcatgaggggttaggtcagccaatgtcagctgcttctcttggggccctctcagagtctatctccccaagacaggaagggaaaagcaaatttctaattcaccagcaataaaaattggaggaggcttggccctcagcccttatatctctctctttttcactctcttcctcccacccccaagactgagttttggggggcaaggtggagagagctggcaactactgtgagcaagtcccctagcccctgaccagcctcctcccatgactggtgactgtttaatgagctgtgcatcccccacaaaaacatgagtgcccctctgtgtggcctctaaccctctgcacagcccttctgggtggtcctcaccaggtctctgagctgggtgggaggccatcctggcgaccactgcccattccattcacccctcactgtacctgccctagaacctgggcctaggccacaggggcagggagaagagaaggcattagtaagaaaaaaatagaaaaaaatatgaacagactcagctttgggacgtccaaccacaaaagaaattatatataaatatatataaatatatatctctaccatatgtgatggaaagactttttgttttcctttcccaaagaaataaaacggaaaaagcctc

SEQ ID NO: 288353 - DNA, 1000 bp, Homo Sapiens; identical to SEQ ID NO: 222285

SEQ ID NO: 288354 - DNA, 1000 bp, Homo Sapiens; identical to SEQ ID NO: 117056

SEQ ID NO: 288355 - DNA, 1000 bp, Homo Sapiens
aagctaatattttctttcccattcatcttgccctccccctcctcccgccagctttaaagttcagtggagaagccagatggcaattcagacaaaggtatactcttcctgcttcatgggtggtggcacgggaatagatagcccttagccctttccctcccagtcccagctgagccctcagaccacttgcttcccacataacaatgtcgcctccatttccgaggaacatccttgcgtagagaatgaaatatgctgcaatcatttctgcatccttactcctcacccccaaagaaaaaaaaaaggcctagcagggaagcagcatgcaggcttcacagcttaatgccaaggacagcgagtgaggctgggagcttctcttgggcctgctgggtctgtcagctctcggaatagggacagtccttactggtgccccaaggtgggacttggagaatattttgcttggcatatgtttggtctgaatggtgtagttgctggttccctagagaggaaaaggtggcaggcccagctttgctgggaaatggctcttaatttccagttgaaaccctagtagaattgtgaatgaaaacctcaaggttgagcccctctgccaagcagcagagctagtagaaggggatgcaggggcaaagcactcagttgccaagcaaggaggagagatgtacgtgggctgtgtggcagtccccacaccctgccctggcttcttcaggttatcgcaccactatggaatcctttgcagaatggtactcatataatggtttaaaacaacacattcataattgactctgtgcaggatgtcactcaatcagtttgggtttgctttattttattttatatatatattttttggtatcctgtacattgcagtgggtgtgaagatagtattttaatatttgtacaaagtttaatttaattttaattgttctatgtatataactgcatttctaaataattaaaaaaaagttcttatgaaggcaaaaaaaaaaaaaaa

SEQ ID NO: 288356 - DNA, 1000 bp, Homo Sapiens
gggggggtggataaaaacatgtctgcttctcatttaaataagagagaaatgatgccgttttttaaatgtgaagcagactataattctcagctctcttttcttcttagccttaaattaatattctctttcttctagttttggaaagtgtagtgggaatattcagacaaaagaggccattttccatttttaaagcttcttactggtgaaacagcccagttgtagtaggtgccagtcagtcaaggcaggggccctctctccgtcaatatggaaaactcagcagttttcctctcccccagttgtgttcttgtaacgttgttaatgggttcctttgctttttgctttctccttttctgaaaatgtatgtgttttgcctctcttttggctacatcttcaaaatatttcttttgtgcctatgtacatgtgtaaacatgccatagcatgtgtggtaggtgtcctgtattttgtttgggaaaaaaactatcaaaatgaggaagagaatttcccctatttatgcactaggtttctgtgctttttctttgagttctctggagtagatattaatttgataccttcatggtaatgaaattatgatggagctgtgttataaattccttatgtcagaggccagtgcggtagcctttgtcccttcatgcctttcaattctgagtgggaggaaaagcaaacatcaaaacagtgcttcagccaaattccatatgtaatgccattgggagagtattgactaaaatatcattcgtcagggaaatatagttgtaatatttttacaggatattcctaggtaaatgaaggagccttcagttgtaaatttcaattaccccaaaatgtatttgctacattttgttgtttgaagtattacctcttaaccttctttgttaatttttttcattttgtcttatatagtccagttttccaagataagctcagtcctttttcaaatgtcccctttttaccaatactttttcattaaattatgaaaactgct

SEQ ID NO: 288357 - DNA, 1000 bp, Homo Sapiens; identical to SEQ ID NO: 117058

SEQ ID NO: 288358 - DNA, 1000 bp, Homo Sapiens
aagccaagcatccacttgtctgtgtctgggaagggatggccaaggccgctagggtccttacccctcaggatcactccccagccctttcctcaggaggtaccgctctccaaggtgtgctagcagtgggccctgcccaacttcaggcagaacagggaggcccagagattacagatcccctcctgtaagtggccaggcattctctccctgccctctctggcctctggggtcatactcacttctttagccagccccatcccctccaccccacacctgagttcttgcctcctccttttggggacacccaaaacactgcttgtgagaaggaagatggaaggtaagttctgtcgttctttccccaatccccaggaatggacaagaagccaacttagaaagaagggtctcacgtggctggcctggctcctccgtagacccctgttcttttcaacctctgcccacccgtgcatgtcatcacaaacatttgctcttaagttacaagagaccacatccacccagggattagggttcaagtagcagctgctaacccttgcaccagcccttgtgggactcccaacacaagacaaagctcaggatgctggtgatgctaggaagatgtccctcccctcactgccccacattctcccagtggctctaccagcctcacccatcaaaccagtgaatttctcaatcttgcctcacagtgactgcagcgccaagcggcatccaccaagcatcaagttggagaaaagggaacccaagcagtagagagcgatattggagtcttttgttcattcaaatcttggattttttttttccctaagagattctctttttagggggaatgggaaacggacacctcataaagggttcaaagatcatcaatttttctgactttttaaatcattatcattattatttttaattaaaaaaatgcctgtatgcctttttttggtcggattgtaaataaatataccattgtcctacaaaaaaaaaaaaaaaaaaa

SEQ ID NO: 288359 - DNA, 1000 bp, Homo Sapiens; identical to SEQ ID NO: 222286

SEQ ID NO: 288360 - DNA, 1000 bp, Homo Sapiens; identical to SEQ ID NO: 222287

SEQ ID NO: 288361 - DNA, 1000 bp, Homo Sapiens; identical to SEQ ID NO: 222288

SEQ ID NO: 288362 - DNA, 1000 bp, Homo Sapiens; identical to SEQ ID NO: 117060

SEQ ID NO: 288363 - DNA, 1000 bp, Homo Sapiens
aactgtgaccttgggtaaggctcctcacttttctgggcctcaacttcctcatctgcaaaatcagagcattagctgctctccccatgattccctcccagttttaattaaaagtctctgatctggagcacatgagggttgcgagcctggtgcacctggttcctgtctccgtgggctggtttccttcagcccctgatgcccaggctgggtgcaggctctcatctggtccatgcccagatgctgcctcagacaagaactctgggaatcctaacagactctgctttcctctcttcgtggtttgtcctccctcttttattcttgtgtaatgatgagacataattaagggtcatctacaatggacaattttcaaggtgctgatgtgatgtcacaacctccgctacatcctgagtaagtcagtgtccccaacagcagatgaggctgggtctttcctcatttctgcttctgggatgacatcagtgggagagttgaagatctgagaattctaaaggaaatgttctctgatgggaggagagagggaacttatttcccttcaaagtagtttgcttcttaagaccactcctccctccagaatgtctttaaccagacatcatttcagaaggtggggcagctgcttccttaggaagagtgggcctgatagctcaaccaactcctttagcatgtaaactcacagaaggcaagaacccctttttttagactttccaaatgcatcctgcaaagagagagatagctgatagggactgacaagcacactgtttagataagaagcaattagccttttatatctgtgctctatacattttctatgtgcagcatctttcctaacttgttgtggttcccgggtggcaggtgcacagctgggagggactgccggctgtttcgtacaacattcttgccaattcccttgaggagaaaattcttcacatggcttctgcatgtacagtatttgggcagcaaaacatgattaaagtcagtttgaaaatgg

SEQ ID NO: 288364 - DNA, 1000 bp, Homo Sapiens
tgatgcctgtgtggctgacttcccagaaaaggactgtcctgtggtggtgagcgcgggcaacagtgagctcagcctgcagctccgcctgcctggccagcaactccgagaaggctccttccgggtcacccgcatgcgatgctggcgggtcacctcctctgtaccattgcccagtggaagcacgagcagcccaggccggggccggggtgaggtgcgcctggaactggcttttgaatacctcatgagcaaggaccggctacagtgggtcaccatcactagcccccaggctatcatgatgagcatctgcttgcagtccatggttgatgaactgatggtgaagaaatctggcggcagtatcaggaagatgctgcgccggcgggtggggggtactctgagacgctcagacagccagcaagcagtgaagtccccaccactgcttgagtcacctgatgccacccgggagtctatggtcaaactctcaagtaagctgagtgccgtgagcttgcggggaattggcagtcccagcacagatgccagtgccagtgatgtccacggcaatttcgccttcgagggcattggagatgaggatctgtaatctccactgcttggatgtctgccctctaccccagaggaatttacagaaacttgccctgtgcctgtgtcccccatgctaggggcggaggggtcttttccttcttctttcctacctaccccttttctcttggccaggggcctcgtatcctacctttccttgtcccctgggctggctgcacagaggattgccccttctcttttcagagctggccctcgatgccaaattagcatttagtattttgcacaaagtctaagggaccatggctgcctgccttggggaggaaccatatctccctctgggccgcttctggcctcttggagccatgggccaaaggccaaggggatgggcagaggtctgtgtttggtctggcccagttccccatcattaaactcagcctgactgctgcct

SEQ ID NO: 288365 - DNA, 1000 bp, Homo Sapiens
ctcctagtgaagggcaagtgattaggatgtcccataaaaaatttcatgcagatgcaattctttcttttgctaaacaaaaccaggagtcagcagtttcccagcaagcagtctatcattcagaggacttggaaaacagtgtgggtgaacttagtgaaggacaaagaccccagctaacagcggcagcagagaacatcttaatgggacattctctctatatgcagccacctgtcactaatacacagtctttggatcaacaatgtgatcctaaaccattatctcggcaatttgacacagtttcaggtagtatttatgaagattcatgtgctagtcatggtccaatgagtttgggagaattggagttggagccaaattctaagctggttcttcccacaacacttctgacagcacaagaaaatgatgttaatttaccagtagccgctgaagatttttcccagtaccaactaaagcaaaatcaggatgttaagcaagttgaacacaaaccatcacaaagttacctacgtgttagaaataaatctgatattgcaccttcacagcaacaagtttcaccaggtgatatggatcggacacaaattgagcttaatccgtacctcacatgtgtattttcaggtgggaaagcagtgccactctccgcttcacagatgccccctgccaagatgtcagtgatgctgccgtcagtgaacctcgaggactgctctcagtctctgagtctcagcacaatgcaggaggacatggagtcttcgggggcagataccttctgaacgggaagagacagccagcacagtgtttatgccactggttttaaagtcattttaccttggcttaaaaccctctctcagactgtttggtttttgagcatattctgaaaaaaaaattccaatattttaaaataaaacaaaaagcataatttgggtatttaaagtttttaaataaaataagtataagtcattataaaaaaaaaaaaaaaaaaaaaaaaaaaaaa

SEQ ID NO: 288366 - DNA, 1000 bp, Homo Sapiens; identical to SEQ ID NO: 117061

SEQ ID NO: 288367 - DNA, 1000 bp, Homo Sapiens; identical to SEQ ID NO: 222290

SEQ ID NO: 288368 - DNA, 1000 bp, Homo Sapiens
gtgctgtgattcgaacagtcagtgggataagggggcagatcaagaaagcactccgagctccagaaggagctttcagggccagctttgaggataagctgctgatgagcgatattgtcttcatgcgaacttggtatcctgtttccatcccagcgttctataacccagtaacatctttgttgaaaccagtgggtgagaaagacacctggtcaggaatgcggaccacgggccaactcaggctcgcccatggcatcagactaaaggcgaacaaggactctctgtataagccaatcctgaggcaaaagaaacattttaattcactgcacattccaaaagccttgcagaaggccctgccatttaagaacaagcccaagacccaagcaaaggcaggcaaggtgccaaaggacaggcggagaccggccgtcatacgcgagcctcatgaaagaaagatccttgcactgctggatgctctgagtacggtgcatagtcagaagatgaagaaggccaaggagcagcggcacctgcacaataaagagcacttcagagccaagcagaaggaggaggaggagaagctgaagcggcagaaggacctcaggaagaagctcttcagaattcaggggcagaaggaaagaagaaaccagaagtccagtttgaagggggctgagggccaattgcagtgagcctttggactggagggactgtccctggatctgcggaggtagacagtttcaaacatcacagtttgaatgcctgtgaatgacacgtcagtgggaaagagctcaagagatgtctctactcaaactgtgcctgcaggaggaggaacagagaagcctgggctgctgggactgggttcattctcatgacttggggctgtcgagatttaaagtgatgtaagctgtggttatgtggattctcttactttcctctgcctgcctcagtttaattattttgtcctacagaaatatcattaaaatatttttttgttaaaaaaaaaaaaaaaaaa

SEQ ID NO: 288369 - DNA, 1000 bp, Homo Sapiens
caaatttttaagaaaagcatcaaagggttgatattttttaaagtttttttagtagcactttctctggatgacagaaggggcaaccacatgggcacccttgttcataccaaagggtgagcagtggccagagcctcctctgcacctctcgagtgtctttaccaattgagctttttatcgccatagccccttggagtgccccagctgccctgaggtcaatcaaggaaaatttcttaatgaaataagctccaaagagccaaagtatcaacttacagatcgtttttaaagcttaaatttatgaaccacctttgtggtaaacaatgaattatgaataccgcagggcagccttcttaaatgacaaatgtaaaaaaaaaaaaaaaagactctacttcgtgcagcaattgctactctatacgaattgtcttaatttgaaaaccttgctgttacaaattggacctttatacattttctgaaaacaatgaaaagagtatatttaaccttttctggctgtaaatggttaccttcctgtaactgccccgcacctggaggcatggagttgtgtgcatcctgcttatgtacaattgttttcagtgtttctaagaatgagtctgaatggttcttgaaaattagccaggatcaaatgctattgcagacaaagccaataaaaagttggacttcttttggggataacaagttttggaagagaaatgcaggccatatgtgcgcatgaccgagattttgaaaaaagatgtacatagtgacatgtttggtgcatggtttttgaggagggcttttgtcaaaaaggaggtataacctttcccccacagacctgagagctgtgccttttctatgcaatattacagacgttacatcggaacccagatggctgtattcacatgtaggtttgggctgtaatctaaacaattggacagattaaatgtacatggaaatgagcagtcttacttttgtagttttatattatacaataaacagttaaaagatg

SEQ ID NO: 288370 - DNA, 1000 bp, Homo Sapiens; identical to SEQ ID NO: 284373

SEQ ID NO: 288371 - DNA, 1000 bp, Homo Sapiens
tatgtgagaattgagccaaggaaaatactcatgcaaccagcctgagtcgcggtgaggggacgagaggttgtacacacattggtagttattttgcaccagcagtgcctttctcactgggggtacttggaccctcagatcttcttttctaatagccatttgccaccccaagtggtatgtcggccatttctccttaaaacaccttccctacctttcccatgtactcagtttagctctcaaagaaggggtgaatcataaagccagtgaaaatttcaccctctgagggagttccccaatctgaaggggaagagggtgacctcagcggcttttctcccaaaaatcggctgaaggctggttgtggatccttgttcctctcctgaccccatctggctgctgccccgtctcccacccctgtccccggggctcgctggccctgcactccgccttagtcctggggccggcgacacagtgggggctcctcacttgctgcagtgtcatagcaataaaatgtgattcttggggtccccccagggagctgcccatggctttatttatgaacctggttttcgggagtcaggggaggagatgactttgcttctgtgcacagccccgtcttccaggagccacaactcagaagaaaagggtgctcagacttttgttatacacatttgctttgtgtaaataaatgtttacaattttatatgaaagatggaataagcgctagagcttccaactgtatattttttacttttatagattttaaaactatgatcctttatatgtgtgttttgggggagctatgataagttttatggcaaacggttggtattgttaactttttattgtcatcaaaagttcataaaagtcctattaatccccatattcttctactgcccttaactctggtatacaccaaaaagaaatctttactttccttgttttatcattataaaaataaagtattttgctagtatggaaaaaaaaaaaaaaaaaaaaaaaaaaa

SEQ ID NO: 288372 - DNA, 1000 bp, Homo Sapiens; identical to SEQ ID NO: 117063

SEQ ID NO: 288373 - DNA, 1000 bp, Homo Sapiens; identical to SEQ ID NO: 117064

SEQ ID NO: 288374 - DNA, 1000 bp, Homo Sapiens
cctggcagctgtgcttgtccgtttcctgtcagagtgatcccaggtttcctcctggcccgtcccatggtccctccacaggagtgtgagaggatgggggaagcactgtgggaagaccaccaaagatggctggacagtgggagagagcacgttgtgaagcatcccagcctcgtgttgaggttccagacttagaaacagacccctctgtacagggggattgtggtgagtgagaatcaaggccaccttgtgtgttttctcactctcgaatgcaagtgggagagggaaaatgactcgggacgccattgtaacggttcctggaagctgggccctctcattggcatatacagtactcctcgctgcagggcactgtcccaccgggatccagttgcaaagtttgtcttgacagttgaaggcctcgcttagttgtactggattctcagggagccctctgtggccttttgctttgcgtgctgtttcccttgtaccagagggcggcaccgtggaaattctgttttccctgtagcatattgtgttggattgcattactggcagagaaaggacaaggtgccattcaagtcctagggtgggcttccagctgccttaatagaagtactcaagtcttttgggtagtgagctggaaagcctacaggaaaagaggggtacctgttttcatttgaaaactttgattcatggaacctttaaaactaatctcagaaaaatttttggtgcccatgcagctgtagttgttcactgctttcctggatggatgggactcttatgtcataacttctgttactcctttggcccatagctaaggtcatccttccccacaggggtggctttgggattggatgatacagcttttgcttctgtgtagtatacctgtacatacttgtttcaggcagcctttctttaatgttttcagttggtttgtattctgtagctcagtagctgctaataaagttaaagatcctgaaaaaaaaaaaaaaaaaaaaaaaaaaaa

SEQ ID NO: 288375 - DNA, 1000 bp, Homo Sapiens; identical to SEQ ID NO: 117065

SEQ ID NO: 288376 - DNA, 1000 bp, Homo Sapiens
gctagtcttgtctaatagatgggatttactataggtgaagatagccatcatattcaaggacagaagctctggcaggagtaaattagcaaagcagaaatagtaccctttcattcttagaggtgctttgaaattttaggtagaatataatcgaaattatggaggttccttagtgctcaataatataagacctgttgttattagaacgagtctttcttataaactaacagagcaggtatatgcctgttagatcttagctgtggggttcctttactattgggtgaatcattaggtataaaaaataatcatcaaccaggcaaattactttgcttcctagctgatgtcatcccacattggtacaggtgttattcagtactgggtggttcagcagggaagccaggtgggaccagtgtgtctgtcatgaaaccactaactgcattcctgactgaagagccatctgtcatttattggggaaggtcttcagttgagctctcagccttagtaaggaagcacgtggaggagggacggaggaggttcccttgctgggcatgcttcgtagagggccaggagcagcaggtcatgtgcacatgccgttgcagcacaagcttatgcttcccgtagccgtggcttttcattctgcacagtcccaggtcccagctcccctcttatggtttctgtcataatgtgctttatctgattgactccaaacatcccgaaatgtcacctgcagatttctcgtgggaaccaatatgtacatgtttgcaattatgctgtgagaatttaaatgtgttagatggaaaatgctattggcagggaataataataaaaaaaaaagaaaatcattctgtttcctgcagtgggaactggccatgtagtcttaacagtcttttgtacaaatatctacaaagcagataatatccctatccagtgcttgcccttggaattgtctctaaatgcatcaagcatacaataaaaaaaactgaaatcaaaaaaaaaaaaaaaa

SEQ ID NO: 288377 - DNA, 1000 bp, Homo Sapiens; identical to SEQ ID NO: 117067

SEQ ID NO: 288378 - DNA, 1000 bp, Homo Sapiens; identical to SEQ ID NO: 117068

SEQ ID NO: 288379 - DNA, 1000 bp, Homo Sapiens; identical to SEQ ID NO: 222293

SEQ ID NO: 288380 - DNA, 1000 bp, Homo Sapiens; identical to SEQ ID NO: 117069

SEQ ID NO: 288381 - DNA, 1000 bp, Homo Sapiens; identical to SEQ ID NO: 117070

SEQ ID NO: 288382 - DNA, 1000 bp, Homo Sapiens; identical to SEQ ID NO: 222296

SEQ ID NO: 288383 - DNA, 1000 bp, Homo Sapiens
acaaggagaataatagatggggtttattaaagcgagcaaagtctgcattttacctggtgcgcatgagtggggtctttaagagttttggtggctctcccatgtttcctattacccatggatttaccctgagccttcctatcacattataaataacagttcatctaaagagccacttttctttctgattcagtaacatttgcctacataagttttcatttatttgtgttttatttattacagggctgctattttcataatgtacatgaacaatgtcacagaacttttttaatttttttgaataattataagtatcagtaaaggaagtgaaagacaggattgcatttaatagataaaacgtttaggcaataattgaacaaaagaatcctggcatatttctaacactaatggcaatttacttatggtatttattttcagtagtaaagacccagcttgaatgtaaattttgtatagtgtaagtatgaagaacatagtgcaactgtacaggtagtcaccagttattgtgatatgataaataattgggctattttgatgaagaaaactttgttcatttgtttctactttctaagagaaattgccacgattcctctgcttttcaacatttcgtatgacttttttttcgggtgggaataaaaagctgtgaaattgttcaacctactttgtaaccaaagaagcaaagctgtgtaatggagtttggtttttttttgttgtttttttttttttgtctttttttttttttataatgcacattctttatgtatttttatttagtgttttctcagtcacaattttctttactgtctagcatgatctgcatgacctataatctttgaaccactttcgtacctcatgtttttatccagcactcttattgtaatatgtactagtctgtgaacaatgtcaaataaaagagaacgaacaggtagtttggtggagctgagctagtgtacaatacactagttgtaaaaaaaaaaaaaaaaaa

SEQ ID NO: 288384 - DNA, 1000 bp, Homo Sapiens
taaatatacactagcttgaacttagatgttaaatgttattattaccagcatttgtccttttgtgaaatcagtatcagaatacttgcactctttaacacattctttataaaatgtataaattattcagaactatttaaaataaagaggagtgttattgcatgctgataatcattttgagtttgcctcagtagatactaaagcaaattgtttcagtttttttaaatgccctttgatgtttcaaaaaaaaaaaggaactgtaatttgattgactgattttaagatcagccataagtaatcagcaatcttcaaaagcactttcagtggattggtcatctgggttctaaagggaagagtctgtgctactaaccatttcaaatgcagactcaaaccttcccaacatctttatgactctagaataatcatattgatgaaatcgtaattcatggttgagtttcagaacaaaagatattcattgcacattaaccatttagaggtcatttaaataacaaaatattgtattgtaaaagaactgtacaattttaaaacaataaagatttgaacctgtaaatgtgtgtgccttttaaagaaggatacatttttaatatatttgagtgattgctgggaagtgtgaaaatattgttatgtatcatatcaaagagaaacatgtttattacaaaaatgttctttaactatatactatgtaacagggtaaacagtgttatgtagaatagaattgtgtaaactagatctttagagaagttgccattgagcaaagttatttaaatgagttagttgagttggatgagaattgtttgaggtttgttgctagagaacaataataaaataattctttttcagaaaatatttaatttcttcataaaaataagttaaatatttttttaaatatgtatatctaatagtacaaaatggaataaacatcatagtgtatagaaaactgaatttgacaagttaatgaataaatgaacaaatgatttcaaaa

SEQ ID NO: 288385 - DNA, 1000 bp, Homo Sapiens; identical to SEQ ID NO: 117071

SEQ ID NO: 288386 - DNA, 1000 bp, Homo Sapiens; identical to SEQ ID NO: 222297

SEQ ID NO: 288387 - DNA, 1000 bp, Homo Sapiens; identical to SEQ ID NO: 222298

SEQ ID NO: 288388 - DNA, 1000 bp, Homo Sapiens
acaattaaaaggatattctgtggatgtcacgtattttgaaatgatagaactacattagctttgtatcatgtttggataattcatcaatgttcacagtttaaaacatcattaaacattatgtaattacaatgagaaagaatcttacttaaatttggagattttcccccacatctcttttccggatacattataattctggacccctatttatctcaaaactcttaatatatgcagaccaacaggtctttgcattccttttaaataactggttgtgacaaagcttgttgttgatcagattcactgtttcatcatatttattgtaatatattttttgttttgtaaatatgttacaacaaaatgtgattggtctaaaatatttgtaatgtatattaaaaggttcaaaaatatttgtataaatctaagttatttgggtacttgtaggaatacaatgaggagcttgaatgccaccttctgacatgatttacttttaaggaaagttatgaggagagaatacaaaaagcatgcaccaaaatgtaatctgacaggatttctggatttatacgtaatcactcctgccccaacacacacacacacacacacacacacacacacacacatgcacgcacacatgattttgattatgctacatgatatatgtttcaaaaagaattagcatagaaatcctggtctcctagccaaaaaaatcaaaggattttcaaaaaaacgaatctgtatgttgaggcaaaaggattgaacctggaagtctgggactttatcatagaaacaaagtctcagatattttagttctttggaaacaaatgctgtaattcaaaagcatttgacctgtcactgtactatctacatgtggaagaatgttcaagttgaatcctaatgccgtgaatgaaacacagtctgtgtagggaatgagcaaaaaagttgaattccaattgctttttggccttttggctaaaataaatgtagcatctaattttatcagttt

SEQ ID NO: 288389 - DNA, 1000 bp, Homo Sapiens; identical to SEQ ID NO: 222299

SEQ ID NO: 288390 - DNA, 1000 bp, Homo Sapiens; identical to SEQ ID NO: 222300

SEQ ID NO: 288391 - DNA, 1000 bp, Homo Sapiens
aaaacacggtaacgtaattagaatagtcagagaaaagtagccagaagaatttgcaacgtgcccttgtaacaccaaatttgatcagttttttaaaaaatgatcgttatgtaggtgattgagaagtaaatgtattcttttttaaggtaaaaatttggacccttatcatgcatacccccctctgtgctcttcaaatcaacatcattattaatatctgtacatttttgctcatctgagccagcacaggctgaggctgtcagaatggacaccttttggttgttgggtttctgtcagtttctggggtgaagctgcgtgattgagaacgtagctcttggctgccatctcggggattattaaggactgtgaactctatccacaagccatggcaatatctgtcccaccgaatgctccctctaacacactcttactcccgtgatgtgtgttaagggctccgatgatgctgaaaacagcacaggatgtgaaaaggcaggaacagttctgaagtcaaaggctgatgtcctgtttctctttccctctgtgaccgactcccttcccagtggtaacaagtacccacagcttggtttgaatttctgcacgctgttgtctgtgcactcgctcacacttacgcacacagcaggcatgtgggcgatgctgggtattttgtgtatgagtgggatgcacatacacacatctacatccatatcatgcccatgcatctgtaacttgcttttcccgtgtaagaacacttcttagagtttgttcaatgcatgtgtctgtgtgaatgattgaaggcatttctaacccattttaaagatggctacttaggaccatatggatgttgtactgatgtcatttgaccacgtccattgtttccatcttttgggctgttcttgtgtattttactttccatgtaacactgtgacattgagaattggtacctacaacagtctatttgctttacattaaatttgtaggctaatttgtgtaaaaaaaaaaaaaaaaa

SEQ ID NO: 288392 - DNA, 1000 bp, Homo Sapiens; identical to SEQ ID NO: 222301

SEQ ID NO: 288393 - DNA, 1000 bp, Homo Sapiens; identical to SEQ ID NO: 222302

SEQ ID NO: 288394 - DNA, 1000 bp, Homo Sapiens; identical to SEQ ID NO: 222303

SEQ ID NO: 288395 - DNA, 1000 bp, Homo Sapiens; identical to SEQ ID NO: 222304

SEQ ID NO: 288396 - DNA, 1000 bp, Homo Sapiens; identical to SEQ ID NO: 117072

SEQ ID NO: 288397 - DNA, 1000 bp, Homo Sapiens
tggggtcttgacccttcagtaagttaagataaatttttaaaagaaccgtagcaaagatggaacctttgtaatttatgttgattttaataaaatcataatttaaaaaatgaaatgggaagattgtcaggaaattaggatagctactctagtataatttagaaaaactaagcaagagattctccagttgctagtgagtaagcactctgatttgagaaatgtgtggggacaatggagaaaagttttcagaaaactgctatgtagatttctgaatgtgttgtattttgctgaggaattcggtaacaactgaaagggaaaagtgcttcagccatcttttgaaaacaagttaaaattctggaacttgtatctgtaatacatcctaactcttgtaaaagaaaataatttatcatagctggtgtcctttcattgaaagttgtaatactgtctctaaggagggaggaaaagattattatataattttataactggcaacatttgagttagtattgactttgtctaaaagaggcttgacttcaactgggataaaaatgtcagtgaattttgttaaagtagtaaaaatgcagttgacttagtaggaacataaaattatttcctaataagataatattgcactcctaccaaataaacaggattttagtaatatctgagggattgttgatggtgagttagactgtatttggcatagaatttggaaatgtaacttgaatgtaaatatgctgcaaaatgttgaatgtatacatagaaagactttttctgtcgacgccaaatgcccgttgtaaatgaaccttaaatattacattcctcctttgcacaataatatttctttataacacttatgattttttcccccaggacaacaaactgcccttaagagtcatttccttgttatcacaggtgtcaatatttttctgtattttgtttataattttattttttaaataaaaagtgtataaaaataaaaaaaaaaaaaaaaaaaaaaaaa

SEQ ID NO: 288398 - DNA, 1000 bp, Homo Sapiens; identical to SEQ ID NO: 222305

SEQ ID NO: 288399 - DNA, 1000 bp, Homo Sapiens
ctagctggtcccatcacggggcccctgttttgcatctttggcgatttcctgtcaggacctctggccctactaggctgtagactcagggagagcacagtctggctgtgctgccaaacctctcctctgctgcagtttattccaaacaggagccccctggctgtcagtgcacaataatagacacacatttcttcaacgttccattcctaggtgattttcacatttttagttcctcagcatattttattgctgtgtgttgacacaatctggtataaaaaactttctctggattcagaggaagtttgaggaatcaggagaggaccaggccttctcctgtgcctgggtgaaggtacagacctcgctgtgtctccgatgaggtcagaagtgtctctatttcataccacaaaggaacccaagtgggagtagggaacagatggatggcgcgaagacctctgtgtctccccagagaaaggaagaaacttaagaaccatcatagcctggtcctccaacatcttacagatcatgttttccaagagaaaagcctgtgttttcagaaactctgaattcagaaaaagaaacggaatgtgcgtaagaatcaggccactgcctggaaagactttctctcaattcgtagcctgaggctcagtgaaggaaacatgcagaaagaatgcctgagacgcccccagggaataagggaactctttataacctgtccagtgccgtcatctgggatttttctctgaagtacaagaatttcaggtgatttaagctgcttgatcacacttatttgtgcaaaattgattttcatttaatgttaatgttttcctgcttaattttatataacttcagaatgtaaagagcttcaaggtaaattacagggtgtttaacctggggagttaaatgtgtacacttgaattaataggagcaccggttgttgctagtataaagtaatttgtgtggcagtttgtactgtgctgagtttttaaaataaacccaatatttt

SEQ ID NO: 288400 - DNA, 1000 bp, Homo Sapiens
tgctaagtccttgttaatagtcttaccctccttgaaacacttgaacacttgatgactttagctttgaggagataccatctccaggtgtgctttcttagtctttgcaggcacctcttcccttcaatatctgttcttcgtatttttaaaaaaatttgttttagactgccttgttctgtgtcagctcgctagctgatctcatttccttccatggtttccttaccatttatatgcaaatgactgtcagattcatatctcctttctagatcttccctaattgatgtatctaattgctaacaaatgctctttgctgtctcaggcactacatgtcattgatcttgcccccaatcctgctcctcctctcatgtttcctctttgactaaatggcattaccactaccaaccattcatttgtcctttttaccaattctccaatgctgccattttaattcaggccatcaacctacctaaattatagcaacagcctccttattagtctccctgttttttatttttattcctttctacactacaaccaaattgctccaaaagacttactgatcatgtcactgcattgctttcaccattgctcttagggtacaatacaaatttatcttcatctttaaggtctcagtatgccacttcatctaggaaaccttcattgatgccctctagattaggtgcccttactatccattccctatacaccctgttctttcccagacatacacttggcacactttattgttactgcttattgatcactgctagactgtaagctttgtaagggcagggaccatataagccttgttcactgttatatctctagtgcttagcacaatgcctggcatttcaataaatgtttggacaaacgaatatttgtgtagtgttttacaatttttgaagctctttcacagtcttatttgaccttcacagtcattctgccttagactgtccattgggtaacttttatccacatattactaattgaaaaatgaagacaa

SEQ ID NO: 288401 - DNA, 1000 bp, Homo Sapiens; identical to SEQ ID NO: 222306

SEQ ID NO: 288402 - DNA, 1000 bp, Homo Sapiens; identical to SEQ ID NO: 117073

SEQ ID NO: 288403 - DNA, 1000 bp, Homo Sapiens; identical to SEQ ID NO: 117074

SEQ ID NO: 288404 - DNA, 1000 bp, Homo Sapiens
gttctattcccaggactaagaggaatttcttttaatggatccagagagccaaggtcagagggagagatggcctgcatagtctcctgtggatcacacccgggccacccctccctctaggtttacagtggacttcttctgcccctcctccttttctgtccttggccatctcagcctggcctctctgatccttccatcacagaaggatcttgaatctctgggaaatcaaacatcacagtagtgatcagaaagtgagtcctgtcttgtcaccccatttctcatcagaacaaagcacgagatggaatgaccaaccagcattcttcatggtggactgcttatcattgaggatctttgggagataaagcacgctaagagctctggacagagaaaaacaggccctagaatatgggagtgggtgtttgtagggctcacaggctaacaagcactttagttgctggtttacattcaatgaaggaggattcatacccatggcattacaaggctaagcatgtgtatgactaaggaactatctgaaaaacatgcagcaaggtaagaaaatgtaccactcaacaagccagtgatgccaccttttgtgcgcggggaggagagtgactaccattgttttttgtgtgacaaagctatcatggactattttaatcttggttttattgcttaaaatatattatttttccctatgtgttgacaaggtatttctaatatcacactattaaatatatgcactaatctaaataaaggtgtctgtattttctgtaatgcttatttttagggggaaatttgttttctttatgcttcagggtagagggatttcccttgagtataggtcagcaaactgtggcctacagcctgtgtgtgcacgccccatgagccgaaaagtgggtcttatgttttcaaatggttaaaaataaataaaaaaatttgaaacatgtgaactatatgacattcagatttgtgttcataaataaagttttattggaacatatcc

SEQ ID NO: 288405 - DNA, 1000 bp, Homo Sapiens
cagtgggataaaatgatttaaaaacactgtacaatttaactctgcctctcttgcagcattgcttctcacaactattacctgcatctgaaaaaaaatctatagactccagctgctacattagagcataagagatgctctcctgggacctcagtaccctgccttcttgactggtttccgttcatcagtcctgtccctcttcaagtaatctagaagaatgtggatactcttaggcgtgaatgtaaatgccttaatattgaaggtcctggttagaagcatgatacaagacatctactggattcatatttacaaatatcctggaatgttatagcttcaaagtatattagaaaaaccccaaagatggtataatctttaagtgtgcacgttcgtttatttctgcatcttccctccaaacttgcctttgcatcttaaatatttcactatgcacactcccattcctcttgggtttcatcttgtcgtttaagaaatgtactgaaataatcattggaatatttgcattttgcacaatgactggtatgatagctcttgacaaataaggaaagcactgaaatgttgtgattgggtctcgggaaatgctcagattgatgtcttaccagcatttcttctgggcttgtgatgttgagctgtagtcttgtagccataatgagcaaattgactaagagaagcaaaggtttcttggggttattaaccagtagtgtggaaatactagttttatgtggccaaggaaaagcaaagccttttcttttcagtttgtgttatttggaagacagaaaaacatcttgtctacatcctttggctgtttgtaggatcacgttgtccttacgatactgaaactttacagctgctgtaaattttttataaatgaatttcaaaatgttataatgggactgtaggttgtttttctacatcttcattatttggacctaaaaccagtttttaataagaaagtttatctttactctttctgaaattatgactccag

SEQ ID NO: 288406 - DNA, 1000 bp, Homo Sapiens; identical to SEQ ID NO: 117075

SEQ ID NO: 288407 - DNA, 1000 bp, Homo Sapiens
gatagtttcactcccaagcaatgaattgcttctgtgtgtttccctgtaggactcaatagtaaatgctgtctgtcttacacatttataaggaccctgcaagacgacgacaaaggcctttggcctgtgctactaaacaagaagcctatgaaaaatttcttctttaaacttgttttttctctttccagtaagttcacatttggataattttaaaaagaaaagtaattacctttgtgtttccagaacactataattggggtgtatcttaattcagttaaatattattagtagacctggattttcccccttgaccccatcagtctataaaggttaaactgcaacttttatgaaatggtctttaatatttccacaataatcctgtgctatatttgttttaagaaacaaagtaactctatacacttcaagactttacaggattttttaaatcctgtattgttggatcaattaataaagatgcaaaaaaactttatagagatgtaaaaacaaaactataatggatctcctatttttctttaaatacaaaaaaaaaaaggtaaatgaactattctccttgtaaagctaaattccccattctgtctaataaaggaagactgaaaaaaggttttaaagaacataaatggaaagatacaaatgctttgaaggaataaacgaaatgttaaaacagggtcaatccatttgaagaaaaagttggacaaaataatcagcattgctccctcttttatttaatatttgggtactgattatatccacatggaagtagaaggtaaggagtttaggaaaatactagaatctactctgcttacattcttgtttaagtgtttacacagtttggttcaattataaacatttggccttttactatgttatttttattttgtatgaatacattatcctccttatttatttttgttacatttattacttatgttattttgttatgcatttacaactccatttttaaataaagtgtttctggaacttt

SEQ ID NO: 288408 - DNA, 1000 bp, Homo Sapiens; identical to SEQ ID NO: 222310

SEQ ID NO: 288409 - DNA, 1000 bp, Homo Sapiens; identical to SEQ ID NO: 222311

SEQ ID NO: 288410 - DNA, 1000 bp, Homo Sapiens; identical to SEQ ID NO: 117077

SEQ ID NO: 288411 - DNA, 1000 bp, Homo Sapiens; identical to SEQ ID NO: 222312

SEQ ID NO: 288412 - DNA, 1000 bp, Homo Sapiens; identical to SEQ ID NO: 222313

SEQ ID NO: 288413 - DNA, 1000 bp, Homo Sapiens; identical to SEQ ID NO: 117079

SEQ ID NO: 288414 - DNA, 1000 bp, Homo Sapiens; identical to SEQ ID NO: 222314

SEQ ID NO: 288415 - DNA, 1000 bp, Homo Sapiens
aaaatttcaaggtggtggtcatagagcattaaaccaaatatgaggccattcccaacttgttttccgaggggaaaatggtaatacttgtgtggcacccggggttaaacagcagaggctccatgtggccagaggcagagattagtatcctggcactccagtgacccactgggtgactcactgatgccacagcacccgctaggaagctctgctgaaccttagtatttggtcctaaattttatgactccatggagttcccgtagtccatggctagttaggaagaaaggaggtgggataagggtcaggcccaggtgacccctaagaaccaggagatgggtaaaagtttttttttatattctgcttttctgatctgtgagtacctgtttgtctccaggccaaacctttgggcttaaatatctttttcctagacaggtttttgctagtgttgaattttcttcttcctctggcctccttctgtgcccctttccccaagcccaagactgcttaacttccaaagcaaattctagatagacactgtatttattggtatgggagtgggctctatggggtggtctgcacccatctgggactcttttccctaaatcctgcaccaaatgagtcaggaggcagggtgcacagcattagtttcaatgtggttatgcatcataagcttaacatcagaatgaaaatgaaactcgattttgatgtttctttaaaacccttcccctgtccaatccactcgccgcccccaccttgaatagctaaagtctcttatgaaacagagaagagttgttgacgtctaactccttccattaaattaataagtactgacctcctaatatttaagtgtttactatctattgctgtaaagttttgtatattttgtaaacttttttccccaaatagtagatgtctaaaatcattgtacatctgattcttttatattccattgttcagcacaaagtgtggtttttatttagaataaaaaaagaaatttgaaatg

SEQ ID NO: 288416 - DNA, 1000 bp, Homo Sapiens
atacataaagagacagtaggacattgtggctgagtctacccagctcaaggtaaaggagaatgttgctaattttttagcaaactagaccagcattattactcaaactaaaaatatcacacctgaaaaatttaatttaggacctaaaatgtctagattagctttctgctttttttatttgaataactcattcagttgtgaatgaattcctctttatttggtgccacagtcaccaaatgacaaggatttgccactttcccaccaaattgtgagtgcttgtaatttaggtctctctaccttaaattcagtataaggaaacgtaattatgattgattttttccaaagatgacaagctgtgttgaaatacattttttcttttgaccaattgacagaatctaataagctttaataatcttccccttttatgtgaaaagttttgagaactgtgaaatgtttaggaacaaactgttgaaatccattggaagggaaaaaagaaagtggtaccagtgttaccagctcaactaaaacctgcaattctgcatttcaactcttcacttcctcagcctacaaatagctcattagatgacattcacgcatgctgggtataggcaaggaaagtaattttcaaagtacatttgcagttctctttttcagagatgattctatgatagtgcctctgaaagttgatgcagcatttttgcctttccaaaaagtatttatcctcactgctttttgcagtacttgtattttcacagatggattatctggggtaattttcttcaaagggagtttgttatacacagtgaaaatgtattatagagtagaatagtaaagctctaggggtttcagaaagctttgatgaacagatgacaaacatctgaaaccccctccgcactgttacccagtgtgtatataatgacttgttatagctcagtgtgcccttgaatccatacagtttcttaaaagacaataaaatcttattaataaagttaatgtaacttct

SEQ ID NO: 288417 - DNA, 1000 bp, Homo Sapiens
ctttgaagaaaatgattttatggaaaacactaacatgccagaaggaaccatctctgaaaacacaaactacaatcatcctcctgaggcagattccgctgggactgcattcaacttagggccaactgttaaacaaactgagacaaaatgggaatacaacaacgtgggcactgacctgtcccccgagcccaaaagcttcaattacccattgctctcgtccccaggtgatcagtttgaaattcagctaacccagcagctacagtcccttatccccaacaacaatgtgagaaggctcattgctcatgttatccggaccttgaagatggactgctctggggcccatgtgcaagtgacctgtgccaagctcatctccaggacaggccacctgatgaagcttctcagtgggcagcaggaagtaaaggcatccaagatagaatgggatacggaccaatggaagattgagaactacattaatgagagcacagaagcccagagtgaacagaaagagaagtcgcttgagctcaaaaaagaagttccaggatatggctatactgacaaactcatcttggcattaattgttactggaatactaacgattttgattatacttttctgcctcattgtgatatgttgtcaccgaaggtcattacaagaagatgaagaaggattctcaaggggcattttcagatttctgccatggaggggatgctcttcgcgaagggagagtcaggatggactttcctcatttggacagccgctctggtttaaagatctgtacaaacctctcagtgccacaagaataaataatcatgcatggaagctgcacaagaagtcatctaatgaggacaagatcctcaacagggaccctggggacagcgaagccccaacggagggggaggagagtgaagccctgccataggaggagaacacagcccacctcaggcctcctgcaaaaatacatagaataaacaacaacagttactaaacgaaaaaaaaaaaaaaa

SEQ ID NO: 288418 - DNA, 1000 bp, Homo Sapiens
gctcactttccaataacagaaggagttgtttacagatgaatagtatcacatcattatcaatttccacatgaaaaaggtggagctttctagaaaaaccaacctctaaggcattaggaatttagctgaaaccagcagaattgaaaactctggcaataaaacatggactcaaccatatcccttctggcaatttccttctcagagaggggagtgggaataaaatgttgccttccccacttctcaccaccaccgccatcatgacgctcatactggcttttgcctgtttgtagaggaaaaggtgggctggttttagtactctgaaggacaaaaacaagcaaacaaaaacccctgctgcagcatttcaggtgcagtatgatatttcctaatctttcctatttcttaacaaaagattttaaagtacttctctagtcattgaagtttttttttctttacataaatattgatatattctttttctactcaaagtgccaaaggctacagtttttaatgacttaacaaattgtaccacattgttaaggacatataatgatagacactagaactcagacctctgcatgtatatttgataacatgtcttttgtaaaacaaaaattacaaaaaaatttgtttacattccactggtaccttaatttaaaataaatcagactaaaaggtggtatctcttcttagtgttctatttatcttatttgctaatgggagcacttcttcctttgttaggctgtgctttactgataaaaccaagtattgaataaagagagttaattatctttttaaagtaaataaaattatgaaaatatatatagtatatataaagtactgtgtttaaaaaaatgttatgcaatgttttccaaactgataaagtttgtaaagtgctataaatgtattttgttaagtacagataaaagctattgtgtgagtatattgtgctaaaatcatagaaataaagattagatttcttcatcaaaaaaaaaaaaaaaaaaaa

SEQ ID NO: 288419 - DNA, 1000 bp, Homo Sapiens
ggatgaattagctggtacctgaagccccgcttagctctgacactctgccaacatcctctgattctaggtgtggtgttgactgtcctttcaaggaaaaacttgcaatagagggaaaagccattaaagcagctccctgcttcatcattaagtcctgtcatccctaccagccaatcccagtcaaagaagttatgctttattcacttctgtggaattacaagtgagagacacttttaggacctgatggacaaagcaggagattcactgtcagctttcctggtcctctccttacttctgtgggccttgcaccgtcttagtttacacatctgccaaaggggtagaattacacttctttttacaggtaaatgtcaaggcacaatcagttttcaggaagtgcttcaagaccccaggtgaaatgaaaatgctaagtaccctctgaatggccatgcctgttaccaggtgctgcttcttcagatgatggggagcacttttcagggtgaaattcaggcgagttttgcccaggcctgctgtcttgagtacaaatgtgaatgatcgactgactgcttgttgccaaactggaaatgttctgtagggatttactggcatggtatcattcctagaagaaaaaaagagagaaacttgactgcacattaaaaaaaaaaaaaaatccacattgtgacttttatttaatttctattttttttggtaataaaaagttgacttttttatttgaatttgtcttttttatttattggtctgaaaggcatttcaaaggtattataataatatattggtgtaatttaattggtgcaacatgctttatggctcctgtcaaaattggttttcactcatttgattggtttgagcccagaacagcctacaggggaaaaacaagctggataaccacccaaagtgtttgtattttcgttggaaactgatttttgtttcattttggtttttgtttctgtttttatttttaaattaaataaattgcaatgaactg

SEQ ID NO: 288420 - DNA, 1000 bp, Homo Sapiens; identical to SEQ ID NO: 222316

SEQ ID NO: 288421 - DNA, 1000 bp, Homo Sapiens; identical to SEQ ID NO: 222317

SEQ ID NO: 288422 - DNA, 1000 bp, Homo Sapiens
taaagcatttaccattgccctatgatgaagttatctgtgctgtgaacttaaagaagttgatagtgaagaaattccacaaatatgaagaagagattgatatccacaatgagttctttcggccatatgagttgagcagctttgatgataccttttgcttggctatgacaagctcagcacgtgactttatgcctaagaccgttggaattgatccaagtccatttactgtgcgtaaaccagatgaaactggaaaatcagtattgggaaacaaaagcaatagagaagaagctgtattacagcggaaaacggcagccagcgccccgccgccccccagcgaggaggctgtgtccagcagctctgaggatgactctgggactgatcgggaagaagagggctctgtgtctcagcgctccactcccgtgaagatgactgatgcaggagacagtgccaaagtgaccgagaatgtggtccaacccatgaaggagctatatggaattaacctctcagatggcctctcagaagaagatttctccatttattcaagatttgttcagctggggcagagtcaacataaacaagacaagaatagccagcagccctgttctaggtgctcagatggagttataaaactaacacccatctcggctttctcgcaagataacatctatgaagttcagcccccaagagtagacagaaaatctacagagatcttccaagcccacatccaggccagccaaggtatcatgcagcccctaggaaaagaggactcctccatgtaccgagagtacatcaggaaccgctacctgtgaaaagagcgcaggtccacctggtggacacgtctgattagcttagaacctgtcttgtctcatcttcaaaaggtaacttattaaaagtcctttgcgtctgaagcctttctccttttctgtcacttgcaaattccaaattatagctaataaagatgactagataatttgcaaaaaaaaaaaaaaaaaaaaaaaaaaaa

SEQ ID NO: 288423 - DNA, 1000 bp, Homo Sapiens; identical to SEQ ID NO: 117082

SEQ ID NO: 288424 - DNA, 1000 bp, Homo Sapiens; identical to SEQ ID NO: 222318

SEQ ID NO: 288425 - DNA, 1000 bp, Homo Sapiens; identical to SEQ ID NO: 117083

SEQ ID NO: 288426 - DNA, 1000 bp, Homo Sapiens; identical to SEQ ID NO: 222321

SEQ ID NO: 288427 - DNA, 1000 bp, Homo Sapiens
ccttcaggccgctcccacgagattctggggcagtcggaagatgtgggccctgggtgggagcagcccacttcagcagcactgccactgcctttggccacctgaggtgacccccaggcctccccggccttgtacagtgtacctctgtgtatctgtacagcctcgctcctgccaccccacccttgcgttctgcattaggtacttccctgaaaaccacgtgtaagaagtgatgcttttgccagtggatgatctggaatgcgaccggagcacttgctctgaggaatcccagggtgactctgtcggggaagaatccggtcacagcctcccctcagagacaggcctcagttcgagggcagcccattatctgtcgcagacatctgccatgtacctgagactgcgggaggcaggggatgcatgggtgtccccatctgtccgtggtgagaagcaaggctagctctgccttccacatgcttctcaggatgccaagaggcctaggaacccagaaacccccttggaggagctgtgtatgcgggggtgccaggaagggcatagctcctgcccccaggcctaggcatgctgcttgctcggccatccccacttcctcctctaccccaacacatgcaggctaggccttgccctggaacgtggaggccctgcccggggctggggcctagtccagcagccaccaaagtctggcagactttctgcatttgagaaacatgacaaagggccccgcagcccttctgcacccagcacagcctgcccagcccagccctgcccccgggcactgcacagcctgtctgggggccagaccaccccattgtccatccttgttgtccgtgagtccttggcctccaccaagcacgtgtggccattgtgtgcctgccttagtgactccgtggttttgtgaggagcagagtgtgtatgatttttgcctcagaaactatactcttctgtgtaacagacaaataaacaacatttgtcaacaaaaaaaaaaaaaaaa

SEQ ID NO: 288428 - DNA, 1000 bp, Homo Sapiens
aatccttgtcccaaatccggtgagctctgcttgctgccgccgcgctcctgggtgatcactcagacgggtcagtgggaataacgggccaacaagacagctttttacatgtgtccaaaggatggcctttcgaaggcctggaagtatttcactgttggaagaagtaaacaagaatgacattccagatggaaatagaattctctctcttgcctttgaccaacatggtactaaggggtttcttctttcccaatgtatgtacgtgccctgctgggggccttactttatagaatgagagcatccgagcttccctaatgaatctggctagttctgtgtctggctgaggatacaggagtgggacatccactctcggatccctcagagcacagaaaccttcagctttgctgtctctgaagtatttcctccagtttccctgcgggcccctatgtttgagtttgatggctgctggatcctcactcaacgaaaactcggttggaaactgttccgcctggcagtccttttttgttgttttccatctcatttcccttccatctgaaagtggcattcagctgacttgctcatttagactgttcacggagtctgaatctgccaacgtggtgttggaggctccaccttgaaaagggccacagtcagggcaactttccccatacaggaaaacttgaaaattacatcaacagtctacgtcacagccaaattatatttcctttataccaaacaaaactatggagaactaaaagtacatcacacaaaacgtttatagtgttttgcatgtgacctatttcagtatttatataactagattagtgctttctagcaaacggttctgttaattagcgagtcactgttgattctgctgtggtggtaagttgataccgtgtaactaatcccgtggatgcctcctcgttatttttgtccaaacgaagcagccgtggtagtagctgtctatgattcttgctcagcaaagtaaaataaatgttaaatatgg

SEQ ID NO: 288429 - DNA, 1000 bp, Homo Sapiens
ttcccgcacatgattactttaaagatactggaggagatggtcaagaatcgctctataagatctgcaaggcctactctgtgtatgatgaagacattgggtactgtcaagggcagtcttttcttgctgctgtattactgctgcatatgccagaggaacaagcattctgtgttttggtgaaaatcatgtacgactatggtttgagagacctctacagaaacaacttcgaagatcttcattgcaaattctaccagttggagagactaatgcaggaacagctaccggacctgcatagccatttttctgatctgaacctggaagctcatatgtatgcatcccagtggtttctcactctttttactgccaagttcccactctgcatggtgttccacatcattgacttactgctttgtgagggtttgaacataatctttcatgtagctttggctctcctaaagacctcaaaggaagaccttctgcaggctgattttgaaggtgctttaaagttctttagagttcagcttccaaagagatacagggcagaggaaaatgcaagaagactgatggagcaggcttgcaatattaaagtaccaaccaagaagctgaagaaatatgagaaagaatatcagacaatgcgagagagtcagctgcaacaggaagacccaatggatagatacaagtttgtatatttgtaggtaactccagctgttgcatttatactgggaatcttcataagaagctgagagaaagagaggggaaaaagaaagtggctttctactttcaaaaatgaaacaaaaaggaaaaatggcaaagtactgttttagctgtgcatgtcatatccacaaagacttttagcaggtgaactgttccaagactgacacaaggatgtttcaaacttgcctctgtctgtagaaaatgttaaaaataccaactcacttggaaggaaaaataaaaatcacaaaggtatattgaaaaaaaaaaaaaaaaaaggccacatgtgctc

SEQ ID NO: 288430 - DNA, 1000 bp, Homo Sapiens
gcacctgtggccaagtggagcagaggtggacatggggttggattgttttgattatttatagttacacaaggacttctcccagctgaccctcaggatgccccaagtcaggaagaccattaagaataggaggagagggctctgcctcaactttcctaggaaagagcccacctcggagatagctacggtttcctctggtggagatggtgaggatgaaggctggagagtgagggaggaggctctgctggccgcagagaacacagggatgggagggtccctagccttcgggcacctccagggccagagagcaggctcagagcagctagtgtggagctcagcatccccaccccacccctcctccctgtagagctgatttgaggcctccttctggggctgggctctgcaggccaggtgggtgtggcctgtgttttcccttctgttctttctgcctgtactggatctgttattttcagggaaacaggccccagggcccccctgagcctcaccctaagcccttaggcctctgagagtgctgttgggttctatttatttatttatttgttcctttgttccctacccgtgcccccagtgtcttccctgctgagtaccaggagaggtcctgccccatcctctctctgaagccagggcccttccattccatttagcctttggatcatcctggctgggagaagtgggaccgagccacccagccccactatccccaagcagccctacagccgggatgggaggcacgtggcctctcttttatccgtctatttattttgtaagtgtattcgtgtggaggaggttgttgctttatttttttaaggctctggagtgttgtgtatggtttcttttcacatcccagcctcccatgggcacttctaagaagagaggggatttcttggaaaaggagagaggaatcccctagagcagggaaagcagtgcctgccagctgttgtgcaccttcctgagaaataaatatcctctaaattttcaaacc

SEQ ID NO: 288431 - DNA, 1000 bp, Homo Sapiens
cccacaactggaccaggtccaggattctagcagtcctggggcactgacctttgccagctacctgggggagggcttgccactggaaaacctttcaggccgcccccatcagtgggctccaaagtaaatggctgaaaacaaaaatgtttcacttcctaacagttttcctttttccactgtgtgactgaaagctcctatatcattttatatttctgaatctataaaacaaaacaaacaagcctgaaagtgtctggaggagccaaaggtggcctccctgtccccaaatatattggctatatgagagtaattttacccctctacgtacctaaaggcacccagttcactagtctgtggggtcctggagcctgtctcttctttctggaggttcaaactgaatagcaataattacgttacccaaagcatgtggaggaaaagtgaaaccagccacggagacgctggcccacggctcggcctgcggtgtggcctgctttgctcaccagcgtcagccgctcatttccttctcatgaagtcccatctggtcatggggacgagggccgggagggcaccgggtagccttttcacacttggggattaggggagtgagaaaagatttgggccatgcatgcaaagtcaaagtttaaaattttatccttttcaaatagatgatataatatacctatacatgatataatatttgtatatatgaaatctctctatatttgtttaatttgagccattcaatctaaaccaatgtacaggtgtacaatgaaaaatttaaatgcttagttatttttcccaacacagtgtaaagtcaccctcctctgagagtgggatgtgcagagttttgatgttgcagctttgctcacttcctggcaagggcaggtcatgcctcaatttgtaatgggagtctggggtaagggtgggggttgaaagttgttatctttaaatacatgtacaaatcgttgtcaaaagtaacgttattaaaatagatttattatccctg

SEQ ID NO: 288432 - DNA, 1000 bp, Homo Sapiens
ggcagttagtttccataaagtggccgtatgggaatttagttcattcatccagcaaacattgagtaccaattatttgctaggtcctgtgcaaggaatacaaaaatgattaagacttcttccttacccttttggagcttgaagcataaggaagacaagttattctgtaaggaagataaagcattcaaaagtactacagagaaaaaccaagtatgcttgagttttgcgaatgttctcctcttaaagaatagcttcaaattttgagaccagtggttcccactaagtatagaacattaaaattaatactttataataaaacacttttattgctgcagaatgttaaactgcataacaggcaccagatggtcaagacgagggaaatatgagaaggcaaatgatgtgaggattagtatcttgagattcacctggtctggaattatgtcataggctactatgcatcagaatcacatggagggctttctaaaacagactgctcagcccacccccagggtttctgagttcataggttataagaggtaagttgaacaattccccagatgatgctgatgctcctggtccacaatgtgagaaccactaagttggagtactgactcatagagataaaattctttgaaagaaatgtactgttttaagatactgtaaaatgtggaggcagggcaaacgtttataagggctgttatgtatgaaatgtgcctctgacccaaatccacggactttgcgaaaatcaccaaggagactttgcattaagttcagagtacaatacaaactgggcctagctctgtatttagtcagtatgtgcacgtgggaaactttagtaaaatatcacctccttattgagacaagtttggacatctggccttaagcctctgttgaacaggagaagtgaagctgtttgcaattatataattttctaatttgaaatcatgacaagcagtcttagaacaaagttaaaattaaaaagtctttatccaagtcaccaatg

SEQ ID NO: 288433 - DNA, 1000 bp, Homo Sapiens; identical to SEQ ID NO: 117085

SEQ ID NO: 288434 - DNA, 1000 bp, Homo Sapiens; identical to SEQ ID NO: 117087

SEQ ID NO: 288435 - DNA, 1000 bp, Homo Sapiens
cttcaatgagctctcccacaagggcaacgcaatctataatctccttccagatatcatcagccgcctgtcagaccccgagctgggggtggaggaagagcctttccacaccatcatgaaacagctcctctcctacatcaccaaggacaagcagacagagagcctggtggaaaagctgtgtcagcggttccgcacatcccgaactgagcggcagcagcgagacctggcctactgtgtgtcacagctgcccctcacagagcgaggcctccgtaagatgcttgacaattttgactgttttggagacaaactgtcagatgagtccatcttcagtgcttttttgtcagttgtgggcaagctgcgacgtggggccaagcctgagggcaaggctataatagatgaatttgagcagaagcttcgggcctgtcataccagaggtttggatggaatcaaggagcttgagattggccaagcaggtagccagagagcgccatcagccaagaaaccatccagtggttctaggtaccagcctctggcttctacagcctcagacaatgactttgtcacaccagagccccgccgtactacccgtcggcatccaaacacccagcagcgagcttccaaaaagaaacccaaagttgtcttctcaagtgatgagtccagtgaggaagatctttcagcagagatgacagaagacgagacacccaagaaaacaactcccattctcagagcatcggctcgcaggcacagatcctaggaagtctgttcctgtcctccctgtgcagggtatcctgtagggtgacctggaattcgaattctgtttcccttgtaaaatatttgtctgtctctttttttaaaaaaaaaaaaaaaaggccgggcactgtggctcacgcctgtaatcccagcactttgcgataccaaggcgggtggataacctgaggtagggagttcgagaccagcctgaccaacatggagaaaccccatctctactaaaaaaaaaaaaaaa

SEQ ID NO: 288436 - DNA, 1000 bp, Homo Sapiens
ttcctccttttccttccggttttattcttcctcttgggaacatccctccactccgcactgcttcctgcagctttgtagagctggatttggaacttcgggatttggtttctgagtctgtggaggcaccgacttctcctgtaagaaaatgaatgttgtggaaattctttggctacttaactaaaactcgtgactgtataagtttggctacaaataagtaagaaattaatcatctgctctgtttctgctaatttctggtgtcacttcagtaattctggtagcagccgttgaatctgtcagtctcttaggtaacttcctgtaaacgatttggaaataggatgttttcaacgttcttttgtcttttgctgaagtcaggatagattcaagacataatctcttgtaagatctaaatagagcaaatgtaaacaaaagtgcatttttgtattcttgttaattttagatgctttcctagcttacaaaaagttctatttttgggttaaaaatcaatcaactttctgatatttccccttctgcaatgttattgttcataagaaaacacgagctgaaaatggaaatctgcagttgtttcagttgtcttgaatttctttcagtggccacatcatttccacgttttccacatccgggaggaagcctggactgtgcagccttcgggcacccggcacagacactgtgctggcaggagcttcagacacgccaagtggatggatttggattgaacgcatatgaaacaggagacgggttctcatgtgagatcaaagctcctccaaagcctgttcaagctctaagcgattctcaaatgttaccatttattaaaggtaaactacacctgttgaaggccaagttcagggcagctgttgtgatctgtgtagttaatgtatttattaatgcttgacttttaaaatcctgggcataaatagtgcagagcctcgtatgtttgtcagttcatgccgagatgaaataaatcacgcagaaagtgccagtc

SEQ ID NO: 288437 - DNA, 1000 bp, Homo Sapiens; identical to SEQ ID NO: 222324

SEQ ID NO: 288438 - DNA, 1000 bp, Homo Sapiens
tttgtggaatccattatgaagtgcaattagatagatgtaggttcctgccgtttggagagaatgactagcatttatcttcttttccttccatgccaaaggttggagtctgctggtgcggtgtttacacaccaggcagggctgtctgccaccttgtgtggcttgaccccctgtggaggggagtgcctggttggatcccacactggcagagatggggccaccccttccttccaggcacatctcacattgccatgtacagaggcaggagtcacgtttggtcaccatggaagcttttattgctcccacatggtcaggtctcaccctgcttgaagcgcagaaggcacagccttactgaccagcacgcccactgactggcatctgccggctttgtgcaggcagccccgacggtttccacagcgagcgccagctccggccagcctgggacagctcatcccagccgactacacctgcttctggtcctgtccacattttgatacgcagatcacttgagcttgtcaattagggttctgccattctgaaataaatgaagtttctaaagcagagtcggcctcagaagccaaaaactgaccagaagatggtgctcaaacctttaagacttcatctccatgtgaagggctcactgtttctaccaaggctgtgcctgtattaaggcttttccgtcctgggaactgtcagtctgggagagctcttgatctgcaggtggcaaaatggcactgaatatccccttggcagcagagaaaacccactgaaagatcgtagagtggcacatgcttacagggcattggtgccaagtccagtggatgagaatccagcccctcacaagctgtgggatggggcttgggagttgcagtgaatgtcattaaaatttcttccaaaacaaaactagaaataattgctgagggcttatagggaagtgatttaaaaagaaaaaacaaacaacaacaaaaaaaactcttcggaataaagagggctgtaaattttg

SEQ ID NO: 288439 - DNA, 1000 bp, Homo Sapiens; identical to SEQ ID NO: 117089

SEQ ID NO: 288440 - DNA, 1000 bp, Homo Sapiens; identical to SEQ ID NO: 222325

SEQ ID NO: 288441 - DNA, 1000 bp, Homo Sapiens
ttacacaggacttcactccagagttaccattatgagtgtgttcagctctggtccacagaggatggataaaaatggtttgttatgtttttttgctctgcagtgctatgagccttatatctgttaatatgaaggacaaagtcaaaagcagcagtggatagcaggaagggtagagactaatatgtttgggaccaaaaccatctaagttagagatttccagatcacagaggggctgggcattctctggagcagtcattggttggtgctttattgtaatcattttgcgccaatccccaacaattaggaactggaccctgggaataagctgagggtgctgaactgttggggaagggtgactgtagccacatggaagataaaatatgggtttttctgcaaaatttccatctgagggtttttacatttaatatttttttaagacagtttaaagagcaaacgttttttaagtgtattctagttgcaaagtatgcacacatatcttgaatggctttatttttattgtgtaaaactgttgaacacatgactgtgatgcacaaattctttacgtgtaaggagtctatgcattttacagtaacttattttatgatcgggtgatgagacagttatactttcaactgccattatttttattaagtgctttcattttctttacagttattataaaattgtatttattttatacagatgggttttcattttcctgatgctgtaatgtttacttcagcttgttgacctttctttgtgttatctgcatgttgtaacgtgtgataagaatgaatgtaaaggctgtggcaactgtaattaatttttgtaaagggctggtcacacgtggatctggtttatgaatgcatttgggatgattttggtaaccagatcaccttttcagaaatttagatgtgaacaccaaaagaagcattttctcaacaaaaattaatagctggttctattttttttaaacctagaaaaaataaagttgatttttttc

SEQ ID NO: 288442 - DNA, 1000 bp, Homo Sapiens; identical to SEQ ID NO: 117090

SEQ ID NO: 288443 - DNA, 1000 bp, Homo Sapiens; identical to SEQ ID NO: 222326

SEQ ID NO: 288444 - DNA, 1000 bp, Homo Sapiens; identical to SEQ ID NO: 222327

SEQ ID NO: 288445 - DNA, 1000 bp, Homo Sapiens; identical to SEQ ID NO: 222328

SEQ ID NO: 288446 - DNA, 1000 bp, Homo Sapiens
atactgacctttctattctctattaataaaaaattaatacatacaattattcaattctattatattaaaataagttaaagtttataaccactagtctggtcagttaatgtagaaatttaaatagtaaataaaacacaacataatcaaagacaactcactcaggcatcttctttctctaaataccagaatctagtatgtaattgttttcaacactgtccttaaagactaacttgaaagcaggcacagtttgatgaagggctagagagctgtttgcaataaaaagtcaggtttttttcctgatttgaagaagcaggaaaagctgacacccagacaatcacttaagaaaccccttattgatgtatttcatggcactgcaaaggaagaggaatattaattgtatacttagcaagaaaattttttttttctgatagcactttgaggatattagatacatgctaaatatgttttctacaaagacttacgtcatttaatgagcctggggttctggtgttagaatatttttaagtaggctttactgagagaaactaaatattggcatacgttatcagcaacttcccctgttcaatagtatgggaaaaataagatgactgggaaaaagacacacccacaccgtagaacatatattaatctactggcgaatgggaaaggagaccattttcttagaaagcaaataaacttgatttttttaaatctaaaatttacattaatgagtgcaaaataacacataaaatgaaaattcacacatcacatttttctggaaaacagacggattttacttctggagacatggcatacggttactgacttatgagctaccaaaactaaattctttctctgctattaactggctagaagacattcatctatttttcaaatgttctttcaaaacatttttataagtaatgtttgtatctatttcatgctttactgtctatatactaataaagaaatgttttaataccgaaaaaaaaaaaaaaaa

SEQ ID NO: 288447 - DNA, 1000 bp, Homo Sapiens
aggaagttttattgggcagtgctgctcttaaatcctaccttccactcaactcccatacaactttcttttgtacattttgatactttctacctaatggcagctcttccaaaatagctgctttaaactctgatttaattttcaatatttggtttcatttttcaacaggccaagaggcctctggtaatgaagtgctatatatatatatatatgacggagtctcactgtgctgcccaggctacagtgcagtggctcgatcttggctctctccaatctccgccttgcaggttttcaagcaattctcctgcctcagcctccttagtagctgggaccacagacatctgtcaccacacccagctaactttttgtatttttggtagagacggggtttcgccatattgactgggctggtctcaaactcctgacctcaagtgatccacccaccttggtctcccaaagtgctgggattacatgcgtgagccaccacacttggcctacattttttctttatataccagaacatctataacaggcaccttatctactcattagtgaagagataattggattacacaggcaggcttgtttactacatccagaatgtagaaactgctttcttcaacatcttggttctagctagtaataacaatataattctttggcagatattcagaataacattttaaactacattttcttagaaaattgcattcttgtagtgagcagtgtatggtctcttttgttcagaatttaaaactgataaccaatgaaagccttttctcttattcctctaccgtcatttacatgataatctgaagctaatatgacaatatttaaatactaagtggtactagggaactacaagaatactgtaaagcttaagccattgttatcactgtcatttagcatttaataacaaaactatacagaattatgtgcataccaatgaatgttttgtaccatctagttaaattttttaaataaagttttatgggttaagcag

SEQ ID NO: 288448 - DNA, 941 bp, Homo Sapiens
gggggccgttggcgaagccagctgctggaggtgccgagaatctgagtttcggcaagcagccaggtctggaaactgtaacaggacattcagttagtaatgatggttgcaggttgaatagtctcgccctagatctcacctaacttgcagaatattttaaaaatgactacaccaaacaagacacctcctggtgctgaccccaagcagttggaaaggactggaacagtacgggaaattgggtcacaagctgtttggtcactctcatcttgcaaaccaggatttggagtggatcagttacgagatgacaatctagaaacttattggcaatcagatggttcccagcctcatttagtgaacatccaattcagaagaaaaacaacagtgaagacattatgtatttatgcagactacaaatctgatgaaagctatactccaagcaagatctcagtcagagtaggaaataattttcacaacctacaagaaattcggcaacttgagttggtggaaccaagtggctggattcatgttcccttaactgacaatcataagaagccaactcgttcattcatgatacagattgctgttctagccaatcacctgaatggaagagacacccatatgagacaaattaaaatatacacaccagtagaagagagctccattggtaaatttcctagatgtacaactatagatttcatgatgtatcgttcaataaggtgactttaaaatgagacgaaaatcattaaacgtatctttgttttatcctgtattcaaataatatatcatgtacctttattgaacaaggcatccgttatatctaattttgtatatgtttaaaaatattttattgtaactttgacaaataaatttggggtcatattatctttattttctttaacatgtaataaagctcacatattttacaaaaaaaaaaaaaaaaaaac

SEQ ID NO: 288449 - DNA, 1000 bp, Homo Sapiens; identical to SEQ ID NO: 117092

SEQ ID NO: 288450 - DNA, 1000 bp, Homo Sapiens; identical to SEQ ID NO: 222330

SEQ ID NO: 288451 - DNA, 1000 bp, Homo Sapiens; identical to SEQ ID NO: 222331

SEQ ID NO: 288452 - DNA, 1000 bp, Homo Sapiens
tgatcaccaaataataaatattaagaagaatgggggaaaaaggatagaatattaaaactgctttgcataggtttttggggaaattaggatatcttcactgacaagacactgaatggaatttattcacccattttaaattggttacttggggatcagagatttgtctctccaacagcttgtggttttcttattactcattttcaggaaagtttgtagtattacaaggcagaaggaaacacagtagcaatggttgctctatattttgtctttcaaagattactgcattaccaagaaacagtagccaaagatgtttgaagatcatgtcccttagctgcattgtgggttattctagaaatccaatgttaaatgcctctactaaagtggggattccccataaaaattgtccagctacctgactcttttgcaataacaactttgattactgaatccatacactcaaactatagtgatatatcagtgtttgggagtgacctctagaaaaaagaaaactgtttttagaaatacataaaatcacttccaaatcctgttgcttatgttgggttaaatttgaaagcaattctctatatataaatatgtgaaatattatgatctgaacttagcacacatgaagcaacatttctttgctacacagaggtgtcttggaaagatttcattcccaattcatttttcatagatctataatcaggcaatttctgcaagcaatgtatgaccccacctgagcaaccacaaataggctctccatgaaactgcaaaggaactgatgtgtggcatccatgctggttttgtctgtctataatatgaattcaagtatctgttcatatttccaattgtctcctgctagcaatatgtgccacaacatgacagtcttgtgacatcttaaggaaaagaagagttcctgttaaatgaatagctttagcttttacaggggattatgattaaaagtgatttagtacatcttaaaaaaaaaaaaaaaaaaaca

SEQ ID NO: 288453 - DNA, 1000 bp, Homo Sapiens; identical to SEQ ID NO: 222332

SEQ ID NO: 288454 - DNA, 1000 bp, Homo Sapiens; identical to SEQ ID NO: 117093

SEQ ID NO: 288455 - DNA, 1000 bp, Homo Sapiens; identical to SEQ ID NO: 222334

SEQ ID NO: 288456 - DNA, 1000 bp, Homo Sapiens
tccactgccaccttggctggcaagggagaaatgtgttgtgttgtcttagctttaaaacagtcacagttcttgctctatcatagatgaacaaatactttcttgatcattctgtaagaccaggaggttggtaagagtgactaaccagcctaactttaatacacatgtataaagatgttcacagagaaagatgctctgtagagaatttgctaccgaagttggctcaagaatttgtttttagtgttatttaccaagattaggacgtcagtggcttaaattctttgaattcttttcaaggactgcaagattatttgataaagagtagcatgaatcttgtgctctaatattacacagtaagttcaaagaaaggatgtaagtcaaagacttgttacatagagggaaaatggactgggatagaggacagactgatagtttctttctttcatatcacatgtatagagaaataattatatcagaaactcacaaacctagacatggaaaaacagattactgtctattgtcagcatcattttcatctgtaagtcactactggaatatatttttcttttaatttccagtgactttagaatacacacagtttttccgacttttcaaaaatttgattaaatggttttatagtataatattgggaccccataccgttagcccttgtatgtataccaacactgccaaagtaaaacattaggtcaggcatggtggctcaggcctgtaatcccagcattttgggaggctgaggcaagtggataacttgaggtcatgagttcgaaaccagcctggccaaaacagtgaaaccccgtctctactaaaaatacaaaattagccagatgtggtggcgcacacctgtaatcccagctactcaggaagctgaggcaggaaaatcgcttgaacctgggaggtggaagttgcagtgagccgagatcgcaccactgcactccagcctgggtgacaagagcgaaactccatcacaaaaaaaaaaaaaaaa

SEQ ID NO: 288457 - DNA, 1000 bp, Homo Sapiens; identical to SEQ ID NO: 117094

SEQ ID NO: 288458 - DNA, 1000 bp, Homo Sapiens; identical to SEQ ID NO: 222335

SEQ ID NO: 288459 - DNA, 1000 bp, Homo Sapiens; identical to SEQ ID NO: 117095

SEQ ID NO: 288460 - DNA, 1000 bp, Homo Sapiens; identical to SEQ ID NO: 117096

SEQ ID NO: 288461 - DNA, 1000 bp, Homo Sapiens
acaccttttccaaggacaatggcaacaatgtcaatgtcaacactgagtctaattttgaccacatttatagtggtatagtgtcaatactgcattttcatgacaaccacactccactgttgaaacactgtgccagtgagaagtgcaacatccagtgggcagatgaaaatgatgcatggccaagttcagtgtttacagataaaactgctgtggttcaagtgcttccttccccatcaaatccttgataaggctttgtgggaaaatgatctaaattattgttttaatttttaaacctaatttattcactcagtgaacattcttacctaagcaaggctataaaagggaatactacagttttgtccacactttaatttgagaccatttttctttgaatcgtaagttagcaaaagaaatttttttcacctttgaaaatcacgtgatgttaaaggacaaatgcccactcttctattctgatctgcaaatagcttaaatgtctcttgcaaaacaaagtaagataccaccagtattacaacacaatgattttccagacaaatggtatggtgttgaaaaataactgttacttcttaaagcagcattttatcttctattttgaagactatttattgtaataattagaaaacatgaaatagggaactccagactgacacagcagttgtttttgaaaaggaaataaactttgatgaattagataatccagatacatcattgtaaactcttactctaggtgctctttggtgagagacaggctttgttctcttgttcataacatttctctgcaaagaattctctatggagtgaagcgaatgaagtgaataatttcttaccaaataaatttatcaatttacaaatctgctctacatctcacttttgagttcagttgtagtcatgagtgatccttcatattttattaaaagtgttcattcaggtaaggtgtatgttgaaattttgccaattatcttaataaaacctggcaatttaaaaa

SEQ ID NO: 288462 - DNA, 1000 bp, Homo Sapiens
cgcaggaatcccctgctctggcttcttcagtttctcttccagacagacacccgcatctacctcctagcctattggtctctgctggccaccttggcctgcctggtggtgctgtaccagaatgccaagcggtcatcttccgagtccaagaagcaccaggcccccaccatcgcccgaaagtatttccacctcattgtggtagccacctacatcccaggtatcatctttgaccggccactgctctatgtagccgccactgtatgcctggcggtcttcatcttcctggagtatgtgcgctacttccgcatcaagcctttgggtcacactctacggagcttcctgtccctttttctggatgaacgagacagtggaccactcattctgacacacatctacctgctcctgggcatgtctcttcccatctggctgatccccagaccctgcacacagaagggtagcctgggaggagccagggccctcgtcccctatgccggtgtcctggctgtgggtgtgggtgatactgtggcctccatcttcggtagcaccatgggggagatccgctggcctggaaccaaaaagacttttgaggggaccatgacatctatatttgcgcagatcatttctgtagctctgatcttaatctttgacagtggagtggacctaaactacagttatgcttggattttggggtccatcagcactgtgtccctcctggaagcatacactacacagatagacaatctccttctgcctctctacctcctgatattgctgatggcctagctgttacagtgcagcagcagtgacggaggaaacagacatggggagggtgaacagtccccacagcagacagctacttgggcatgaagagccaaggtgtgaaaagcagatttgatttttcagttgattcagatttaaaataaaaagcaaagctctcctaaaaaaaaaaaaaaaaaaaaaaaaaaaaaaaaaaaaaaaaaaaaaaaaaaaaaaaaaaaaaaaa

SEQ ID NO: 288463 - DNA, 1000 bp, Homo Sapiens; identical to SEQ ID NO: 222337

SEQ ID NO: 288464 - DNA, 1000 bp, Homo Sapiens; identical to SEQ ID NO: 222338

SEQ ID NO: 288465 - DNA, 1000 bp, Homo Sapiens
aaagttgtgaatagatggtggaaactactttcccttaatttgtatatttctaatcaagtgttgattgtgcgcgactgaccaggattgtgaaagagttcttctgtttgtatttttttaaagagaacttttttagtttattaaattataacatgttcccttttgttttgtaaataaatgtgcccccaagttgttaatgttatattaaaagagagggtccttcaaaaaaattattttttaaaacacagaggtgttctgacctgcaacttgactgggaagcccctgggtaacacaggtcctgctgtggcctttccttggtgtgacacttgaactagtcgattttttgaaggctataacctaacctcgactatttgttgttatgtgcaatactgtttgtactgtttgtataaaaaatagaaaaaaaaaagaaaagaaaaaaggcataaatctttattgcagatttattttcattgcaaactttagacattgtgattcactgaaatcatttttctactgtcaaatatgtaccttttcttcatgctggtattttttcaatagtaatgtagcctttgtactgagacaaattttcattgttatttttagaaagattttttgctaagaaaaaaattaaacatatttacatatttttcattttatttcgtattttctttaaggagtgctttctcaatcattaatagagttgtttctgggagggactttcatatctggtcaatgtcataatattattttgtatttttattggaataaattaattttatgatgctaattctttaaaagtttatttttttcattttcagttatttttgaagctaaaacctttgtaatattgttactaaagtgtctagttttttgaaatgcaaagctttatgtattaacttgctgatgtggtttacaatagtgtgacaacgatgaaaatgcttggttatgtaaagtgattggaaatgtaatggataattgggtaataaaatgacagaatgagcag

SEQ ID NO: 288466 - DNA, 1000 bp, Homo Sapiens
taatttagatctgtatttttttaggtttatcctaatagctgttttttttttttaaccataactcatagaaaatcaaatgtttttatttgttaaaagtagactgaatttgacatctggtatgctggtatgtagctcatacatcaagagttattttacaaataaatttattctgtagatgcagaaatatttttcagtgtagattttcccttttgatatgctaagtcatttctccgttcagaggtaaaacaataaatttttagtgcctttagaataaacattgaaagaatacaccccaaaactcttctcctaacttaactactcataaactagtgaaagggaaggtctatgatactcaggaataaaattattgcccctgagtgtgaaaactaacttaaatttcagcatagggtttcaggggacatggcgaagtttacagactgagatctcagtctccatggttggtacagtaagtctttgaccacattttctgaaggtcatgtttagtggagaaacgggcttttctctagctggtttaggctggaagctgtgtccgggtcgatgggatggcatattgttaaagaatctccattgtcgtcactgtcctgtggatgttaaacctcgtttttttccccacacgatattaaaacttaaagcaccagaaccagtcatggagaccagccagtttagatggtaagtcatatttctggtggtacacagcagaggaaccccttcactctatctttaggtagaaatatttggaggatgtgacagcctctgagaaacataatgttactatgtggattttaaaaaatataatacttgcatgtaattgctataatgttcatatttgaggcagttgtgaaaccggtttatgattgttggtgtactctgttgtaaattcaaagagagcttgttgaacattttttttttttacctattgttttcagagtgtctattttgaattaaaatttgttacaccgctgcaaaaaaaaaaaaaaaa

SEQ ID NO: 288467 - DNA, 1000 bp, Homo Sapiens; identical to SEQ ID NO: 117098

SEQ ID NO: 288468 - DNA, 1000 bp, Homo Sapiens
cacgcccagctagtttttttgtatttttagtagagacggggtttcaccatgcaagcccagctggccacgtaggttttaaagcaaggggcgtgaagaaggcacagtgaggtatgtggctgttctcgtggtagttcattcggcctaaatagacctggcattaaatttcaagaaggatttggcattttctcttcttgacccttctctttaaagggtaaaatattaatgtttagaatgacaaagatgaattattacaataaatctgatgtacacagactgaaacacacacacatacaccctaatcaaaacgttggggaaaaatgtatttggttttgttcctttcatcctgtctgtgttatgtgggtggagatggttttcattctttcattactgttttgttttatcctttgtatctgaaatacctttaatttatttaatatctgttgttcagagctctgccatttcttgagtacctgttagttagtattatttatgtgtatcgggagtgtgtttagtctgttttatttgcagtaaaccgatctccaaagatttccttttggaaacgctttttcccctccttaatttttatattccttactgttttactaaatattaagtgttctttgacaattttggtgctcatgtgttttggggacaaaagtgaaatgaatctgtcattataccagaaagttaaattctcagatcaaatgtgccttaataaatttgttttcatttagatttcaaacagtgatagacttgccattttaatacacgtcattggagggctgcgtatttgtaaatagcctgatgctcatttggaaaaataaaccagtgaacaatatttttctattgtacttttcgaaccattttgtctcattattcctgttttagctgaagaattgtattacatttggagagtaaaaaacttaaacacgaaaaaaaaaaaaaaaaaaaaaaaaaaaaaaaaaaaaaaaaaaaaaaaaaaaaaaaaaaaaaaaaaaaa

SEQ ID NO: 288469 - DNA, 1000 bp, Homo Sapiens
cctgcaactactctgatccctccagcccgcatagccgtaccttcacctctggatgccccgcagttgctgcactttgtggaccagtatcgagagcagctgatagcccgagtgacatcggtggaggttgtcttggacaaactgcatggacaggtgctgagccaggagcagtacgagagggtgctggctgagaacacgaggcccagccagatgcggaagctgttcagcttgagccagtcctgggaccggaagtgcaaagatggactctaccaagccctgaaggagacccatcctcacctcattatggaactctgggagaagggcagcaaaaagggactcctgccactcagcagctgaagtatcaacaccagcccttgacccttgagtcctggctttggctgacccttctttgggtctcagtttctttctctgcaaacaagttgccatctggtttgccttccagcactaaagtaatggaactttgatgatgcctttgctgggcattatgtgtccatgccagggatgccacagggggccccagtccaggtggcctaacagcatctcagggaatgtccatctggagctggcaagacccctgcagacctcatagagcctcatctggtggccacagcagccaagcctagagccctccggatcccatccaggcgcaaagaggaataggagggacatggaaccatttgcctctggctgtgtcacagggtgagccccaaaattggggttcagcgtgggaggccacgtggattcttggctttgtacaggaagatctacaagagcaagccaacagagtaaagtggaaggaagtttattcagaaaataaaggagtatcacagctcttttagaatttgtctagcaggctttccagtttttaccagaaaacccctataaattaaaaattttttacttaaatttaagaattaaaaaaatacaaaaaagaaaaaatgaaaataaaggaataagaagttacctactccaaaaaaaaaaa

SEQ ID NO: 288470 - DNA, 1000 bp, Homo Sapiens
cctgtaactagcttttttaatttattatttgaattttaggatagcgaatcactaatttttagttgctgaggttggcattttagtgattattaagcacttctgtcagtctttgaaaaaagaacgtattttttgtgctttgaagatctctgaagaatttcttttataatagaatgggcatgtattgtaacagttttatgtcaaatgatctgtgctgtagaaaaacattaacccttgttcaaaaaagaaatggataaacttggcctttctaagtggtaagaatgacctgtcactataatatactgtatgtttacattttatttaaatttaatctcttatgtatagggtgataaccttccccagaaacaacagtgattgcgattgttttctagaaacttctttaaagtgccacatttggcagtacaaatgagtctgagtgtaatagcccagagatttatatatagttgaatgtctaaaatggtaaaatgtgccactgtgtcaagttacagtggcttatgtttttcatagtaattcaaatgaacttcctatttttgatagtaaatgtcatttaatagtatacttgccatttgagcctcactgcaaaattagtgcagaggagaaaacaatttttaatgtaatcttgattttacctcatatactgtacattccaaaaactctaaactttttaaagattatagatacactaccaaacatatcaccttaaaattgtataaggctgaatgaacttcatacaaatgaaaaaaatctcataaaaatacataaactatgtagcaaaagtatctgtaaaatccatggaaaataaaagttgtatcattctttttgaaaaaaaaaaaaaaaaaaaaaaaaaaaaaaaaaaaaaaaaaaaaaaaaaaaaaaaaaaaaaaaaaaaaaaaaaaaaaaaaaaaaaaaaaaaaaaaaaaaaaaaaaaaaaaaaaaaaaaaaaaaaaaaaaaaaaaaaaaaaaaaaaaaaaaaaaaaaaaaa

SEQ ID NO: 288471 - DNA, 1000 bp, Homo Sapiens
ttccattttcccatccagttctggagttcgtagagagtgaagatggtagacttgaacagataaataaacttaacgatcttgtaagagttgtctagctacttaaaaccctcagaagtaagagcttagtctcacgagttgtaagagtgggatttggagcttggtggtggagactgacttcagctgagagatgcacaacagtcatggttttcttaagcctcttatgaaaccatgaatgagagatgaagctaaagaatagaatccagagatcacaaactcatctagagtacttccacaaaatttacaaagatgtgggaactttatggataggatatattttgtttgttgttgttaatatcaactagaggcactttacatagggttaagtgatcgaacccttttgtggttttgaacaccaacatactggcttacactgctgaaatattttgggtttcattattttgcactggatccaccctgtaaatactcttaagtatacatttcaaccactgttttttctactctttttgctgctcattaaaatctttcatgtaggtgccagaaccatatgtaaacagctttttaaaaaattgaagctggtattttgtttaaacaaaaagccatagaacttggtcatgttttccattttaaaatgatttactgaaacaaagtaatactaataaaaacccacaggcaccaaacaggctgcttaaaatggtctgttaaagacattttttggttatggaatataagaaaagttttgcacatctgtaagggggaaaaacagtatatcaccattgggtagagtggacgggactcatgtaaggactcaatttggggaagagcattcagtggcatgctgttagaggactagtgtccgagaatctcctcacagtatcatgttgcaggaattccccattgctctgcaacttccaaaccagtttgagtcatacaaatgttttctaaacttttattgtattactgcaataaatcttttaacagt

SEQ ID NO: 288472 - DNA, 1000 bp, Homo Sapiens
acagaaggagcaagggcagggtggagggggttgaaggatcctgacagaccatggacagaggcaggaagtaaggaaactgatgttaaactggaacctaagacagtgatgaagatggaaacacagatacctacactggcattggactccttcttgctcccctgccatgggtcctctctttttccctggttgaccccccttgcatcactcttcttcccatcctcttctttttttttttttttttttttttgagacggagtttcgctcttgtcaccccagctggagtgcagtagcacgatcttggctaactgcaacctccagctcctgggttcaggtgattctcctgcctcagcctcccaagtagctggcactacagacacgcgccaccatgcccggctaatttttgtatttttagtagagacggagtttcaccatgttggccaggctggcctcaaactcctgacctcaggtgatccacctgccttggccttccagagtgctgggattacaggcgtgagccactgtgcctggcttccatcctcttctatcatttttttaaatctcttctcctatcataaaattaatttctcattttttggtcaggtagaattgggaaagtcccacactgtcctcctattaccttaacatcccaagcttcctttccttttttggtctttatgaatatatttatatggacagaattaagataaacaaaattgattgccccattctctcacttccccatcttgtcttcctagaccccacagagttaaaacttgggattcccctggcccccccagaacacttgtatattgtttgtttgaggttcgtgccgcagtaacagacacagtatttaattgcacatacagatgtttgctgggtatattcactgtaaattttatttaatctgtttttttgtttgtttgggggttatttggggggaggttggttttgtttttaaatataaaaaaaaaaatctgtcactggaaaaaaaaaaaaaaaa

SEQ ID NO: 288473 - DNA, 1000 bp, Homo Sapiens
taactgggagcagtgcagtgtctcccattcgcaagacagccagtcagcgccgctcctggcaggatttaattgagacgccactgacaagttcaggcttacactatcttcagactctgcccctggaggattctgtcttctctgactccgcggccatctccccagagcacaggcggcagtctaccctgccaactcagaaatgccacctgcaggatcactatgggccataccccttagctgagagtgagaggatgcaagtgctaaatggaaatgggggcaagcctcgaagttttactctgcctcgagatagcgggttcaaccattgctgtctgaatgctccagttagtgcctgtgacccacaggatgacgtgcaacccccagaggtggaggaagaggaggaggaggaggaggaggaaggggaggcagcaggggaaaacataggagaaaaaagtgaaagcagagaagaaaagttaggagactcattgcaagatttatacagggcactggagcaggccagtctgtcaccactaggagaacatcgtatttcaaccaagatggaatacaagctatcatttataaaaagatgtaatgatcctgtaatgaatgaaaaactacaccggctgagaattctcaaaagcactttaaaggccagagaaggggaagtagccattatcgataaagtcctagacaatccagacttgacatctaaagaattccaacaatggaagcagatgtacctcgaccttttcttggatatctgtcaaaataccacctcaaatgacccactgagtatttcttctgaagtagatgtaatcacttcctctctagcacacactcattcatacattgaaacgcatgtctaaatgtattctgccttcagaccatctagtacctgctggtactctgaacaagtatataaggtagtttttatatcaatgtgtggaacacttgacaagctatactttaatgttacccaactatatgaaacaaaccatatatggtc

SEQ ID NO: 288474 - DNA, 1000 bp, Homo Sapiens
ctaccactttctgatgtggatacaacttctgctacagatattcaaagagtagctgtgctatgtgtttccagatctgcttattgtttgggttcaagccaccccagaggattccttgctatgaaaatgcggcatttgaatgcaatgggttttcatgtgatcttggtcaataactgggagatggacaaactagagatggaagatgcagtcacatttttgaagactaaaatctattcagtagaagctcttcctgttgctgctgtaaatgtgcaaagcacacaataaagtgaaaatcaaccttttcatattaggagacatgcatttgtaaaaattaataaagatgacaagtcagttgtcaatggaattgagctatctgctaagacaaaaaatgttacctcagttcactattaaaattaattttaggagtggaagaaatgttgttactgccatttaaaaatatgctgagaaaattccagaagggttatttttccaaccacacctattccctctagtgcccagatatttgatttgtgagctgtacgtttcaccttttcatctttgatctactaaaaactggtttcttagttgtgaggtgtcacaggcaggttgatgtgggtagtagtccttgtctttggaatctgaatatttatactcctgctctaagctgttctaagacttggggttatgcctttaaatcattttcaagcattggccaaataataattggacaaagttctaaagttgtcaagtgtgtaagaattagtgaggtagctgttgaaaatgagtgaggatggtatttgtatttgtaataagcactgcaggtagagatatttcatgggttataataagagaaacacagatgagatgtagatggtaaggagtcttactgttgttggggtccttcctttctccttcttttttcccccttacccctcccacaatttcatgaagtcttttaaattaaatatatagctgaattgtgttgtgaaaaaaaaaaaaaaaa

SEQ ID NO: 288475 - DNA, 1000 bp, Homo Sapiens; identical to SEQ ID NO: 117100

SEQ ID NO: 288476 - DNA, 1000 bp, Homo Sapiens
tacttgcaacagtctttcatgatatgaggatgcccccgtattaccactctgattatagttctgagttctttgatttactcatgctgcatgacaaaatgtttactaataacaattcattataaagttatatccctctttacatcacttatctttctcactgaggttcattcactggaatttactcacgcaatctcagtagagtacaacgtagatacagaacctaggagagtcaacatctggaggattttagtctttcttacacatatgtgtgattttaaacgaatattctcagaccacaggaaactcttcatccccctgttgtttaccagtaacagtatatcacagacctttccaaatgtttgtatatgtaatcagatgtacatttatattgaaaaacaaatgagatggacttaaagagcacatcctgataaatactttctctctcacctgtactatatttctattagactaaagttatgtgattttttttttacattttttcagatgactagcaattttgatagtttataagataatgcaaagaactttctctgacaaactaactgcagtaacagaaacctttcttttcagttactctttttcaagaatgaaagattattatacaaaaaattgtatactacttgatggaaccaactttgtacatcttggccatgtcactggtcattgtgtgaaataaagataatctggataatgactattagtccaatgctaagaaacatgatctttgctcattaaagagctaaaatgtttattgctgttttgtctttcttttttctaaaaaaagaaaaaaaagaaaaaaaggaaaagaagaacaaagaaacatgactgtctcaaagagtaatttttctagattagaccagtcaggtttttgaagacatataggtaacttccacagaaaacacaaacatgtatttaaaggcaagtctcatctaagatgaaactcataaaaattatttaatgtttgttatgaatttaaaag

SEQ ID NO: 288477 - DNA, 1000 bp, Homo Sapiens; identical to SEQ ID NO: 222342

SEQ ID NO: 288478 - DNA, 1000 bp, Homo Sapiens; identical to SEQ ID NO: 117103

SEQ ID NO: 288479 - DNA, 1000 bp, Homo Sapiens
gattcacagtctgcagctgaaagcatgctttgttcatacaggtgtttataaccttggaactcctagggtatttgccaagttatcggaccaagttacagtgtttgaaacaagtcagcagaattccatgcctgccctgatcatcatcagtaatgtgtgacaacttggaaatttgtactgaaatccacaataatcagtttttgctggatgggttttacagcagtatttgatatacctaacttgttatggaggttgattgatatctgatccctgcaaaatactttgacttgtcattttgttgatgatgcaaagcacgttggactgagaatacttaacattctttttctgtatttctttaaaccctgagaataatttacatgctcataatacaggatatcagcatatttgtgcaccttattaagccccatcttaagaaaacacaaagtctaagtctgctgttacaacttgtcaatggtatacgaatattaggagatgattctgagaaaggaaaggccttgttggcagtactcctgttaagccattagtctctaaattccagctttactgtgaagttctatagagtgttaaatacaaattttcctgtcttgcttcacacagttccttaaaatcagttttgaactttggtcatagagtcttcatatttcagtatttggtggtccctatgacttatacataactttgtaaaaagaaaaaaaaattttttctgatgctttgaatatagttttgaaaggagttttgacttttttcccctcattcatctcagtatagagtgcgctatttcacaatacaatttttgtcattaaaattaccatattctttattatataacgttaactattgagttgatctgtttaaaatataaatctcaagttaattaaaaataagcttttcaaaaatgtattatatttataacaaatatactgtaaatagaataaagacatgctattcactgtaaaaaaaaaaaaaaaaaaaaaaaaaaaaa

SEQ ID NO: 288480 - DNA, 1000 bp, Homo Sapiens; identical to SEQ ID NO: 117105

SEQ ID NO: 288481 - DNA, 1000 bp, Homo Sapiens; identical to SEQ ID NO: 222345

SEQ ID NO: 288482 - DNA, 1000 bp, Homo Sapiens; identical to SEQ ID NO: 117106

SEQ ID NO: 288483 - DNA, 1000 bp, Homo Sapiens; identical to SEQ ID NO: 284380

SEQ ID NO: 288484 - DNA, 1000 bp, Homo Sapiens
tcaaagaaaggttcttggtctatgcctctggtctgtgggctggcagggcaaccataccatactcccgccagtcctcggctcctgctgcaaagttggccatgtttcacagggaaacttttggaagagtggctgcttatgagattccaaaatgaagtgttggccaacaccgctcatggccatcctggattttcccagtggcttcccttcctgctcgcctccctgaacaggggagaaagcttaacctctcttctcctctccaaacctttcaccttgaatgggtaatgtttggtgggggctgttccttcttggagaagccttgagtcggaccattttgagatcatggaggaaggatgaagaagtgaaaatgacaataatgactctcaagaggctggcgatgtgacatggcaaatgtagaactgacttaaattgaacaaaccctcactgagcacctctgatgttgagcacctgctgaatactgagcactgaatgggggagggggaggggagcacggggtgagtcaacctgggactcggtctcagggatatgcctaccaatagcgggtatcgtaaggcatgtacccaaacataacggatgtaaggcagaaagtgatcggagaaggaatgagaaagtgtgcgtgatgttaatgaaaagtcatatgcagctagagcagacccaggaaagctttctggaagagattgcatctgaggaaattcaggaaggatctttgtagattggggggagattctaaattgaaggggtgatagggtgaggggccagagggaagtctgctgtgttctcatgtaggatgtcagccctccctgcaacttctctttttggccaatgtcttttcactttcctgaccctttagaatcatccccagccagacgcaatcatggaagttgccttattgtcactggttaagaacttggcgagattgaagggcttttgttattgttgttggatatttttgtttcccataaaagcacatcatttcaaccct

SEQ ID NO: 288485 - DNA, 1000 bp, Homo Sapiens
gttttcatttaaaagattaacgttattgatacttggataactggctaatcatattaaaggactatgtggttccagctcaacttttaatatattgtctcctttaaaactatcatggttataattctattgggaaagacttttagataacaaagatttcaaatgttaaaagagataaaagtcaggttaatactatcttaaacactgagtcagaaaatcattactgtatagaagttgctttcctgatcaagtctgaacttcagctagtgctagagaactattttctatgacttaactctaaccaagttttattttaagctgtttctttgatagaagggccatgaaaatagagtaatgatatagtaggagataagggattggtttggtctttttcaataaagatagaagttgctgaagttttctgaattaataatgacttagattgtgaccttttagattcggtgttgagctctgtgttgtattacttcctaaaagataatgcttaaacattaagcattagtgtgctcttcatgttaatatggcagagttttgtaaactaaattaaaacttactgatatattggactttgagccaagggaaagaatgagtactatctttccagatatcttaagggtaaaagcttattctaagacagtctgtccattgagaatattagatttctgacttgcaaatatgtttgtactccagaagaattagaggaaaagcagatactagaattctaatttaattacatatacagccgtctttgtttatagtgtagaattctttatattttgtacaaaaactaattcttttggtaaaatgaaccatttacagttcggttttggactctgagtcaaaggattttcctttaaatgcttgtctcaattttagtctggtcttttgtacttttcttcagaagaaatgaattaaagggtacagttgcataaagtgggtttttatcctaatgtattggaaataaatgataaactttaaaaaaaaa

SEQ ID NO: 288486 - DNA, 1000 bp, Homo Sapiens
agtaaatgcttgaaaaaagaggggtgattttcaatggtttgcttaagtcactgttttctagacaccaaaatagctgttttgaaactgttttaattgcttgggtagcaatgtgcactttaaacaatttggatattggaatgcagtctcatactgagtgatttgagtagaaccactgatgatgattttataaattgtgtgaagcgaatttcccatttggcaatcatttactgatttgcagtgatgaatatttttatgagaatttaaacttagcaagaatggccatggaggcaaagccttcacccagacccatcccactctcctgtgatccaggtggtccaggagcccaggacaggccttttctgtgggccctggccagacagggttacctggtgaggtgcagagagtccctctagtggccattttgtatggtagttgctaatgcagaacaagttctgtcttgggcttaaattgactgaagactttagggggaaagaatagtaaatgcatgtaaacaaatggggacactctgttcaggagaataatccgactggcatttgtggcagtttttgaaatgtaaatgtattcatgtgtgttcttgtaaatacgtgtcgctcagatgtcctttgaagtgggagggaatcaatccggggataatttcaaatggaatagagtattttgatattgttcattcagagggtgatgtgtacatatctatattgtatatatgtgatgaaaatgcattggctttttgtgcagatacaacctgctctctgtactgctgttggacagtcagtgttttaatgtttctacagttttgctattgcacgatttcatattttgcctctatgatgaacggcaaccattatttgtaactgtttagtgctgtaaagaaatattccaagtgtcattaggattgttgctgccagaactgatatgcatgaatggcacttaaaataaatatattatgttaactctatttacaacaaaaaaaaaaaaaaaa

SEQ ID NO: 288487 - DNA, 1000 bp, Homo Sapiens
aaccatctggacctttgcagaagttagagattcagtgcccccctttcttaaaggggttccttaacaaccacaaaaatccttatttctgcagtggcatagaatctgttaaaatttaattagaatcacaaatttatctcagaagctttttaacagttggtgaaatgtgcttgtccaacaaagcatcctaacagggtcgttcccatacacatttgacctggtcagccttttccaggtgaatagccccagttctgacataaagaaagttttatttgtattttactactgtttggtcaattttgatatataactggttacaaacagagccttactatttattagtggggaaatgattttaagaccgtccttttcagtatttaattctgacagatctgcatccctgttttgttttggattatttctgttttggaaaatgctgtctcatttaaaactgttggatatagctggatcctggataggaaaatgaaattattttttcattgtgttttttaattggggtgatccaaagctggcaccttcaggcacattggtctcatagccattactgtttttattgcccttctaagatcctgtcttcagctgggtcagagaaaacttcttgactaaaactggtcagaactcatcacagaaatgaaatacagtggtctctctctcccagaactggttgcagctaaaacagagagatctgactgctggctataggattttggacttaatgactgaaattgcaaattgtcctttttcttggcattacagattttgccaaaataactttttgtatcaaatattgatgtgtgaaagtgaaggagctagtctgctgaaccaggaatagtttgagatattgaactgtcatttttgcacatttgaatactttgcaggctggctttgtataaacttatcctctggtttcctatatgttgtaaatatttagaccataatttcattataaataaatctataaatattcaaaaaaaaaaaaaaa

SEQ ID NO: 288488 - DNA, 1000 bp, Homo Sapiens; identical to SEQ ID NO: 117107

SEQ ID NO: 288489 - DNA, 1000 bp, Homo Sapiens; identical to SEQ ID NO: 222348

SEQ ID NO: 288490 - DNA, 1000 bp, Homo Sapiens; identical to SEQ ID NO: 117108

SEQ ID NO: 288491 - DNA, 1000 bp, Homo Sapiens
tatattgagtttaacacctgtgtgattaaagacaactttccaatgtagtatctgtagccatgtcccctaatggctattagtgttcatggttagtgtgttgaagatgagccaggtacataacgcggcacattttctgcaggtcagcagtaaggtttcaaggtacagttatggaggaaagaagaaaatgacacattgataacacaggtctttattcccttttgaatgagacagtttttaaaagttgatttataaatacaaaaatacattctccaaagatagtatttccaaactgttatatacccatctactcccaacatggatataagttttttaaaaaaatagttgtatataacatacatatctgccccagtgttacttcacaggcctatgccctacgggaactccactctcccagccccactttttctcttggttctcccacattcttattctcccacatccctacccacgtttgagctggaaaggatgtccctaccctaggcatgaggtatattttattctgggcaccacacatttgccccatagataacaatacacgtgatgatgtcactagtactacctttctagtatttacatacttaaaagtagtaactagaacagttatcactggaactaagaattttccccacagaggtgaacaggaccaaggaactaaaatttcaggaaacctgtttaatttcttttgtatctttgaaaagttagttttatatctaagatttcttcacataggttataattcatctgtatgttcaagcttttatgtaaaaatatatagtgccttcagttttaacatagtttcacatgttctcagaactgctaaattcagtgctaccagtaaggcttaataagtagttcattgaccctgtaagataggagcactcagctctgtcacaatttgttgttaaacacatcactcaatgtaagtataaaaatatttattgataaaaaataaacttataattcagcaaaaaaaaaaaaa

SEQ ID NO: 288492 - DNA, 1000 bp, Homo Sapiens
cccattcgtcaagctctggctgaaaccggacatgggaaagaaggccaaacacaagactcaaattaaaaagaaaaccttgaatcccgaattcaatgaggagtttttctatgacatcaaacacagtgacctggcaaagaagtcactggacatttcagtctgggactatgacatcggcaagtccaatgattacatcggaggctgccagctggggatctctgccaagggagagcgcttaaaacactggtacgagtgtctgaaaaataaagacaagaagatagagcgctggcaccagctacagaatgagaaccacgtgtcaagtgattaggctagtgcccaggtccccatctccatgtcccgggtcccccccagcctgctctagctgcccaccgcaccctgatctctcttctctatgcctacctccccccataccctgctgatctccctgagcctgcctttgagcccccgtcacgttgggcactgctgccaaagactccctcctccctgatgctgggatgtgggctctgaatacagcccctctctcatccctgggatggagcaatggggatggggttggggagacgtttacaaagaggttgatcatttaataacctctcagtttgggtaaattacaaaggttcttcatcatttaggactgtttttagaccctcctagccttgaacacacacatgtacacacacacacacacacacacacacaccctttcattccctgtgttgtgtctctgtatatccccagttgtcagcagacccggacaatgctgtgagagaagcattggggcacaaatagagcctccgggctcccactgccccctgagatgtacaccctgattgccaggaaaacagactgctgtgttcagtaacacaccctccctgctccaagtgcaccaggatgcaaatgcacagaattcaccaggggcttggacgctctcctctttccgaatgtcacctgtgtgcttcctagcaaaaaaaaaaaaaaaaaa

SEQ ID NO: 288493 - DNA, 1000 bp, Homo Sapiens; identical to SEQ ID NO: 222349

SEQ ID NO: 288494 - DNA, 1000 bp, Homo Sapiens
ataacctatctcaggctaaaatgtgtggacttgtacgagctcttgtcattgacatggcaagctgatggcgtgcggtggctgcggggtatcagggccgggagccctttgggaggaagggaggcgttagaggagctgccttcggaggctcagggagtccctttggagctggttgtttccttggccctgcagcgcactgctcggggctcccaaggaggttgtgtgtatggttcttaattcatcaggacaaagacccccagcatgtgtgtaccctgggacccgatttctctgggcccacatctatctccaatacctcagcctcagatcagacccttttttttttgtctttcttctcttaatttttaaatgcctcttttcttgagcattccatctctctttttgaccctctcaggactgggcttagctgtccagagccctgccggagggtgctgggggctgtccctctgcaggcactgtgttttcctcaggggctgtcctcagaacacccctcctgctccctggggctcctcagggagccatttcagctggagtctcaggtctcaaaaacaacttctccaggaggccaaaaaaagactgggttggcttctggtcctcatgacggcttttatcctcctgggacactttgggtatattcatgggcattgtttccatctgtcttttctacctgtgccacccctgccctgattccacggctgcctcaggcaggcaggcaaggagctaggccggtgcccggccctggcagcaaggggtctttgtgcagttggagatgctgccgttgtggcagagcgtcctgcagccccgcttccatcagcaggctctggggtgggggctttgcaggggatgctctctgatgtttgttccgttgtttaaataaaatgcacttatttttgtttttttttttgcaagcaaaaaaaaaaaaaaaaaaaaaaaaaaaaaaaaaaaaaaaaaaaaaaaaaaaaaaaagaaaaaaaaaaaaaaaaaa

SEQ ID NO: 288495 - DNA, 1000 bp, Homo Sapiens; identical to SEQ ID NO: 117109

SEQ ID NO: 288496 - DNA, 1000 bp, Homo Sapiens; identical to SEQ ID NO: 222350

SEQ ID NO: 288497 - DNA, 1000 bp, Homo Sapiens; identical to SEQ ID NO: 222352

SEQ ID NO: 288498 - DNA, 1000 bp, Homo Sapiens; identical to SEQ ID NO: 117110

SEQ ID NO: 288499 - DNA, 1000 bp, Homo Sapiens; identical to SEQ ID NO: 222354

SEQ ID NO: 288500 - DNA, 1000 bp, Homo Sapiens; identical to SEQ ID NO: 222355

SEQ ID NO: 288501 - DNA, 1000 bp, Homo Sapiens
ccatggatgactcttgtgctgcattgctagccaaatctggcataatccctgcactcattgaattgctaaatgctcaacaagaagatgatgaatttgtgtgtcagataatttatgtcttctaccagatggttttccaccaagccacaagagacgtcataatcaaggaaacacaggctccagcatatctcatagacctaatgcatgataagaataatgaaatccgaaaggtctgtgataatacattagatattatagcggaatatgatgaagaatgggctaagaaaattcagagtgaaaagtttcgctggcataactctcagtggctggagatggtagagagtcgtcagatggatgagagtgagcagtacttgtatggtgatgatcgaattgagccatacattcatgaaggagatattctcgaaagacctgaccttttctacaactcagatggattaattgcctctgaaggagccataagtcccgatttcttcaatgattaccaccttcaaaatggagatgttgttgggcagcattcatttcctggcagccttggaatggatggctttggccaaccagttggcattcttggacgccctgccacagcatatggattccgccctgatgaaccttactactatggctatggatcttgataaagtatctgtttccatgtgtaatctcagcttagaagaaatctgtgtgggttgggttaattttggatctttgcctaataatgcatgttgatgttattgtgggtctgtgtttgtttttatttttatatgttgttagctgcagattaaccccagcccctctgtcttctgttaagtacagttgatactgacattgttcactcatcaaaccacatcttgatgctaagtaacatttcccatgagcctcaaaactgaatgctgaaaagctactagactggaaaacaaacactgcattatgtatgttaagtgactaatttaatttcaattaaaaagcgtaaagtgaaaatgaa

SEQ ID NO: 288502 - DNA, 1000 bp, Homo Sapiens; identical to SEQ ID NO: 222359

SEQ ID NO: 288503 - DNA, 1000 bp, Homo Sapiens; identical to SEQ ID NO: 117112

SEQ ID NO: 288504 - DNA, 1000 bp, Homo Sapiens
atatgaaaggtgaagaagaggcccactagaggcttcatactgagacccagatgggggaaaacagcttcctctctaaaaggaaaaacttgatatttatcagtctgagaaaatatttttttctaaagaaggcagtcagtggatcttaaaatgacaatctgtttttaaattggattctatgaaaatgcataatgcttatggtgaattctcaggctattctgagctcagaaaagtcccctgggcactaggtaaagcccagtgaatgtctcttggcatgggaggagttaaagaggttggaagggaagaggcatttgtggaattatgagttcatgcaaaactctccaggccaagtaggggtctagcctttaatgatattagtcaaaggcaattttagcaaagctgtgctatttgcttgtcagatgtacacaacttccttaaagtcaaatgtctgccttcagttcccttaaggtagttcttgcctctggggtgagtggctttcaaagccttttagcttttccagcacctcagccccttcacacatttacacataccaatttttttcaatagggtcacgttaagccatgctgtaagcattgtttttattttcaggcttagcctgagcacacttatttttgaaaatgatataatgtatatatatgggaggaaaggccacattttgtacctgttaatttttgtgggatgttgttcccattcttctttgtgagacagagagaatgtgatatagagaaatctggctggctacagtgtagatcagtattaggaatatttctaaagatcctgcttttttgtttcaagggttaaatggggcagacaattgcaatacttgtactaaacactggaatacaaatgcatgactcatatctatatatacagtatatgtacatatactgttcttggttttattgttccacttgaatatttctactgtaaaaaaaagacagtggttttgaaattgttgaaaataaatgtatttttgtacatc

SEQ ID NO: 288505 - DNA, 1000 bp, Homo Sapiens
tccgcaccgagctgtacggaatttggttgacttttatgagatgtttcaactacccagtcagggataatacaataaagcttacaattgtttggttcaccctgtcctttgggtactatggattatccgtttggttccctgatgtcattaaacctctgcagtccgatgaatatgcattgctaaccagaaatgtggagagagataaatatgcaaatttcactattaactttacaatggaaaatcagattcatactggaatggaatacgacaatggcagattcataggggtcaagttcaaatctgtaactttcaaagactctgtttttaagtcctgcacctttgaggatgtaacttcagtgaacacctacttcaagaactgcacatttattgacactgtttttgacaacacagattttgagccatataaattcattgacagtgaatttaaaaactgctcgttttttcacaacaagacgggatgtcagattacctttgatgatgactatagtgcctactggatttattttgtcaactttctggggacattggcagtattgccagggaacattgtgtctgctctgctgatggacagaattgggcgcttaacaatgctaggtggctctatggtgctttcggggatcagctgtttcttcctttggttcggcaccagtgaatccatgatgataggcatgctgtgtctgtacaatggattgaccatctcagcctggaactctcttgacgtggtcactgtggaactgtaccccacagaccggagggcaacaggctttggcttcttaaatgcgctatgcaaggcagcagccgtcctgggaaacttaatatttggctctctggtcagcatcaccaaatcaatccccatcctgctggcttctactgtgctcgtgtgtggaggactcgttgggctgtgcctgcctgacacacgaacccaggttctgatgtaatgggaaaaaaagccatccttcctgcgtttcttcctcctgccctg

SEQ ID NO: 288506 - DNA, 1000 bp, Homo Sapiens
caagatctgaaaggaaaactggagaaatgctgtaggcatcttcagcatttagaaaggaagcacaaagctgtagtggaaaaaattggagaagagaataataaagttgttgaagaattaatagaagaaaacaacgacatgaagaataaattggaagaattgcaaacactttgtaaaacaccaccaaggtcattgtcagcaggggccattgaaaatgcttgcctgccatgcagtgggggagccttggaagaacttcgtgggcagtacattaaagctgtaaaaaaaattaaatgtgacatgcttcgttatattcaggagagtaaggaacgagctgcagaaatggtaaaagcagaggtactgcgagaacgtcaagaaaccgcccgaaagatgcgcaaatattatttgatttgcctccaacagattttgcaggatgatggaaaagaaggggctgagaaaaagattatgaatgctgctagcaaacttgctacaatggcaaaattactggaaacacctatttctagtaagtcccaaagcaaaactacacagtcaggtatgtcaaagtgagtcgccaaatggtttttctatcttttcttctttagctatttaatattttcagtatgaagaaggcagggaaggtaaggagtgagagttaatttgtgaagttttgtatgttttacttaaactagaagtttacgcaaaaagagtacacagtttccaatttaagtaggcagactgagcatgcccatcagtttcctattgctgcttccatccctcgaaatgatagaaaagattttaaacagcaaataaagaatgagaaaaagaagaaattataagtgggttttaaaaagttgcagtgggccaggcatcatggctcacacctgtaatcccagcactttgggaggctgaggtgggaggatcccttgatcccaggaatttgaggttgcagtaagctatgattgtgccactgtactccagcctgggtgacagagtgaggccctgtctc

SEQ ID NO: 288507 - DNA, 1000 bp, Homo Sapiens; identical to SEQ ID NO: 117113

SEQ ID NO: 288508 - DNA, 1000 bp, Homo Sapiens; identical to SEQ ID NO: 222360

SEQ ID NO: 288509 - DNA, 1000 bp, Homo Sapiens
caagctgccatattttgagggcagggggagttttattctacaccctttaccttcctagataattatgtctaagtagttttatctttaatttcatggttaactgtgagccaaaatacaattggacaattagtctcattatttattgtgccccattgcaactttatggttcaataaatatataattttttacaaatgtaaaattttacatttaagcatttgtaaagttacagcaaaagatgtacctgttaatacacagaatgtgtacagattatttgttatgacaataaaacactcaaaataaatggtctttagcatctcaaattccaactgaaatcattttagtattaactcttcttcccaaagcaatgtctcatttcttggctgtgcaggtgatgccatgttatatccaataactagaaaaatcactgtgctgaacttttatgtttagcttccaagtatttttctaatgttttgcatttcaagtggtatcactgttaaatgccatttgttttcagattgtggccttttattattggctgctagatcctggtgtttctatgttcttttttaagcaccaaaaagaagatggggaagaaaagaaggaaaattttctgatataaatatgttgttcaaattatgagtattatttaaaaaagaaaaaggaacataacccaggagtctaagttaaatctaatattgttaatactgaacttgcaggtccaggttggtatacattccaccctctagaagtattttcttacagtagataagctgctcacattttgttttgaatgggcatctcctgaggaaatgtagcatgacattggtactaactgcatgtgtaaatacatcatactggcaaaccgtaaaatataaattatgtatcatcattcatgtagtatctataatttgtaacagtgggggggaaagatgacatggtatttaataatacaataaaaatattcttatcacttcctatccaaaaaaaaaaaaaaaaaaa

SEQ ID NO: 288510 - DNA, 1000 bp, Homo Sapiens; identical to SEQ ID NO: 117114

SEQ ID NO: 288511 - DNA, 1000 bp, Homo Sapiens
agtgtttgacaaagacctttctaaattgaaacggaatcgcaaacgtattaccaaccagatgactgacagcagcagagagagaccaatcacaaaacttaatttctaattttccatgaatacttttttttagaaagctcattagcagccctctaaagtgactagaacgtttcattacactgccttgcaatccaaacagtggcaattttttccttcatctgtgagtgaatgtgtgaacgtgtgtatgtaaatgtatgtgtgtatatattaaaaaatgtatatagatgtctgagtgttgtctggagacctatacgtatggttaaaaagatttatgttaatgtatgtgctccaaaacctttcgtgtatgcattcacattgagtgtggctcattttctttccccgaacgccatgactgttcagaagcacaatactatctcctgaaagagataagagacattccctagattcaaaggcaaaacagaagaaacaaacaaacaaacaaacaaagcttgcaaaatattttatggtttccaagcttgatatcctttaaaattattttcattgatggaactggagttgttggaaaaacatagatttaaaatgatttttgatagctgacattgtgatgttgatgtatcacatcagtaataggaccagctttgaatttctgacattggtgtggggatacagtctgtaaatgtttattgagaacatcttgcacacaatttgaattatgtagaatgtcaatcaagtttttgtatatttaaaagttggacatcaattttttcccctgatttcatcaagttatctctgccaagtgctcttgataatttcttcagatttttggaaaaaaacactatataaatgcaatccatgctttttttaaagaacaacattgccagagtatgcttgttctaacaatatagatatataaaccttaaaaataataaaatatctcacccaagacttaaaggaagaattctctgaagggataaagattact

SEQ ID NO: 288512 - DNA, 1000 bp, Homo Sapiens; identical to SEQ ID NO: 222361

SEQ ID NO: 288513 - DNA, 1000 bp, Homo Sapiens
gattttcaaatgtatttttaaacttgtatttgggtctccctttgacttcatgtgttctccctgttaatgcgtttgtatatagatttggtgacatttcccatgtacctattatgatctttctcccttgagttgttgtaaactgtatcagtatgaaatatgtgcatgccctagatgtgaaactcctcagcagctcgggttataatgtgtgtgtgtttcaccaagatgtcctttactgtgtcctcagattgcagtcacaaatgtagtcatttttactctctaactgttgagttgattaagagactttgcaaacgacaaagggatgaattccttactttaatctgttatcatttttcctatgtttccctctttgttcagaagcccagatgcatttttataactcagttttaaaaactttaaaatagttaccttgccttttaggatgttcttatcccacccataatgagagttgaaaggggatggatagctgctccccatgcccttcccactttttggaataggccgtgagggtgtgaggaagaaggctgtcttttgtacataaggacaaaattgtttgttttacataaattttgttacatatttttgctaatggctttgtatgtaacaagaagcgagttgccaaactacctgttgtacttttgaattttctgattgaattacagactgcgaacaacggctttcagaatgagggacttccatcagactctaatgataatagtagcacaaattgaaaacttccccaaagctttcacagaatattttctcataataaaatccaagtgaacagataattagaagaaacccttttccttcagggaaccaagcaactctattttagtactgacatgcattattttcactgtgaattcacttttttattgcatgttcagatgtccctctttgttttttttttttgtaacattaactgcaatgatgttcttcctggaattcatgaaaatataattaaaacacatttttaaac

SEQ ID NO: 288514 - DNA, 1000 bp, Homo Sapiens
cctttgtattttgtggtagttgaaattgtatcacttctaaacagcaaactgtttttgtttttaattagcagatatctgaagtactatttttgcagggtttgcacaggcccgtaactgtctactactttgatataatctgtatacatcctgtatgctgagctggtaaaatacattgtaaattacatattaaatattttatctgcttttacaagcgcaaggtgcaaaaatatatacaatagtctcattgatgactgtaaagtgaattaacatttggtgattatgcctagcttttttgactaatataaagatcatagctccccttcacttctgtcttaacttgaacatggcgtgtttaaattttcatacatactttacttgaattattgctgttgtcacatatttttgcctctgtgagttcatctgatgattgagcagtagcatttgccttttgggttttttgtttgttattatagaagagatgacttctgctgattttgctttagaatggttaccttagaagaatttgggtggctcatgttgaatttcacttctgcaatagctttcattttctcataggctttataagagatgggttcagtggtatgagcagaggaagagatcccagatagtagccagttaaccaagactcattcatatagcacgtagtttatgttcctgaggcagcacttttagatcctttgtgagcaagttctatttgttcattgcttgccagagatgaacacagaatgttctgtttcattttacaagaactatcctgagtttctgtggatggaaacattacatgtaatgcagatatagtgaacactggaaagatttattaaagaattatatttgtgtatactttataaattagtccctcattagatttttttttcttaagcataagactgaacttaaatgtgttaattttagtagaatcaggcactgctcgcagaaggaacacagattgtagagattaacataaattgttcttgttcta

SEQ ID NO: 288515 - DNA, 1000 bp, Homo Sapiens
tttactttcttggcactggaagggtagttctggaaagctactttgttgagagtctcattcttccctggagttaatagagtgattcacaatctttggggttttctcctcatcaaaagcatttcttaagtgcctatctaaaagcaattaaagactgtgtctgccctttagaagctaagaatttgattcatgatgcaaattaactagataatttgcaaagtacccttgagattgaattttctctattatatatttcccatatttcaggtgaataatttaatttaaatgacaaaaccctatctagtctactgggcataatgacattttctttaaattagactctattttgaattaaaagagttttattataaaccgtgtgtttttggtttttctaagtatatagaaagcttgtataattcagatttatcaatttcctgatttaatgtagactttgacttttttattaaaaacctttgtattaaagcaagttatgttatttttcttttatgcatttattactaacatagctttaaatctttaaatgtattgaagcattgtgctgtctgaaaataaggaattgcttataaaccagccacttctgaatacaatatgtagctgatttaataagctagttagtgaatggaaaataagtgtggagtattaaaaatgttctttggttggtaaggcctaagatagggtttcatttatttctatactttttctgttttttaaacacctgcatatttttatgtaaatctctaaatttaaaatattttaagtacatttatttttggtgttttattgtataaaaccttagacaatcaatcagtcagtctttactgacaggagcagcagctatctgtcttttgctgatctacaaataaatgaattgagaatttagtccatagaggtccctggctaccaaacacattctcctttgaattgttaaaattcagaacattcaaaataactgttttgctacaacccaaaaaaaaaaaaaaaa

SEQ ID NO: 288516 - DNA, 1000 bp, Homo Sapiens; identical to SEQ ID NO: 117116

SEQ ID NO: 288517 - DNA, 1000 bp, Homo Sapiens
aaggtgtacatcgtgcatggcgtccaggaagacctccgtgtggatggccgtggctgtgaggactaccgatgtgtcgaagtggaaactgatgtggtgtccaacactagtgggtccgccagggtcaagctgggtcacacagacatcttggtgggagtgaaagcagaaatggggacgccgaagctggagaaaccaaatgaaggctacttggagttctttgttgactgttcagccagtgctacccctgaatttgaaggtagaggaggtgatgaccttggcaccgagatcgctaacaccctctatcggatatttaacaataaaagcagtgtcgacttaaagaccctctgcattagtcctcgggagcactgctgggttctctatgtggatgtgctgcttctggaatgtggtggaaatttgtttgatgccatttccattgctgtaaaggctgctctcttcaatacaaggataccaagggttcgagttttggaggatgaagaggggtcgaaggacattgaattgtcagatgacccttatgactgcatacgactaagtgtggagaatgtcccctgcattgtcactctgtgcaagattggctatcggcatgtggtggatgctactcttcaggaggaggcctgctcgctggccagcttgctggtgtcggtgaccagcaagggagttgtgacgtgcatgaggaaagtggggaagggcagcctggacccagagagcatcttcgagatgatggagactggcaagcgtgtgggcaaggtactgcatgcctccttgcagagtgttctgcacaaggaagaaagcctggggcccaagagacagaaagttggattcctgggatgatttgcacatcaactgctcaactgtggattgttttttacttttccttttaaaccggttcgtatatatttttcttcgctgttacgaatttacagcagcatttgtacatgtaaaattaaaggctattttctggtaaaaaaaaaaaaaaaaaaaaaaa

SEQ ID NO: 288518 - DNA, 1000 bp, Homo Sapiens; identical to SEQ ID NO: 222363

SEQ ID NO: 288519 - DNA, 1000 bp, Homo Sapiens; identical to SEQ ID NO: 115409

SEQ ID NO: 288520 - DNA, 1000 bp, Homo Sapiens; identical to SEQ ID NO: 222364

SEQ ID NO: 288521 - DNA, 1000 bp, Homo Sapiens; identical to SEQ ID NO: 117118

SEQ ID NO: 288522 - DNA, 1000 bp, Homo Sapiens
gctgaagcagcagccaccagccgttcagtttgtgccacctctccctgagtggaaaacatctgcagtccaaaggatgggatttggcaaccttaacaaggtggtgttgtgttttgatcgggtgttctgggatccaagtgtcaatttgttcgggcatgttggcagtacgactgccagcaggggtgagctcttcctcttctggaacctctataaagctccaatactgttggcactagtggcaggagaagctgctggtatcatggaaaacataagtgacgatgtgattgttggccgatgcctggccattctcaaagggatttttggtagcagtgcagtacctcagcccaaagaaactgtggtgtctcgttggcgtgctgatccctgggctcggggctcttattcctatgttgctgcaggatcatctggaaatgactatgatttaatggctcagccaatcactcctggcccctcgattccaggtgccccacagccgattccacgactcttctttgcgggagaacatacgatccgtaactacccagccacagtgcatggtgctctgctgagtgggctgcgagaagcgggaagaattgcagaccagtttttgggggccatgtatacgctgcctcgccaggccacaccaggtgttcctgcacagcagtccccaagcatgtgagacagatgcattctaagggaagaggcccatgtgcctgtttctgccatgtaaggaaggctcttctagcaatactagatcccactgagaaaatccaccctggcatctgggctcctgatcagctgatggagctcctgatttgacaaaggagcttgcctcctttgaatgacctagagcacagggaggaacttgtccattagtttggaattgtgttcttcgtaaagactgaggcaagcaagtgctgtgaaataacatcatcttagtcccttggtgtgtggggtttttgttttttttttatattttgagaataaaacttcatataaaattggc

SEQ ID NO: 288523 - DNA, 1000 bp, Homo Sapiens
aattcaccagaaacaagggcagaaaaggaaaaattctcaacctggtgttaaagtagcagatagaaaaatacttgatgacacagaagacacagttgtcagtcaaagaaagaaaattcaaatcaaccaagaagaagagagattaaagaatgagagaactgtgtttgttgggaatttgcctgttacatgtaataagaagaagctgaagtcgttttttaaagagtatggacaaatagaatctgtacgatttcgttctctgattccagcagagggaacgctatccaaaaagttggcagcaataaaacgtaaaattcatcctgatcagaaaaatattaatgcctatgttgtgtttaaggaggagagtgctgccacgcaagcattgaaaagaaatggggcccagattgcagatggatttcgtattagagttgatctcgcatctgagacctcatctagagacaagagatcggtttttgtggggaatctcccttataaagttgaagaatctgccattgagaagcactttctggactgtggaagtatcatggccgtgaggattgtgagagacaaaatgacaggcatcggcaaagggtttggctatgtgctctttgagaatacagattctgttcatcttgctctgaaattaaataattctgaactcatggggagaaaactcagagtcatgcgttctgttaataaagaaaaatttaaacaacaaaattcaaatccacgattgaagaatgtcagtaaacctaagcagggacttaattttacttccaaaactgcagaaggacatcctaaaagcttatttattggagaaaaagctgttctccttaaaacgaagaagaaaggacagaagaaaagtggacgccctaagaaacagagaaaacagaaataacaaccaggaactgctttttcttttcctgctgagtactgctaataaaagtgctattatctgctgatagcatcgtctgctaaaaaaaaaaaaaaaaaaaaaaaaaaaaaa

SEQ ID NO: 288524 - DNA, 1000 bp, Homo Sapiens; identical to SEQ ID NO: 117119

SEQ ID NO: 288525 - DNA, 1000 bp, Homo Sapiens
ctgggattacaggcacctgccaccatgcccggctaatttttgtattttagtagagatggggtttcaccatgttggccaggctagtctcaaactcctgacctcaggtgatccacccacctcggcctcccaaagtgctgggattacaggtgtgagccacagcgcctggcccagtgtaatatttttgaaagaggagggacaattgtgaaatcagtaggttatctttaatctttacactacatgcagatccatagtatcctttgtagtgttgtaaatacttttgctttgaaaactttttcattgtcctaaatcaccctgactctgaccagtctttcagttctccaaaagcccaatttaattgtatagttttgtcatggcttcatataataaagagcctattttaagttgaaagtagtagtcagaaaattgttaatttcctaaagctcaggaaactagggtgtcactttttttgcactgcagcatatacactaactagcttattaaaatttacaaaatgtctttttgaatgtatcaaggatatatttagtttgagtggaatttgtcagcagatatcagtaacttattgccgcttatattgtacaatgttaaacttcaattcctgtaacctggttagtattaatgtcagtgactaaaaaacttagagttagttttagggcactttttattttgagagcatgaagtgtggaatgtgtcactacgattgttgataaagctgaggccacttgcaacttgattttttaaatgaaatagataaagtctttttgaataatatagtatgcactgctatttgcttgattatgtaatgtcaaaagtttaactatattccaagtacaaaaacatactggattacattgaggatgttgaatagcattcatgatggctttgttttggtttggggcagctgtcaccagctaaagcaatgttgttaaaattagctcaataaaaatgtctttaaaatgtaaaaaaaaaaaaaaaaaaaaaa

SEQ ID NO: 288526 - DNA, 1000 bp, Homo Sapiens
tgttcctgtttttcagagtgttacttttaagaatgtctccccaacatcttacctcactctggcctaccatgattacagaacttgtacaagtatttttactgatggagcaggaactcactgctgatgaagatatttcacggacttcagggccctctgtggctggtctggagacaacgtacacaggaggtaatggcttctctacttcatataacagccagcggtggttaaacctctatctctctgcttgcaaatttttggatttggctctcgcattgccctctgaaaaccttcctcagtttcagatgtaccgatgggcctttattccagaagcctcagatgattcaggtttggaagtcagaaggcagggtatacatcaacgagaatttaaaccttacgtggtacgactagcaaaacttcttcggaaaagagcaaagaaaaatccagaggaagacaactcagggagaacattgggttgggagccagggcacttgctgctcaccatctgcaccgtgcgcagtatggagcagctcctgccgttcttcaatgtgctcagtcaagtcttcaacagcaaagtcacaagccgatgtggaggacactcagggagtcctatcctctactcaaatgccttccctaataaggacatgaaactggagaaccacaaaccatgttccagcaaagccaggcaaaaaatagaagagatggtagaaaaagattttctggaagggatgataaaaacttgagcaccattgctggttccatttagcttacatgtaaatgtaattatttaaaacacacacactgctctgcgttgtatagtttttccttttttgtatgtaacagaacacatttcagattgtatttaatttaaatatttgtatataagagcaaatgtctgaatgtggcctgaatcaagtttaaatattgttggctcatactgattatggtgcctaagagagctatatatatacacatgtaaagtcctaaaaaaaaaaaaaaaaaa

SEQ ID NO: 288527 - DNA, 1000 bp, Homo Sapiens; identical to SEQ ID NO: 222366

SEQ ID NO: 288528 - DNA, 1000 bp, Homo Sapiens; identical to SEQ ID NO: 117120

SEQ ID NO: 288529 - DNA, 1000 bp, Homo Sapiens; identical to SEQ ID NO: 117121

SEQ ID NO: 288530 - DNA, 1000 bp, Homo Sapiens
tgtgacactgaacctggatggattatagaggagccctcacggctgatcaataatgttgcaaagggagactacagggatctcacgacgaatattctgatacaatactcaacctcggtatatatatatgtgtataaatatatgtatatcccagcggcactttatactgttcactgtacaaaagcttacagttttccacaaggactttaataactagctgggaaaagacgatgtaattatttcggggctctgcggaaccttctctgtacagcgccccctttctgttgtgctattggttgcagctgccatgctcagaatgcgttttgagagctgaagcaaggtgcttgcagtcacctgaggccgtccgtgtggcccagggccccagctgcctttagggcccccattgttcataacagcatatgcatttccccaccgcgttgtgtctgcagcttctttgccaatatagtaatgcttttagtagagtactagatagtatcagttttggattcttattgttatcacctatgtacaatggaaagggattttaagcacaaacctgctgctcatctaacgttggtacataatctcaaatcaaaagttatctgtgactattatatagggatcacaaaagtgtcacatattagaatgctgacctttcatatggattattgtgagtcatcagagtttattataacttattgttcatattcatttctaagttaatttaagtaatcatttattaagacagaattttgtataaactatttattgtgctctctgtggaactgaagtttgatttatttttgtactacacggcatgggtttgttgacactttaattttgctataaatgtgtggaatcacaagttgctgtgatacttcatttttaaattgtgaactttgtacaaattttgtcatgctggatgttaacacatcttactctaaataaacaaggtgttgccacatttgtagcacgaaggatctctaaaaaaaaaaaaaaaaaa

SEQ ID NO: 288531 - DNA, 1000 bp, Homo Sapiens; identical to SEQ ID NO: 117122

SEQ ID NO: 288532 - DNA, 1000 bp, Homo Sapiens; identical to SEQ ID NO: 117123

SEQ ID NO: 288533 - DNA, 1000 bp, Homo Sapiens; identical to SEQ ID NO: 222369

SEQ ID NO: 288534 - DNA, 1000 bp, Homo Sapiens; identical to SEQ ID NO: 117124

SEQ ID NO: 288535 - DNA, 1000 bp, Homo Sapiens; identical to SEQ ID NO: 222370

SEQ ID NO: 288536 - DNA, 1000 bp, Homo Sapiens; identical to SEQ ID NO: 117125

SEQ ID NO: 288537 - DNA, 1000 bp, Homo Sapiens; identical to SEQ ID NO: 117126

SEQ ID NO: 288538 - DNA, 1000 bp, Homo Sapiens; identical to SEQ ID NO: 222371

SEQ ID NO: 288539 - DNA, 1000 bp, Homo Sapiens; identical to SEQ ID NO: 222372

SEQ ID NO: 288540 - DNA, 1000 bp, Homo Sapiens
agattttgttccattggcgttgctctgttgaatttaatttcagtcttcctgattcttcccttctgtaaagtgtacattaccaagttccttgtttttttatatatatatataaatatatatatatacaaactgtactctttttgcctttgtacattcaggcaagaagagaaaataaatctttttaagagacaatcacaaatctgtgagggctgctggttatttctcctggagtttgctgctgagctgcctcttccttcctcccaattttcctgttctccctcagctctcctgatcttcctggccctgctccatatgcatcctcagcttcactttccctggctgatggcaagctgttgaatccagtgtccagactacctgccttgtaacccttttctgcccagcattgttttctggcttggccactggcttagcccaggagctttactctgtgccctggcctcccctctcttcacctttagatttccattcaccgaagtggctttggacccctgggtactctgggacctgtttcctggaggccctggcttgggacactcacctgtgaaactatgcagctgggagctctctgcctaagagtttgcactatttaaacctgcctgggagttaggacggatggttttaggaatgaccggaaaactacccctaaaactcccccgacattccagcctctagaatgctctgatccagagctcagtggatgattcccagctggtggactcctgtggctaccccatcagaacaagggctaagggtttatgggtcaagagtatttgatcagaattttaaagggtggtatactctgaaacacagcccaaccaaaccattgtttggccgctttctcttttcctctaccttcctcatccccacttttttccctttctctctacttcctcttcttaattggctttggaattgaaatatatttttaaattatttgttgtatttattgaataaagtttttaatgtccctgttcttaaa

SEQ ID NO: 288541 - DNA, 1000 bp, Homo Sapiens; identical to SEQ ID NO: 117128

SEQ ID NO: 288542 - DNA, 1000 bp, Homo Sapiens; identical to SEQ ID NO: 222373

SEQ ID NO: 288543 - DNA, 1000 bp, Homo Sapiens
ttcctgatgggctttctcttgaagtccaaaggcgtctgcattgtttcctttctttgcccatccatgaatgttctgttttgttttttttaataagaattccggctgatttttgtgaggcctgtttaaattgactttactttgccttttgtgtttctcaattttatctagaaatctttctgactttttccatctcttgcttcaaagtaagaggggaactctccttgccgactccaccttataggtacatttggtgttttgcactgggaagaaataggatccatccttagctgaggcttgaggactgatccagcctctcatggcttccctccaaagtaacttagggttgagggatctatatgtgatgtcaaaacttactttaaacctctagtttcgtgctgtcatttattaggctgggccaccaaatctttgtttcaatttatcagaagccaagtgcatactagcgtcttgtttgttgcccattgcctatacttttcacctgagatgtgtgagttggggccttttaaaaactactgaattgtctgagccttgaagacatttccagggagaagagataatctctcatttcacccacaggctggtctaatcataacctagttaaagatgtccttgtttaagaaccccattatttatttttagtttttaatataaattaacatgtgggtcattatatttctccttaaatgaggaaattttaaattttattgatctaacctttgaagctttaaaaaaggagaaagagggtaggggtgggaaactggcatactgtgtgtatagcactgccgattggctaggccactgtgtctctgctacaaattaaagaaatcctaaaagttttccttggtcatagagttggggaatgacagaatttttctttgttgtgaaatgtatgtacagagtagaccatctctagccctgtggtgaaagaggtacactcgaatgtttgcataaagcaagtgacaaatgaaaaaaaaaaaaaaaa

SEQ ID NO: 288544 - DNA, 1000 bp, Homo Sapiens; identical to SEQ ID NO: 117129

SEQ ID NO: 288545 - DNA, 1000 bp, Homo Sapiens; identical to SEQ ID NO: 222375

SEQ ID NO: 288546 - DNA, 1000 bp, Homo Sapiens
tctgagcagagccaccattttttataatttctaataaccaactccagaactaggagctgatcaactctttgttttcctctccatctacttttccctgtgcataatatccatccaaaggacaacagtggcaaagctgaaatttttatacattcaactcatgattcacatgtggcatcagtcccatcagccggaactagcctagacatacggtgcaaatatgacacttctaacgattaacaacagcaagaaaacacctgctgctgatgcaatgcaatgcatcccaatggttgtggggattgtgggctcaactcaagagaagtttaggagggggagcatccctagtgaatactcacaccacaagaaggacaaacttgtgcacatgtccaagaaagaaagcttcttgattgaggtagcatgaaggatgaggcttcagcccccattgtcttatgtagaatgtggcaatgccaactggagaaagggaagaaggacatattaccttggtttgaatccctgagttctgtactgttctgttttgtttagtctagccacagttcttcacaaaggaaaaaaaaatgtgtagatgataccatgacttttgttaaagccatgacttttgtttgcttggcagacaaaccctttttttaaaactttgatatttttttttcacattttttttccttttcctttcttaatcatggagttcaagttcctttgcattcgattgtccatcgggaccacactaggaagctgcagagagtgatggtgcttgttagggatcaagggcaacatagtacttctccttcacccatagtaatcctcctggggcagaaacataacaccccaaaggcacgttgatttgtatcaaaataaatatccagtttcttttagcattcagtgaaaacatatctcagaaaacttcatgttgtcagaaaaacagctgcaggctccaaagacagcctaacctctcaactacatttgaaataaacccaaccataatggt

SEQ ID NO: 288547 - DNA, 1000 bp, Homo Sapiens
ttaaaagatgatagtccccggagtagtacagtatcccttgaaccagctcctgtaactgtacatattgatcatcttgtggtagagagaagtgacgatggctcttttcatatcagagattctcacatgcttaacactggaaatgatttgaaagaaaatgtcaaaagcgattcagtgctgctgaccagtggaaagtatgatctgaagaaacaacgcagtgtcacgcaagccactcagacaagcccaggggttccttggccttctcagtcagctaactttcctgagttctcctttgacttcactagggaacagctcatggaagagaatgaatctcttaaacaggaactggctaaagctaaaatggctcttgcagaggctcacttggaaaaagatgctcttcttcatcatataaagaagatgacagttgaatagcaggagtggcagtcaaaactgaaattatagctctggagtaggaaggttatatttataatgtggatgttaccagttaggggaagacttttattttcatgaaaagacaataaaacaaaatggaatgtgatgaagtggtgactatttcaaagccagtttagaaagtattagtacgggcattacaatcttttggttgttttgtgttttggggcttaaccctcttttaagctgttgtgatctagggaagtcaacacatagtgtaaaataattacatgcctaatgaaaagaagatgtcatttcctaattttgatatctcattttcggcattttttaaaatgtaaaaggaaaacctcttgtgttcacacagattgctgaattgatttctccatatttgttaataatttactattatttacaaagattcaaatgcttttatgactaatgtaaaatgaaaagaggcttacattttaaatgttattaaaattatgtacttaaatctataattatttaattattgtaaaaagtccaagcagatcaataaactatataattaaaaaaaaaaaaaaaaaaaaaa

SEQ ID NO: 288548 - DNA, 1000 bp, Homo Sapiens
gttttctagcttctactaagatatttctttccctaaccatcatacacttggcatgtttcattcccatctcctttcccctcaccttaaaggagactacccctttgccccatattgtcaacctaattttctctcgtactctctctagtgaatgatgtgctaccaagtatatgccaggctgtgagaggattatactgagtagtagaaagaagctaatttgaaataaaaattatttgtataattaagaaagcagattagatgcacatggtcaacaggaagttatccatatgtctgctagttagattcaaaacatcataaagatgatagcatgtcaatatattagcctagccattatgttagcctttgttaggtgggcagcttttctgctttttcccttcctctgtggtgacaacggaggaaatatccaacagaaatacatctaacagggaaattgggatcatagtttatatgcatctgatttgaaaggagtattgaggaaggttttcatatatgatctatctttggattaaaaagaacatttatgaaatcaagccttctaacactagttataattgagaagcaacagtaactccgtggacagcaatcaagcttaaaattgtaaataaatatggggataattcagttgttgcaaaaaaagggcagaattcagtagaataaagtccttttctcttacaggtattaaatgaggacagagaacctcaggtgttcttatgctagtgcttgctgagtgcatactaagaaagcaattccaaatagatgtatacatctagagagagtggtattagagattcagtgtatgtatttatttacatgagaggaaactggaatataatcccataaattatcaccttttatgactggaaaatatttgccaatgaagaaatggtctgtaggtatttgtcttaagatttttggctgtttaataaaaatgtaactttaacggtttaaaaaaaaaaaaaaaaaaaaaaaaaaaaaaaaaaaa

SEQ ID NO: 288549 - DNA, 1000 bp, Homo Sapiens; identical to SEQ ID NO: 117130

SEQ ID NO: 288550 - DNA, 1000 bp, Homo Sapiens
gtgtcccaaacatggcacagactttttggaatataaatgtcgctactgctgttcagtggctgtttttttctgttttggaacaacacatttttgtaatgcttgtcatgatgattttcaaagaatgactagcattcctaaggaagaactaccacactgtcctgcaggtcccaaaggcaagcagttagaaggaactgaatgtccactccatgttgttcatccacccactggggaagagtttgctctgggatgtggagtgtgcagaaatgcccacactttttagaacacgcagatcctttgtctacagagagaaaaattgccttcatcccccaagaggatgcggtgaagtttaaactctgctcaggataaggacgggaccatttttacatccatgaaaatgaaccattcacagtgcaagaaggataccaaataccatgtacataattcttgctatgaaaagtttccccattattttggtttatcttcttttgaacaaatgacatcaaacttgtgaggtgtttgcatgtggccattaccgtcattggcctgtgaagcattggacatttatagataattgatataaaagaatcgccatgcccatggactaagaacgatgctggctttcaagcaaaaaagaaaaataatcattgtttattgtatactgcctttttgtaatcctgtacaattgcatcacgggtggggataaaaagaggaatattctggtttatttcctagactgttatttaaaaaaaaaaaaaacattgtgttaggacagcatataaatgtaataagtatcacactgtatataaacatatcaatgtttgtcctgtataagaattactaaattacaaatgcaatttcatttaaacttctaggttaagtttgagcctgaaattttaatgaagtgcaatactgagtgtgcctcattatcttgcagctgtaaacatattggaatgtacatgtcaataaaaccactgtacatttttatacagtgataaagtct

SEQ ID NO: 288551 - DNA, 1000 bp, Homo Sapiens
atcatcgccgcccaggaagaaatgctaaagaaagagcgagaactggaagaagcaaggaaaaaactggcccaaatccgccagcagcagtataagtttttacccaccgagctgagggaagatgagggctaaaggtgcgagcccagatggcgagccccaggggatggccctggctgaactggacagacagtgttcctgagaggctgggcacttagctggaaaccgcccacctccctcccgggtgagcctggagccctgcgtgcttgttctcacatctctgtcccgtcggcactggctgcatgatcgtgatgtcacacggtacaatgtcctacccacaactcctctgccgcctcccctcatgcctcaccgtgtctcaggagagaggggtgcacgtttcatggactgttaccaacaaagaaaagtcagtattatgttgttctcagacactttggcttttgttggtccttctcttaggcctgctcctggacctctttatgatattgtgatagggaaaaaaatcattgacgtcatagaatattcttcttcctctcaggagaagacggaagctggagttggacatggttcataaaagccagaaacacaaacccgtgtggactccgggagggtgactcaggtcctccttccatgtcttgagcactggctcacccagggggtgaaaaattcccgcccctgtttgcacgctttcttgcctccgtgtgtaagctccttgtacaacccagacccatcttgtattttgtggcccagaaaactgaacgattattttgttcctccgtagtccaaagggcagagttgcggaaggccgtcggggcttggtgagcaggggctgtaatacagtctgtgggctccttaccctgcagaggctgtttcagctcacacagagtcatccacacaaacccacggctcccagttgacagtcagtggaatgctcgtctccttagcgtccagggtggggattctgctggaataaagagcttcctcagtg

SEQ ID NO: 288552 - DNA, 1000 bp, Homo Sapiens
taagaatgaatatgtggccgaccctgtataccgcacttttttgaagagctctttccagaagaagtgccagaagagacagtagtctgcatacatcgctgcaggccacagagcagcttgggttggaaaagagaagatgaagggacatccttggggctgtgccgtgagatttgctggcataggtgacagggtgtgtctctgacagtggtaaatcgggtttccagagtttggtcaccaaaaatacaaaatacacacaatgaattggacgcagcaatctgaaatcatctctagtcttgctttcacttgtgagcagttgtcttctatgatcccaaagaagttttctaagtgaaaggaaatactagtgaatcacccacaaggaaaagccactgccacagaggaggcgggtccccttgtgcggcttagggccctgtcaggaaacacacggggacctctctctctagctccagcaggtggcacctcggtacccagcgggtagggcgataatttatatattttccacagtcagggaaggactctcacttatttgtttcaaattgcagtttttataaaacatttttaaaacacaaatggcatgtatgctaatgagatttacccgtgtgctatctgtatttcccttgtacagaacttttacatttttgaatattcctattacttttgattgtgtctgatgggaactgagttgttggcctttgtgaaatgaaatttttggctcttgagaaagaattcttatgaattgttatgcgaattttatatatttaaagagggagatctggggctgttatttttaaacactttttttcataatacatattccgagtagatatttataaaatatatgtttctttcattatgtgtttgtaaaattagagtttaaataaatatgctttgatgcatagttttgaactaatgtaacatgatttttcttttttaaaacagcctgaaaatgtactagtgtttaaaaataaagatttccattttctcc

SEQ ID NO: 288553 - DNA, 1000 bp, Homo Sapiens; identical to SEQ ID NO: 222378

SEQ ID NO: 288554 - DNA, 1000 bp, Homo Sapiens; identical to SEQ ID NO: 117131

SEQ ID NO: 288555 - DNA, 1000 bp, Homo Sapiens; identical to SEQ ID NO: 222381

SEQ ID NO: 288556 - DNA, 1000 bp, Homo Sapiens; identical to SEQ ID NO: 117132

SEQ ID NO: 288557 - DNA, 1000 bp, Homo Sapiens; identical to SEQ ID NO: 222383

SEQ ID NO: 288558 - DNA, 1000 bp, Homo Sapiens; identical to SEQ ID NO: 222384

SEQ ID NO: 288559 - DNA, 1000 bp, Homo Sapiens; identical to SEQ ID NO: 222385

SEQ ID NO: 288560 - DNA, 1000 bp, Homo Sapiens; identical to SEQ ID NO: 222386

SEQ ID NO: 288561 - DNA, 1000 bp, Homo Sapiens; identical to SEQ ID NO: 222387

SEQ ID NO: 288562 - DNA, 1000 bp, Homo Sapiens; identical to SEQ ID NO: 117133

SEQ ID NO: 288563 - DNA, 1000 bp, Homo Sapiens; identical to SEQ ID NO: 117134

SEQ ID NO: 288564 - DNA, 1000 bp, Homo Sapiens
acccctggcctctacccactaggtgccaggaatgcgccaccccatcctccaccccgcccccaaatcgtgacaatcaaaaatgcctgcagacacgcccgcatttctccagggcggggtgggaatcggttgagagccgcttagcccgagccttggaggagccggagccgctcaaacccggcgggggccgcagactgggagctcccggtccgcctcccagcatccctgcgagcgttcatggggtgttcgtgttagtgccaagattgcttcgttgtagagagagttcgttccaagttactttctgaggtattttatgtatcgatttattagtttttaaatgagttttgttagtttcagttgtattttatttttagttttattagttgattttcatttctttgtagctttctggttatttaattttatagtttcagttactggtttatagttactttattttcaaagttatttagttgttcattttcagttatttatatgtagttgttttgttttaggagttacagatgttcaaattaatttgcttggaatttatttatttatttatttatttatttttcgagacggagtctcgctctgtcgcccaggctggagtgcagtggtgtgatctcggctcactgcaaaccgcctcccgggttcacgccattctcctgcctcagcctcctgagtagctgggactacaggcgcccgccaccacgcccggctaattttttatttggatttttagtagagacggggtttccccgtgttagccaggatggtctcgatctcctgacctcgtgatccccctgcctcggcctcccaaagtgctgggattacaggcgtgagccaccgcgcccagccggaatttatttttaattatctttacaattattatctgagttatttaccttcatagttatttcactttatcttattggagtttttgagttatttatttttacagtaacttatttgactattaaacactcactggaagttcatg

SEQ ID NO: 288565 - DNA, 1000 bp, Homo Sapiens
ccaggactgtgggccccactcttttgcgctaacacttcccctccctcgggtcactgaggaaagagctgctctgtcccctccagtgccctgaaggtccctggcctccactggctgccatggcagggggcccttctgacaggggctgccccaagctgctgttcctcctctgaaccttcaccccaacacccagcccgtggcccctgcaagggggaccctgccagctgggaaacccaaaggcctgtccaaacgtgcgcaccaggaccgaggggagctccctcccaacacctgctaggaattgccaacttttaaatggatggggttttttatgggttgaacctctgttaatacttttgtacactctcactacagtttatatttttataggctattttctcaaggtgtttctagattccacatatctattttatataacaagttattatgttatgtgtgtgactcccttgtgtgtatctgtgccagcctcagcctccgagttgcttttccctctggccctgactctcactgactcaccgatgtgatgtgcaggcccacttcttaccccagatagcctcgggcgctgcctgtagtcatgctgacagctgtacagtagccgccaagactgctgacagctggagacggttctggtttcaactacggtatattgatatcggaagtattctagacagatcctcggttgggttttctagctacatgtttgtattgcacagatccccacctgccatcctatagtgttgtcttcctgtgtgttccggggcttctgggcagctgggcctgcccggggaagtccttgcaggtgggaggccatacagagacccactgtgtgccactgagcgtcccactgctgctgggcaactggaggactgcagggggcgccaggtgactctctccttttatatcacagcagctcctgtgctgaccttcaagttacgttttggaactgtaatactaaaggaagaaataaactactaatttgtataat

SEQ ID NO: 288566 - DNA, 1000 bp, Homo Sapiens; identical to SEQ ID NO: 222390

SEQ ID NO: 288567 - DNA, 1000 bp, Homo Sapiens; identical to SEQ ID NO: 117135

SEQ ID NO: 288568 - DNA, 1000 bp, Homo Sapiens
ctgattcttaagcgaaggtggttaatagaaactcaggctcccgtgacaaggcaggacaagagcctgtttcgctttcctccctgaccctgccaggtgccaactcaaacactacctttctcattggtttctaagtcagtagagacagatctgttttaagcagttgggggttcgagtagatctcatgggtacaggaggccagcagggaccaggccagtcagccatgctcaggacccctcggctcctcccccagcctctagctaccctgtatcgaggcaaggggaggccagtaaagtttgccaagcctgatcctgcagcctggtggggctggctggggtattcttttaccaaactctgttttaccgccagccccttgtacaccccaatcccatgtctccctcccttcagctggaccgtgtgcccctttgggaggaagaagacaagcgccactagggccaagggcagcagagccctgccgagtgagaggctgtggggcagcggctctgtcctgtgccttaccagccctggggagggggacatttggctggaagactggaatttaattgccatcgtctttgattttgtgacatttctgcttggaagtgtgaactaccctcccccccccgcttcctgctccttagcatgcgtgcagctctctcctgttttgggtgttacccttggacactccagctcggggactgctggcgtgtgagtgtgcagattcccctgtgtggtcgaacctaagaactgtggcttggaagtgatgctccatgtgacgacgactttgctttctttcctcttagtgaggaggtgattcgtagatcccaactgcctatgtaatgtaaataatgtacatttaatttattgctatggtagcacattgtatttgttaatgtacaaaacaaattctaaaaggttgacaaatgtatattttgttgcttaaatgtgtctttgcagaaattgacaataaataacatattttgtgccaaaaaaaaaaaaaaaa

SEQ ID NO: 288569 - DNA, 1000 bp, Homo Sapiens
gatggtattctaaggtccatccttccgtctctgacattttgagatctttggaaaggactctatctcatcctcccctcgacaagccaagaatgagaattgggaataagtgaacagagtttgagggtttctgggcggcctccgtgtcacccaaagtcatgatcaattcaggagactgcccaaggcttgcagaagaggtaagggagtgaggcactcctatcccagtctcccaggtttggttgagggctccccaaggcagggcaagatagcggccctgtcactgaccctggcctgtggtggtctgagctggggagggaaggacaccaatgaatcagcttgggacctctttaggccttccccttttcctccaccccgatgctccttagtgatgctctgaggcgtggccacgatctccctcccaggtggtatcgcccacctgaaaaaatcctgagaatttctcccatcttggcctcttccagaaaccggccaggcaaggaaagaggccggtcaccagaagccagcaggcgtggggtgtgatactctctatagccactacagggcgcgcgcaggtcgcggatctccccagttgctaatcccggctctgccactcaatcctatccctagttcccgagcgcgggtcccccgccttgcagtctccagccgtgcggggccgggagcaggcctccggcctcccagacttctagagcccgccgggcccatctttgtactcatccaccccagccggcttgggactcagacaccgaagtctttttttttttctctccgatccttggacacctcctctgtctgccatttattagccatgtgaacttggccacatcacttcacctccctgagcctcagtttcctcatctgtcaaatgggggtttataaacacctacctcgcagggttgttgtgaggatttaatgcgataatgtatgtaaagcgccttgcacactgcctggcacacagtaggcgctcaataaatctaagcttcccttt

SEQ ID NO: 288570 - DNA, 1000 bp, Homo Sapiens
cataaaaatttaaaaagaaatggaatggcaaataatggaacataaactttaaacagttagctttgaccagaggtcagcaaatatcctccatgggctaaatccagatgtccacctgttttcataaataacgttttattggagcatagctgtacccatttgtttacatattggctatggctgctgtctagttcaacgtgagagttgaatagttgcatcagagagtatatggtccacaagcctaacttattcactctctggccctttgcagaaaaagtgtgctgccttagtctatagaaaatggacttttcccaccattcactgactcattaggagataggcatcttctaaagattttttttatattgtgtaatgattgatatatagataaaattatatattacttgtaaggtatgatgaataacaacacttaaaaactcatcacacctaaagacatggaaagctgccaattacctatatgtatgttcttcctattttcttacctctttccccatgtcattttttattgttccttgccattttttaatcacacatgtatgttctccaaacatactgtttcattttttgaagctttctacatatagtgtctgaatgtgaagtcttactcaacttgcttttttgagtttatgtttaaaattcattcttgcgcttatatgcatggatggtttacttgctctatagtattctgtgtgagtataccacaatttaagtgttcattttcctatcagttgacatttgtttttagtttttgttggtagaaacagtacactcaaaacatccttgactgtcccctggtacacatatgcaagagactttatgcgtaagagtggagttgttggcttgtcaagttttgcaaaataatgccaggtattttccaaaatgatgatattctcttgagtattacttccctttgcaatgtttttattgttaatgtagcatatataaaaaagtatctcataattttaaaaaaaaaaaaaaaaaa

SEQ ID NO: 288571 - DNA, 1000 bp, Homo Sapiens; identical to SEQ ID NO: 117136

SEQ ID NO: 288572 - DNA, 1000 bp, Homo Sapiens; identical to SEQ ID NO: 222393

SEQ ID NO: 288573 - DNA, 1000 bp, Homo Sapiens; identical to SEQ ID NO: 222394

SEQ ID NO: 288574 - DNA, 1000 bp, Homo Sapiens
ataaaattagagtatgaaaaccagtgttcaattttttatcttgttgagcttgtaaaatgccagcaatttaaaactaggacttttccccccataagccaaggaggtagaattactaatacaagggttaaagaaggtagattttgttttcaatatttgggtaatattagaaagattcttcccacagggaagaactagcaagtgtcccaattttttccaaacgttggggaggggaaaattcactgtatcatgaaaccctaagggtttgttgcacttcctgctttttaggcctggataacagtatcaccatccttatttacagaagggtaaaactgactcttaatgagaaaagctttataagttcaagggctgtaaaatatgaactacttagggtcgtttgccttccatgggaacttggctagacttagaaaaagctgtttgttgtgctaatgtaaaagtgtcatacaatttagaagatttttgaagatggtaaacttagaagaattctatgttctgaaatgcacacttttagaatgtttttctttgaaaacaggctaatagttttttctttttttgacaaagtttcagctcctctttaaagttattgtgtcatttttctggtttaaatttcccttatatttccacctgtaatgtcagtggcaacaacatcatacttcacttacttgttaatttactttttacccttattctaagagcaagttgagttgaactgaatcttccttgtcttagtaacaatgtataaatagtggcttttctgtacaaaaggttgtaatgcctcctgatggatataattttgtgattgtatttaaaagttgaataaatcacaccagcttcctgaaaatgttcataatgcatcttttggaaaacaaatacatgcctactttgtgcatatttgcattaacatggcaaagattgtatgaaatacctgtttttcagaaaataaaggttcagtctcaaaagatacagcaaaaaaaaaaaaaaa

SEQ ID NO: 288575 - DNA, 1000 bp, Homo Sapiens; identical to SEQ ID NO: 222395

SEQ ID NO: 288576 - DNA, 1000 bp, Homo Sapiens; identical to SEQ ID NO: 117137

SEQ ID NO: 288577 - DNA, 1000 bp, Homo Sapiens
agagccgccgagcggctgtgctcatccagcagcactaccgctcctaccgccgcaggcccggccctccccaccggacttcggccaccctgcctgcccgcaacaaaggctcctttctcaccaagaagcaggaccaggcagcccggaagatcatgagattcctgcggcgctgccgacacaggatgagggaactgaagcagaaccaggagctggaagggcttccccagccgggactggccacatgacctggccaccgcctttctcaccaccctgggggcgcctcgtgcagtcttaacagggagagggctttctggggcagggggagcccctgtcggcagctttcctgttcacctttgttggagccctctgtaggcctcctccctcctccccacgccttgctcccacacccctctcctcgtccctcctggtcgtgccccgtctcttttggtcctggctccagaaaacccgcgccccacatacctgcatcttccgctgtgacctccggagccctgcctgcccctgctccccagctcctcctgcctgcacccgactcggccccctcctgacttgccttatttatttgttcgacgcgtctctgaatgtatccgcctcggttcccaccactgccttcgctgcgcacgcccctcgtgtttcagggctgaccgtgtccccacccgactccgcatgtttgcgtctgtttcctccctctctggccctgtcttaccccatcacccgactctggccactgacctcagggccgaaggggaggtggtgtacataggaacgcgttgcggagtccgccccgtcccccgaggggaggggtcttgtacatactgtaacatacagagtatagtgaagaatctatttaaggcgccgcggggagggctgcacggccgggcttgtggttctctagcgcggcgggggcctcctgccggctccacgggcactttctacttgtgcatgggcttggtttatacgaattgccattaaacatcgctgcacc

SEQ ID NO: 288578 - DNA, 1000 bp, Homo Sapiens
cgtgctctgtggctttcccctatttctcttaatacttagggaagaatctgacaggaagaagcgcacaggggtgtgcacaaagaaaatgacatgaatctttatttttcactgccagcttcaaggaaagaaaattttttctacaatttgcatgagggatttttttaattgtatgtactcatggttgtaaaccaaaacgtactgtaccgtacagagaaaaggagcaaaaaaccaagtcttctgtttatcctgaggctttccacaatgttcccctcctgtgagccaaggaggcaaactgcacaagcttgtaaatggttcgtctttaaaatgtacataagtggaacatttaataaaatgaggggaaatggatttataaacttgttttttttctaggtgaccctgtttaataggctttcacagactggggaatgctcaagatgtgatgggcctggtggtacaggtgtgacatttgttaccacccatttctcccaccccaccctgcttttttgtttgtttgttttttcatcccccagcacactataatatagtgaactggaaaagtcccttccagaaacagcttggccagctttgtgaacctttgacatctgaaaacaaccaaggatccatctgggcttctcttccccagctttttgcctgatgccattttattgacagacaatggactttgaagtcagcctttgcctttgagaaagttcaagaactatggttggtcacgtctatctacaacctaatcctactctttggtagtctctgcagcagccacagccttagcagagctggggttcctgtcttctgcacacgattgactttcttgatgggtaattttttttaagattataccaacagtggatcagctgggttttggccaggaagttgtctttgtggactctgcctgcatggcttagtagtagaaggaaatttttttttggttttgttttttataattcagtttaatcaataaacatgtatttattgactgtta

SEQ ID NO: 288579 - DNA, 1000 bp, Homo Sapiens
aagctaggccgctggaggaaagggaactcacccaactctaaattgtgccgcttagacttagctgtcagtgtgacttcctttcccacccacccccagaaaaacagaaagagcatctggggagcgagtgaaaattccttaggtgattcctaagatttccttgggtatctggtttttgttttcatatttgagtgtgtgcatgtgtgcatgactttaatgacttttttaatggggtggtagttgtctgggttgctgggtttgaaggaagtttgggttgatttttgtggtgttttgtttaatagagaatttttttttccctgtycccctgtcagctggtctgacagatttaagaactctcattcttaaaagactttggacttaaatcctagcattttagactaggactgttctactgtgaagaaagttctgtctcctttagcccggtttgtttctccctgctcaggtctagaatcccaagcagtgtcctttcctggtgaacactgtgagccgcagatgtgacttttttttaaagtcatctcttcagcaatccagaggttccttgacctcattatttgtcctatctctcccttatagtcctaagccaagacatttgacctttgacatttgacctttgcagtgtcatgtgagggcgtcagtatagaggcctttgcatctgggcctggcacccgctctctgcctctggaggctaaaccctgtctggatttctcttgggatctaacgtgggatcttctggacagacaaccgtgacatcagcagtgctggtgctgctgtgtgtggactgaacacctgcactttgcagaggacacgctgcatgggccccgcttgcggttcattcaggcctgctgcaggagctctgagaacaagaaagagtggacacccgttcccctgcatcatctgtcttgcgtgctatttcagagtggggaagtgataaactatttgccttctggagctctttgtgaaaaattaaaaaaaaacttagctc

SEQ ID NO: 288580 - DNA, 1000 bp, Homo Sapiens
ggctgctctctgagacaggggcgcccccgccttgacccctgggcacctccatcccctcccacctgtccccagatcagtctctgggatggaggccagagagctggtcaggctcccccatctgcccagcacggcctgcactgtgcccacccacttgctccacaacgtccagttggtcctgctgccaagagccccgtgcatccaggcggccaagcacaaactgggggagaggaggccgccagcccggaggctgcagcccagaaactctacctcatccacactggtgcagggagccctccttgaactgacctttgattggtttctgcttcaactaccaaaatgttatctccacttccccctcacccgtagaggatcctggccacagacagtttcaagtagtgtcagatttttgttgcttgggcggctgttggtagagtgggcagtgcccgcgccatggggtgctctgtgggcttctccaggagcagggagggtggaggggagggatggggggcacaggagctgggagccccgtctccaggaaaaggagaggggttaagatgcaccgaggctgtagctgggctacttgatcttgctgaaagtgtttctaaagatagcaccacttttttttttaaagcttttatatattaaaaaacgtatcatgcaccaactgtgaatagctgccgcttgcgcagaggacccggggaggggtcccgagaggctccccatgcaacactggaaatgactgttccagagagcgggcagacctggcagagcgcccctggcgcctgagactaccacccactccgttcctgccagaaacgaccctctgtggccgatgggccatgcgggcccctcgcagccaactcagccagtgttgggactggctcagagcccatgggggctggaggggggcagctgggactctggaatcttctttataataaaagccttacggacaaacctactgtgggctccagcgtttgtcctgagatagccaagcggg

SEQ ID NO: 288581 - DNA, 1000 bp, Homo Sapiens
gggccccatgcactcggttgtccagctcttccaagggttccgggacctgctgtggctgcccattgagcagtacaggaaggatggccgcctcatgcgggggctgcagcgaggggctgcctcctttggctcatccacagcctctgccgccctggaactcagcaaccggttggtacaggctatccaggccacagctgagaccgtgtatgacatcctgtccccggcagcccccgtctcccgctccctgcaggataagcgctctgcgcggaggctgcgcaggggccagcagcctgccgacctgcgggagggtgtggccaaggcctacgacacagtgcgagagggcatcttggatacagctcagaccatctgtgacgtggcatcgcggggccatgagcagaaggggctgacgggcgccgtggggggcgtgatccgccagctgcccccgactgtggtgaagccgctcatcctggccacggaggccacgtccagcctgctcgggggcatgcgcaaccagattgtccccgacgcccacaaggaccacgccctcaagtggcgctcggacagtgcccaagactgagcctggggtgcccggcacccagagggtgctgcccaccatgctcctgagcctcccaagagctgcagcccacgggcccggcccggcctggcccttcaggggatggccactgtgaaggacgccttcccagcctgcccgttgccaatctgctgtgagaggggggcctccctgccttggggccttagccctggctctgcacttttcctccggggagaaaggacactgcccctcccccgacctgggcccacactgctgccttctcccaggacggaggcttttggaccctcggaccccatcccactcagccaagtgtctttctgtgtctggggggaggaggggatgatatccgtgtggttcgatgtattatttttaagctccgtgagtgcgtgggtcagtgtctgcatgaagtggaataaactgcccaccgcc

SEQ ID NO: 288582 - DNA, 1000 bp, Homo Sapiens; identical to SEQ ID NO: 222397

SEQ ID NO: 288583 - DNA, 1000 bp, Homo Sapiens; identical to SEQ ID NO: 117138

SEQ ID NO: 288584 - DNA, 1000 bp, Homo Sapiens; identical to SEQ ID NO: 222400

SEQ ID NO: 288585 - DNA, 1000 bp, Homo Sapiens; identical to SEQ ID NO: 117141

SEQ ID NO: 288586 - DNA, 1000 bp, Homo Sapiens; identical to SEQ ID NO: 222402

SEQ ID NO: 288587 - DNA, 1000 bp, Homo Sapiens
tttaccggttatcctgaggacagaaagttaaaaaagaacaagaagaattcccatgaaggagtttcctggtttgttcctgtggaaaatgtggagtctagatcaaagaaggaaaacgtgcctaacacttgtggccctggcatctcctggtttgaaccaataaccaagaccagaccctggagggagccactgcgggagcagaactgtcaggggcagcacctggacggtcggggctacctggcaggcccaggcagagaggctggcagagacctactgaggccatttgtgagagcaacccttcaggaatcgcttcagtttcacagacctgacttcatctcccgctctggggagcggataaagcgcctgaagttaatagtccaggagaggaagctgcagagcatgttacagaccgagcgggatgcactattcaacattgacagggaacggcagggccaccagaatcgcatgtgcccgctgcccaagagagtcttcctggctatccagaagaacaagcctatcagcaagaaggaaatgattcagaggtccaaacggatttatgagcagcttccagaagtacagaaaaagagagaagaagagaagagaaaatcagaatataagtcataccggctgcgagcccagctatataaaaagagagtgaccaatcaacttctggggagaaaagttccctgggactgacacaagtttattttcctcagagccttggaattctattttatgaacctagagaagcagaatccttacttttgtgagtctggttgaataaagcttattctttgtccatgtgtattttagaaatagtaacttctaaagagtctggaacaaagtggtgattaaaattcctaatggtttgggagcaatactttctgcatagtggccttgtccaatggcctgtgtgttacaatgatatgatcatttctcaagaataagtccctttttgtatgtgtttttatacttttagaaaataaaaactttagattaactc

SEQ ID NO: 288588 - DNA, 1000 bp, Homo Sapiens; identical to SEQ ID NO: 117142

SEQ ID NO: 288589 - DNA, 1000 bp, Homo Sapiens; identical to SEQ ID NO: 117143

SEQ ID NO: 288590 - DNA, 1000 bp, Homo Sapiens
caacaagagccctgaagtgctccgggcatttgatgtaccagacgcagaggcacgagagcatcccacggtggtacccagtcataaatcacctgttttggatacaaagcccaaggagacaggtggaatcctgggggaaggcacaccgaaagaaagcagtactgaaagcagccagtcggccaagcctgtctctggccaagacacatcagggaatacagaaggttcacccgcagcggaaaaggcccagctcaagtctgaagccgcaggcagcccagaccaaggcagcacatacagccccgcaagaggtgtggctggaccacgtggacaggatccggtcagcagcccctgtggctagaggaacaccagcacaaacgacagcctcaagtctccttcgagctttatatccatttggggatgaagtctactttgacagctagcaaggcgacatgcaactgttgttgaatgatgacagcaattcaggaaagacttaaatatgaaagcaaattgaacacatcgggtgtttgttatcagaaaagagatgagatgagataagacttgtttattgactagccaatatgtcattaaaattaaggtttatattgtgaagcttttttgaaattttacttttttttgagagttttgctctgtcacccaggctggagtgaggtggtacaatctcggctcactgcaacctccacctcccaggttcaagagattctcctgcctcagtctcccgagtagctaggattacagatgtgcatcaccatgcctggctaatttttgtattttttagtagagatggggtttcaccatgttggtcaggctggtctcgaactcctgacctcaagtgacccgcccttgtcggcctcccaaagtgctgggattacaggcatgagccattgtgcccagcctatatctacttgagcctgtgtgcccactgaagagatgaagaataaaagcctaagctctcatcaaaaaaaaaaaaaaaaaaaaaaaaaaaaaa

SEQ ID NO: 288591 - DNA, 1000 bp, Homo Sapiens; identical to SEQ ID NO: 118625

SEQ ID NO: 288592 - DNA, 1000 bp, Homo Sapiens
aatgaaaagccacaaatgcaagactgttcttaaatggaaggcatagtcagcgagggtaaatcctataccactttaggaagtattaaaaatatttttaagatttgaaatatatttcatagaagtcctctattcaaaatcatattccacagatgttccccttcaaagggaaaacatttggggttctaaacagttatgaaagtaagtgatttttacatgattccagaataacacttgtattgaccaatttaaacagataccagaccaattttgcatttaagaaattgttctgattatttacgtcaactcattagaattcagtgaaaagtaacagtcttttgtcacagagaatctgaaagtagcagcaaagacagagggctcatgacaggtttttgcttttgctttgcttttgtttttgaaagagtaaaagtactgatgcttctgatactggatgtttagcttcttactgcaaaaacataagtaaaacagtcaactttaccatttccgtattctccatagattgaagaaatttataccacatatcgcatatgaccatctttccatcaaatcaatgtagagataatgtaaactgaaaaaaaatctgcaagataatgtaactgaatgttttaaaaacagaacttgtcactttatataaaagaatagtatgctctatttcctgaatggatgtggaaatgaaagctagcgcacctgcactttgaattcttgcttcttttttattactgttatgattttgctttttacagatgttggacgattttttcttctgattgttgaattcataatcatggtctcatttcctttgcttctttggaatatttctttcaacacattcctttattttattatacattgtgtcctttttttagctattgctgctgttgttttttattctatttacaggatgatttttaaactgtcaaatgaagtagtgttaacctcaaataggctaaatgtgaacaaataaaatacagcaaatactcag

SEQ ID NO: 288593 - DNA, 1000 bp, Homo Sapiens
ttgtgtctgcaccagtcttttagtgtctcaaaatagattattaatacatccataagtctgtggttcttctcattctcatctataatccaccactaccaagagagatttctgtgtcttaaatgatttggtgcatattttgcaacattgagagaaaactgcccccatctcaagcaagaatggcgttggtttcttccatttcaaactaatcagcattctccagcaatgacaaagtgccagagtgtatatatgaaataaccttatacctgaattacagttttgtgatataaaataaagctgagtataaaataaaaccaatcaaacacagaatttgattggatttgttattcattggtatacaacaatttttattcttatgtgtgctttaagggctgtgttttgctcttagggtactcaattttatgtttccttttggcattctttgtgcaaaaagaagcatgtggtggctctcatttaaatttcaaaattattagttttatctttaacagattactgattatacagaagatataatttattggaagaactgccaaatacattttgtccttctaaaaatatggaaatttaaatagtagtctggaaagttaccatatgataatttttaattgtgtgatctagacatgccttaggtaactgcagaaatagcaaattaaatgattaatgagcttattagtcatagtaaacatacagattcctaattctatgacagtgtacatatatgaaaataaatgatgaaaaaagaactataatatttttaaaaatatgcttttatttatatttcacataatgtaaagttctacaaaataaagctagtaggcaagacccctcagtgtatacctttaaacccataaattaattttatatcaataaaataaaatactttctctagttttggaaaaaaaaaaaaaaaaaaaaaaaaaaaaaaaaaaaaaaaaaaaaaaaaaaaaaaaaaaaaaaaaaaaaaaaaaaaaaaaaaaaaaaa

SEQ ID NO: 288594 - DNA, 1000 bp, Homo Sapiens; identical to SEQ ID NO: 118381

SEQ ID NO: 288595 - DNA, 1000 bp, Homo Sapiens
aagaaagatgagattgaactggctatgcagcagatttgtgccaatgtaatggaatattgccagtcactcatgttacagagttcccctaccttccagcatgctgtgtgtctcttcactcctagcctttcagaaacagttaatagagatggaccgcggcaagatacccaagctccagtggttccatactggcgcctgcctggtttaggcattatcatctacctgctgaaacagagtgctaatgatttcttcagctattatgacagtcatcgacagagtgtcagcaagctacaaaatgtagagcagcttcccccagatgagataaaagagttgtgtcagtctgtgatgcctgctggtgttgataaaatctccactgctcagaaatatgttctagcaagacggcgcttggtgaaggtgatcaacaatcgagctaaactgctttccctttgttcttttatcatagagacctgcctatttattctttggcgccatctggagtactacttgttacattgcatgcccacggattctcaagattccttatttgcctcgagaaccttgtttaaaagcagaagactgcaagattccttcgcctcagaaaccaatctagattttagaagtgggctggctatagtgagccaacatgatttagaccagcttcaggctgatgcaatcaacgcttttggagaatcactacaaaagaaacttctggacattgaaggattatattcaaaagttcgatctcgatatagtttcatacaggctcttgtcagacgtatccgtggcctcttgaggatatcaaggaactgagagcccgtgcttatgctcttctatgagagagatgaattggggagaattgtctccattttatagattagtttctttctaaattatgaccaaaaatattttgctatttctttctttgtatatggacatcttttctgtaaacttcttcccctagttccatcctcactagtaaaaaataaatactttttaaaaaaac

SEQ ID NO: 288596 - DNA, 1000 bp, Homo Sapiens
tactgcttccgtgtgcaagatgtggcctgccgatgccgaaatggcttcgtgggtgacgggatcagcacgtgcaatgggaagctgctggatgtgctggctgccactgccaacttctccaccttctatgggatgctattgggctatgccaatgccacccagcggggtctcgacttcctggacttcctggatgatgagctcacgtataagacactcttcgtccctgtcaatgaaggctttgtggacaacatgacgctgagtggcccagacttggagctgcatgcctccaacgccaccctcctaagtgccaacgccagccaggggaagttgcttccggcccactcaggcctcagcctcatcatcagtgacgcaggccctgacaacagttcctgggcccctgtggccccagggacagttgtggttagccgtatcattgtgtgggacatcatggccttcaatggcatcatccatgctctggccagccccctcctggcacccccacagccccaggcagtgctggcgcctgaagccccacctgtggcggcaggcgtgggggctgtgcttgccgctggagcactgcttggcttggtggccggagctctctacctccgtgcccgaggcaagcccatgggctttggcttctctgccttccaggcggaagatgatgctgatgacgacttctcaccgtggcaagaagggaccaaccccaccctggtctctgtccccaaccctgtctttggcagcgacaccttttgtgaacccttcgatgactcactgctggaggaggacttccctgacacccagaggatcctcacagtcaagtgacgaggctggggctgaaagcagaagcatgcacagggaggagaccacttttattgcttgtctgggtggatggggcaggaggggctgagggcctgtcccagacaataaaggtgccctcagcggatgtgggccatgtcaccaaaaaaaaaaaaaaaaaaaaaaaaaaaaaaaaaaaaaaaaa

SEQ ID NO: 288597 - DNA, 1000 bp, Homo Sapiens; identical to SEQ ID NO: 117145

SEQ ID NO: 288598 - DNA, 1000 bp, Homo Sapiens; identical to SEQ ID NO: 222406

SEQ ID NO: 288599 - DNA, 1000 bp, Homo Sapiens; identical to SEQ ID NO: 222408

SEQ ID NO: 288600 - DNA, 1000 bp, Homo Sapiens; identical to SEQ ID NO: 117146

SEQ ID NO: 288601 - DNA, 1000 bp, Homo Sapiens; identical to SEQ ID NO: 117147

SEQ ID NO: 288602 - DNA, 1000 bp, Homo Sapiens; identical to SEQ ID NO: 117148

SEQ ID NO: 288603 - DNA, 1000 bp, Homo Sapiens; identical to SEQ ID NO: 117149

SEQ ID NO: 288604 - DNA, 1000 bp, Homo Sapiens; identical to SEQ ID NO: 222411

SEQ ID NO: 288605 - DNA, 1000 bp, Homo Sapiens; identical to SEQ ID NO: 117151

SEQ ID NO: 288606 - DNA, 1000 bp, Homo Sapiens; identical to SEQ ID NO: 222413

SEQ ID NO: 288607 - DNA, 1000 bp, Homo Sapiens; identical to SEQ ID NO: 117152

SEQ ID NO: 288608 - DNA, 1000 bp, Homo Sapiens; identical to SEQ ID NO: 222414

SEQ ID NO: 288609 - DNA, 1000 bp, Homo Sapiens; identical to SEQ ID NO: 117153

SEQ ID NO: 288610 - DNA, 1000 bp, Homo Sapiens
gaagttcctgtccatgctgctcaccttgaagtgcactctggacccagacacctctgaccagactgataatctgactgaacaagctatggagttctgccagagggtgggcagcagagccaccacagtgtccgagatcatagagaagaaggatgaggccgtgtaccaggccatcgaagaggggatccggagggtcaacatgaacgcggcggcccggccctaccacatccagaagtgggccattctcgagagagacttctccatttcgggtggagagttgggtcccacgatgaaactgaaacggctcacagttttggagaagtacaaaggtatcattgactccttttaccaagagcaaaaaatgtaatcagggcctatgcctgcagtttctatagaatagagggcaggcgttccgagcctcttcctgagccccaggtctcttcagtctgggcacaggcatttctgccaagtctgttagatctccaggtcagggcacagcactggctctacatttaccaggtcttacgccaacaatagctgacaattccaagaagcttcacgtgtgggtagttttaattcagtttaagtattgctttttgttcaggtgacaaatgagatcagctctccttccagaacgaaagggctgataatttttggccttagttccaggtagattaaaaagctgctagctcacatacaggacagccagcagtaggctgtggagcgggtaggagagagatggctgatactgctcacgtgcgctgcaggaaaagcaatcagtcacaactcacctagcgacctgacttactctggaatcttggcgggcatcgccgaccctattattccattaccaggcactccgccacccacatgccaactgacttgatgcttaataaaactgctgctgcctgtttgattctatttaatgtataatttgaatattaaaccttttaacagaactgtcaaaaaaaaaaaaaaaaaaaaaaaaaaaaaaaaaaaaaaa

SEQ ID NO: 288611 - DNA, 1000 bp, Homo Sapiens; identical to SEQ ID NO: 222415

SEQ ID NO: 288612 - DNA, 1000 bp, Homo Sapiens
caggctgcagggacagttgggtgtgagaataacactggctttgggtagtgccatggccaggagtgggtttccctgcgtctcctcgtcccgagggcgcctgggtcctcccagctgacggcagtaaatccacagtgagttggggcgactgtgaaactggaatgctgttactttgataattactttccagcaggtgttttccttcacaatggttttgtttctttccttctgatctgagaagacatgaacgttttctcttcaccgccgtggggtgtattgactggtcccccatgggctgctggaaaggcccggagatgcatctgtggcctggggccatcaagatcaaagaaccaggaggcctgggagatgcagctggatggggcggcctgcagaccctgccagggggtttgaggaccctcccaggtttcccactgcggaacaggagtgactctggctgccaagataccttcatggtgttcatgacaagtggaatcattattttcaaccattgaagggggatgcaggcaagacaccttcccagctgctcctagaggggacaagccaggccctctctgcagtcctcggcagctccggaaggacacagtcaggggccgggcaaacactttggccacagccccaaacaagcgccaccgtgggagaggagaggctgctgtcactggtaccggatgcagaccccaccctgtctgcaggccacccccacctccctgcagctttgaggctggcggggtctgctcctgggaatggggtgggagccacagggacgacccggggcgggctgatgtcttcttgggggcagaccagagagctcaagtttcagagtcagaattaggcacttggaacgtttttgctggcttgcactttcttattttcttattttagagcgcttaaaaaatccggaaaaatggggtttaaaagaactgtctctttcagtctacatttttgtttaatacgcttgagcaataaacgctgacttgcagacgtg

SEQ ID NO: 288613 - DNA, 1000 bp, Homo Sapiens
cacagtatggatcacatattgtttgacattaagcttttgccagaaaatgttgcatgtgttttacctcgacttgctaaaatcgattagcagaaaggcatggctaataatgttggtggtgaaaataaataaataagtaaacaaaatgaagattgcctgctctctctgtgcctagcctcaaagcgttcatcatacatcatacctttaagattgctatattttgggttattttcttgacaggagaaaaagatctaaagatcttttattttcatcttttttggttttcttggcatgactaagaagcttaaatgttgataaaatatgactagttttgaatttacaccaagaacttctcaataaaagaaaatcatgaatgctccacaatttcaacataccacaagagaagttaatttcttaacattgtgttctatgattatttgtaagaccttcaccaagttctgatatcttttaaagacatagttcaaaattgcttttgaaaatctgtattcttgaaaatatccttgttgtgtattaggtttttaaataccagctaaaggattacctcactgagtcatcagtaccctcctattcagctccccaagatgatgtgtttttgcttaccctaagagaggttttcttcttatttttagataattcaagtgcttagataaattatgttttctttaagtgtttatggtaaactcttttaaagaaaatttaatatgttatagctgaatctttttggtaactttaaatctttatcatagactctgtacatatgttcaaattagctgcttgcctgatgtgtgtatcatcggtgggatgacagaacaaacatatttatgatcatgaataatgtgctttgtaaaaagatttcaagttattaggaagcatactctgttttttaatcatgtataatattccatgatacttttatagaacaattctggcttcaggaaagtctagaagcaatatttcttcaaataaaaggtgtttaaacttt

SEQ ID NO: 288614 - DNA, 1000 bp, Homo Sapiens
atcatgcaggctttcggacagtcctttctccagcccgacatccacctttttaaacaaaatctcttctacttggagactctcaacaccaagcagaagctgtaccacaagaagatcttccggactgccatgctgttccagtttgtgaacgtgctgctccaggtcctggtccacaagtcccatgatcttctgcaggaggagattggcatcgccatctacaacatggcctcagtcgactttgatggcttctttgccgccttcctcccagagttcctgaccagctgtgatggtgtggatgccaaccagaaaagtgtgctggggcggaatttcaagatggatcgggacctgccctcattcacccagaatgtgcacaggctggtcaacgacctgcgctactacagactctgcaacgacagcctgccccctggcactgtgaagctctaggcctgctactgcctggggacacggacttctgctgctgccacctgcgccagccctaccttccaccacagatgtctcccagatgggccttggtcacactccttggcttctcccaccgcaagcaacgctgcctgcctctgccgctcctccacatcttgccgctgcccagcagagctggcttctgggtccacctgagcactggacggtgctcccagggcgttggagcaggcggaggggtgtgtggccaggtactaggaggcaccaggaaatcccgcggggtggcccatgcagaccaggcgcacgtggctcatggggcagaattgccaaggacagctcacgacagtgccaccttctcaccattccagccaaggagagatgtgacgttggaactgctctggcacttctgtcaagcctcccccgccccaattgccttgagatctctgctctttgtcagagatttgcaaagactcacgtttttgttgttttctcatcattccattgtgatactaagaaactaagaagcttaatgaaaagaaataaaatgcctatgttgttgttctag

SEQ ID NO: 288615 - DNA, 1000 bp, Homo Sapiens
gctactgcttctatttgaaatggtgctgtgttttggttgtggtctgaagctttgaagcgctacttagcatctcctttcttccatggagctctcacgattcaaacatgacagatttggtaaaatgctggttaggttgagtcttccttgcccccactcagtcatctttgtatgaatcccatgatttgggggtttttttctttttttttttataccagtttttagctggtgtttatgaagaacagtgagtacctagaactgtgccactaattaaaggaaatcctaagaaggtgcatttctttacagagctgtgtcatgccatcctttgggccctctgctggaaaagtagaatcaagtctcaaataatgcctttttaattgtatcctctagtattatagatataggacagtactgtatcatacctctgtgaatgtaaaatatcttgtacctgctttatgatacgtagtagtgaccgtgctttatcagagctgtttttaatgatgttattctagaatgttttctttccagatgatgattcagaagctaattttaaaaaacggtgccaggtaccacaacagtaacagaactttgcaattttctggggttttgttttttacctttttccccccttttttttaaatggagtgtgctggatgtctctataattttattcagatgactgcagaacctggaaaagctgttgctgctattgatgcataacatactgctattggtctttttatataaatatatatatatatatacatatatatatataatttgaatttttggaaactttagctgtgctgtcaactttggaaaaagtatcccggtttactgtgttgagttggcattgtacagaaattaacagccatattggtctagaaacgttaaacttaatttttttccatttgtacaggggtaacgcactgtattaaatatgtaaggtcttatctacatgggtttgattacagaaactaataaagtattctctaaataatga

SEQ ID NO: 288616 - DNA, 1000 bp, Homo Sapiens; identical to SEQ ID NO: 222416

SEQ ID NO: 288617 - DNA, 1000 bp, Homo Sapiens; identical to SEQ ID NO: 117154

SEQ ID NO: 288618 - DNA, 1000 bp, Homo Sapiens; identical to SEQ ID NO: 222418

SEQ ID NO: 288619 - DNA, 1000 bp, Homo Sapiens; identical to SEQ ID NO: 118958

SEQ ID NO: 288620 - DNA, 1000 bp, Homo Sapiens
tgtcagaaggcagccatggaattccatgaacacttgcacagcataggcaccaaggaaggtttgaaggaaagaaaactacaaaaagcagtggagagctttacctggaatattaccatcttaaagggacaagcagatcttttgaaatatgctaagaatgagacattggagaacctgaaacaaatccattttgctgctgtttcatgtggactgaataaaccaggcaccgaaaatgctgatgtccagaagccacgccggagcttggaagtcatacccgaaaaagcaaacgatgaaactggagaatgaggaaacttacaataaaccattatggagtttataactctaggaccaattgtagtcagatgggacatttgctttgcactcactaatgagaataatattcgggattttaaagcacaactggaatagctaattacagtctattaaaactgtgaatgtatgtagcaatcgtgcgtgtgaaggcaaataaactctttaacaggcaattatattgctggccaaaatatgctatatttgtatacaaagacattctaactcagttccagtatgaagaaagattattcactctagctccactgagaaacattttcctaagtgaaaacaatttcttaagatggaaatggattggattgtcaaattattatttattggagaaaaaaacctgatctacacatttttacttatatggggttgccagagtctctgggttctagatgattttggtggcatgcttgctgagccataattactaaagagaatgtaagtggacgggttccctgaatccccggggtccttggagagccatcgaggagaatgtgcaattggactgaagctccctggctgaagatacatgccgagtcagcacatgggtagagatgatgtaaaagcagccaatctggaaacaatacattgtaaatagtttttcattgtatgaagtagtgttcacattaaaaagatgttttatgacaaaaaaaaaaaaaaa

SEQ ID NO: 288621 - DNA, 1000 bp, Homo Sapiens; identical to SEQ ID NO: 222420

SEQ ID NO: 288622 - DNA, 1000 bp, Homo Sapiens; identical to SEQ ID NO: 117155

SEQ ID NO: 288623 - DNA, 1000 bp, Homo Sapiens; identical to SEQ ID NO: 222422

SEQ ID NO: 288624 - DNA, 1000 bp, Homo Sapiens; identical to SEQ ID NO: 222423

SEQ ID NO: 288625 - DNA, 1000 bp, Homo Sapiens
gccccagctgctgagaaggccttgagggaagtagaggctgggagcaaatgccccatgcggtgagaggatgaggggagcctacgcctcaggcatgtggtgagaggatgagggggagggagcccacgcctcaggtggagtgggcagaggtgcaagagagggatgtactgaagcttcttcccgtcctgccacagacacttctcctgccttcccaccctgacccggcagaacccaccaagtgcctgtgtgcagcctcctgtgcctcacccagggcctgaccccagagtggtcccaacaacccggtctcatgcccactccccatccctgcttcccaaaaattgcactgtgtgcagtttgcaacaaagaatcccgctggcatcctgtccttgggaaccctttctcattctccaagcctggtcagctgcctgcacaggcagaggtgccctcagcccaggttagcaacactcatagttttgccaattaccagtagacactagtggaaccatctaactggaacttcctctctccttccacttatttcctcaaacttgttgctttacactagacacatgcaaatgtatgttttaaacacaccaaaacagatcatgccaaatgagttgcctgtcaaaggctggagggcaggaggagggcctgggtttgggttctttcctcccagcctttggatggtgccttgggccccttagccccagcgccagggcctcccagctgaggccacaggacaagcacttttttatgatgtactaaaagccacagtatgtggcaactgcaaaaggatcaggaatttagggtatgatctcggtcacgtgtcccgggcgctgaggggaaaggaagcgggcatgattgtagacaatgagggggttctcttgatgtaatgaaatgcaattttatggtttggtgcaaaaactcctattttccagtaaattaactttatttctaaagcatattttgatttgccatcaagagcaataaagcattaaatctt

SEQ ID NO: 288626 - DNA, 1000 bp, Homo Sapiens; identical to SEQ ID NO: 117157

SEQ ID NO: 288627 - DNA, 1000 bp, Homo Sapiens; identical to SEQ ID NO: 222424

SEQ ID NO: 288628 - DNA, 1000 bp, Homo Sapiens; identical to SEQ ID NO: 222425

SEQ ID NO: 288629 - DNA, 1000 bp, Homo Sapiens; identical to SEQ ID NO: 117159

SEQ ID NO: 288630 - DNA, 1000 bp, Homo Sapiens
gtgctgctgccgggccaggaagggtgggtgggtggccagcaggctggcagctccagaccccagagggccagaagaactcaccccagtgccctctggatgcaggtgttggggaacactgaggacaatcccccatctcccctcacccttgagcaggccctccctgcactctctgccacatgtccctcctggtctgatcacggctgtgctcactgatgtggctgctttctgtctctgcccctgtgcccttggaggcaggcagtgaggtgctcctttcccaggcccccaccccttctcccccttcagccacttcccagcgagttggaaatgtgccttgcacccccagccgagtgaagcccagaacgcatctatatgcatcgatgtaacaagctcggatcagggacctaattggtttcccagtagtgggtaatttctcgttgcaaatattaatccgttgtttttctggcgcccagcccggcccgccgcagtactgtactcgaggtacgttcctatgcaaccgagagccccggcaaatacttcatgagcttagcagcctgggctcgagcagctatgcaaacgcgcttttcatttggagcacggggctgatgtgaagataagaattgtttctcctggagaaagatccatcatttctccagcttccaagcccccggcacctctgctcagctcccagatgtgacgagcacctcccgccagggggagtcaggggttgatcaaaccagctcttgtgacccaaaccagtgccgctgcattaaagggaggcccagctactccttcccagctgagatgtgggtacaggtcagatttgtcagggagatggcactaacacgacacaagctcactcccagaaccgcagctgatgtttataataatcgtatgtactgtgcaatttaggaggggaaaaaaaggctgtacaagctttaactctaaaataaatttctatttttttcctcttgcaaaattaataaaagatgttattaagaat

SEQ ID NO: 288631 - DNA, 1000 bp, Homo Sapiens; identical to SEQ ID NO: 117160

SEQ ID NO: 288632 - DNA, 1000 bp, Homo Sapiens; identical to SEQ ID NO: 222427

SEQ ID NO: 288633 - DNA, 1000 bp, Homo Sapiens; identical to SEQ ID NO: 117161

SEQ ID NO: 288634 - DNA, 1000 bp, Homo Sapiens
tcaccttctccggcagatgaaggagatgttggcgaaggacctggaggagtcgcagggcggcaagtcctctgaggtcctctcggccaccgagctcagggtccagctggcccagaaggagcaggagctagccagagccaaagaagccttgcaggccatgaaagctgatcggaagcgcttaaagggcgagaagacagacctggtgagccagatgcagcagctgtatgccacactggagagccgcgaggagcagctccgagacttcatccgcaactatgagcagcaccgcaaggagagcgaggatgcggtcaaagcgctggccaaggagaaggacctgctggagcgtgagaagtgggagctgcggcgccaagccaaggaggccacagaccacgccacggcactgcgctcccagctggacctcaaggacaaccggatgaaggagctggaggccgagctggccatggccaaacagtccttagctacgctgaccaaggacgtccccaagcggcattccctcgccatgccgggcgagacggtgctcaatggcaaccaggagtgggtggtgcaggcggacctcccgctgaccgcagccatccggcagagtcaacagactctctaccactcacacccccctcaccctgcggaccggcaagcggtcagggtgagcccctgccactcccggcagccctctgtcatctccgacgcatctgccgccgaaggcgaccggtcgtccacaccgagcgacatcaactcccctcgacaccggacacactccctctgcaacggcgacagtcccggcccagttcagaagaacctgcacaaccctattgtacagtcactagaggatcttgaagaccaaaaacggaaaaagaagaaagagaagatgggattcggctccatctcccgcgtcttcgccagagggaagcagcggaagtccctcgaccccggcctctttgatggtaccgcccctgattattacatagaggaggacgcggactggtga

SEQ ID NO: 288635 - DNA, 1000 bp, Homo Sapiens
agggtacagtgagtcagcctgggcccgctccaccaccacaagggagagccccgtgcacaccaccattaatgatggcctctccagcctcttcaacatcattgaccacagccccgtggtgcaggaccccttccagaaggggctgcgggccggcagtcggtctcgctcagcagagccccgaccagagctgggcccaggccaggaaacaggcaccaattcccgaggaaggtcgcctagccccattggggtggggtcagagatgtgcagggaggaagggggagagggcacgccagtgaagcaggacttatctgctccccctggctacacgctcactgagaacgtggcccggatcctcaacaagaagctgctggaacatgccttaaaggaggagaggaggcaggctgcccacgggcccccgggtctccacagtgacagccactcgctgggggacacagccgagccagggcccatggagaaccaaactgtcttgctaactgccccctggggactctagccctgcccgcctcacgctgaactaccttgttctgcactagctccatccctagagccctgcttctccaggcccgagagaccagcaaaccgtcgccctccgtcccgttgggccccacattcccccactgcctcacagcctcagtcacccggagacccgacgtccttggaggagcatggtggcgaggagccgcccgaggagcagccacaccgagatgcaagcttgcatggattatcacagtataattcactgtaatttgcataaccacaccatcaccatgaacaaaactctgcccaacaggagagatctagttttctcaaggtcaaagaatgttttttaaaaacacaaagctgctgaatgttcaacctgtgaaactgagatgtttctagaatgaaacagtaaatgtgcctgtaataacttaatttttttcatagctcagaaaactatttttgtctccatcctttttacacacagtatattaaacgaaaaggc

SEQ ID NO: 288636 - DNA, 1000 bp, Homo Sapiens
gctggctgactgccccatcactgcacacatgtatgaggatgtggcactgatcaaagaccatacacttgtcaattccttgattcgtgtgctgcagacattgcaggagttcaacatcacgctggagacgtcccttgtcaagggcatcgacatctgacctcccagcaccagccagcagcaggactgagaaagactcaccctgcagctctgaccttttttcccaaagggacttaagcgattgtgcaggagtaggagacaaaatgtacactcactgtaaaaagaaaactagaggatttttggaataaataatctattttagagtttatttgctgatttgctttttacacactttcatgtgaaagagtgatagggagagggagcgaggctggtgccgcttattttgaagctggtgccctccctcgccgtggccacatgctggaagcctgaggcctccctggactgagcctgtggcactgcgtgcgggacagttatgtttccttgccccgtcgcattaatgaggcccttccacatcatttttaaactaatgtttttctatattaacattattatggatatttggctttcataggccacacacaggtgtgctgcgcgggaagccccatgctccaatcaaagggatttttagtagtgcctctaagcaagcaccgatgagtcagtcccacgtattttcttttttgtcagtattgtttgggaaggagacatgccgggatgtgtcatcgtgccaaataccacatttcctgttggcacagtttcacagaagtaaacataagcatgttttaacaggtttttcttttcttttttcttttttaaaatgttttatttatttaacccgccattgtgtgtttttaagtattttctttttttaaggaaaggaaaagcttgtcacaatctaactggctatgttattattattaaatttatgttttgcaacttagaaaccagctacagtatggcccacttaataaaacacctgaaacaaaaa

SEQ ID NO: 288637 - DNA, 1000 bp, Homo Sapiens; identical to SEQ ID NO: 117162

SEQ ID NO: 288638 - DNA, 1000 bp, Homo Sapiens; identical to SEQ ID NO: 222429

SEQ ID NO: 288639 - DNA, 1000 bp, Homo Sapiens; identical to SEQ ID NO: 117164

SEQ ID NO: 288640 - DNA, 1000 bp, Homo Sapiens
caagaaaccgtttgagaggaaaaccattgaccgccagtctgctcgaaagccactcctgggcctgccaagttacatgctacagtcagaagaactccgggcctccctcctggccaggtatccccctgaaaaactcttccaggcagaacggaacttcaatgctgcccaagacttggatgtctcacttttggaaggtgacctggtgggtgtgattaagaaaaaagaccccatgggcagccagaaccgctggctgattgacaatggagtcaccaaaggcttcgtgtacagctctttcctaaagccctacaatcctcgccgcagccactccgatgcctccgtgggtagccactcctccacagagtctgagcacggcagctcctcccccaggttcccacgccagaacagcggcagcaccctgaccttcaaccccagcagcatggctgtatcctttacctcggggtcttgccagaagcagcctcaagatgcatctcctccgccaaaagaatgtgaccaaggaactctcagtgcatccctaaatccgagtaattcagagagtagtccttccagatgcccttcagacccagactccacctcccagccaaggtcaggggactctgcagatgtagctagagatgtaaagcagcccactgccacgccgaggagctaccggaacttcaggcatccagaaatagttggctactccgtaccaggacgaaatgggcaaagtcaagacctcgtcaaaggatgtgcaagaacagcccaggctccggaagacagaagtacagagccagatggcagtgaggcagaaggcaaccaggtctattttgctgtctacaccttcaaggcacgaaacccaaatgagctgagcgtgtcagccaatcagaaactcaagatcctcgagtttaaagatgttacaggaaatacagagtggtggttagctgaggttaacgggaagaagggctacgttccctccaattatatccgcaaaaccgagtacacctga

SEQ ID NO: 288641 - DNA, 1000 bp, Homo Sapiens; identical to SEQ ID NO: 222431

SEQ ID NO: 288642 - DNA, 1000 bp, Homo Sapiens
gggcatagagctgttcatagagggctcttgttatagccaaacagacacagcaacaatctcaccatttatatatatatttttaacttgtccagctcatctatggaaaactactcaggtggtatgctgtttgaagcctcatcttcctacatgaaaattatgggcatttgtcccaatgattttgtttcagctgttctgtaggctgcataaccactctgatatttaggtatctgctattttattatcttaaaagacaaattaatttaattgcatgtgctagggaaaagctaccatgtacattcaccccaagtaaatagaatcctagatgaatcctagaaaaataatccctaagcagataggtagacagaggtaaacattcacatgatttagctctctagctcttgcactctgaacattcttgctttggttctgacttctgggaactgctttgcatttctcctatagatctgtagttaagggaaccaaggggtcattggggcaaaagcattgtttctcaaagctccttgattaagagaaagaacagaaatttgcacagaagatagtgtcaaggagtgagaaagtttgtttgagggcagtagctcagtgtggaagaaaatcctgaagtttctgttgaagccatacaatgttctatggggttactctctaagacattctctgaggtgtgtgaggaagtcactactcctagcctttgttaagatgtaattttaaatattcagttatggtactatgtttgcaactctcgtcttatcacaatgcctcagtagtttgttcccttagaaacatttagatgtgcacaaattaatcttttatatatctaaaggtttttctatcatgcattggattgctcagaataaagtgtctgttagacttcgttttggtaaataaattctccataatgtagattaataatataaaagtctttaatgacacaatatatctatatagcctcactgtataattcagaaataaaaattgattctgc

SEQ ID NO: 288643 - DNA, 1000 bp, Homo Sapiens; identical to SEQ ID NO: 222432

SEQ ID NO: 288644 - DNA, 1000 bp, Homo Sapiens; identical to SEQ ID NO: 117165

SEQ ID NO: 288645 - DNA, 1000 bp, Homo Sapiens; identical to SEQ ID NO: 117166

SEQ ID NO: 288646 - DNA, 1000 bp, Homo Sapiens; identical to SEQ ID NO: 117167

SEQ ID NO: 288647 - DNA, 1000 bp, Homo Sapiens
gaggccctgcgcaagttccaggcacacatccgtgtgcagggggaggctcagaaggtggagcggctcattgaggccttcagccagcgctactgcatgtgcaaccccgaagtggttcagcagttccacaaccccgacaccatcttcatcctcgccttcgccatcatcctcctcaacaccgacatgtacagccccaacatcaagcctgaccggaagatgatgctggaggacttcatccgaaaccttcgaggtgtggacgatggcgctgacatccccagggagctggtggtaggcatctatgagaggatacagcagaaggagctcaagtccaatgaggaccacgtcacgtacgtcaccaaggtggagaagtccattgtgggcatgaagacagtgctgtccgtgccccaccgccgcctggtgtgctgcagccggctcttcgaggtgacggatgtgaacaagctgcagaagcaggcagcgcatcagagggaggtgttcctcttcaatgacctgctggtgattctcaaactttgcccgaagaagaagagctcctccacgtacaccttttgcaagtcagttggcctgctgggcatgcagttccagctctttgagaacgagtattactctcatggcatcacactggtgaccccgctctcgggctccgagaagaagcaggtgctgcatttctgtgccctgggctcggacgagatgcagaagttcgtggaggacctgaaggagtccattgctgaggtgacggagctggagcagatccgaatagagtgggagctggagaagcagcagggaacaaagacactctccttcaagccctgcggagcccagggggacccacagtcaaagcaaggatcgccgacagccaaaagggaagccgcgctcagggagaggccggcggagagcacggtggaggtattaatcaatgcctccccagcccgactcaccattttaccaatttcaagagatacaattaaaagttactgctagcatgggt

SEQ ID NO: 288648 - DNA, 1000 bp, Homo Sapiens; identical to SEQ ID NO: 117168

SEQ ID NO: 288649 - DNA, 1000 bp, Homo Sapiens
aaaccctaaatctgagtcagtaattctcttacatccttcccaaaaatcagtgtctagggactagttgatctggatgagttatacatgatatttgacttttcataagtagtggaaggtttcactaagtaaaactctcagtttcttggtatctggctttcttatacagatggtgtccatttgctccaccagacaggagttaaaaacctttaaagagcatttaacatgccttttagttttcttatttcataatctacttttctatcattaatcatcttaccaggaataatcaaggcccaggtaggtagaagtttttatatagcctgaatactcacttgacttactgctcattttactttttgcatggaatacagccatttagtcctaatatacataccaatgagacaattaaaaattggttggaagatggagcttatcacattgtgctactacgactttattttttcttgaaaataaagccttgaggatgtgaacataaatgttggtatcataaaacaagtagtaataaaagcataaattatcaaatatcaggtgatcttactatggagaagaaaaaccaatatctagttacagatgaaaaaatgtttaatacaaagagctgaaaatgtagaaattgagttatcttccctttgcaaaatttttacactttaaattagtaattctttgtttgcaaggttttcatccctatgctgttgttttctactacctgttttactcttgttcatactgctactttcccatgtttcctatatgcctcccctatattggagaggataactcgcgtttacatatgtgatagttatgcttaatactaattcacagagttggctcgatcattttgagattctagttgctttatctcaaagctttcactgaagggctgtaactgaaaattattaaatgttagtctttagtcaaatctctgcattgtttcatgcagaaaataaagatacaattaaggctgaaaaaaaaaaaaaaaaaa

SEQ ID NO: 288650 - DNA, 1000 bp, Homo Sapiens; identical to SEQ ID NO: 117170

SEQ ID NO: 288651 - DNA, 1000 bp, Homo Sapiens
gcacgtgttgtagtttggagggaaataggagtacaaagaagttataccatggagagtactttatgtggctgtgatcagggaaaatacaagggtttacagattggtacccgagaactggaagagatgggagcaaaattttgtgttggtcttttacgtttgaaaagactgacctctccattggagtataatctgccttccagcctgcttgactttgaaaatgatttaattgaatcaagctgcaaagtaactagccctaccacttatgtcttggatgaagatgaacctcgattccttgaagaagttgattacagtgcagaaagtaatgatgagttagatattgagttggctgaaaatgtaggagattatgaaccttctgctcaagaagaagtactttctgactctgaattatcaagaacatacctaccttgagcccgctgccatctcttgttaactgcaaagaataaatgaaatatcttggtttttatttcccaggaagcttgagagaaatgagtttatacagagctgactcaaaaagacaaaaagtaacttgggccagtttggtttcaagataataaatgtgttattaattaatgataaaattggcgcttgttttattttcgatattcaatgcactttatgtagcattgaatgatcaaatattggatttacctttaaaaaaaaaaaacctgagtatcattgcatgaatttttatctccctatggttatatcctgcatcaagtggataattttgaagtgtgttcagaatataaaattgaaattttagagttgttgaaaatcctgacttgttgaaaactaatatatatgtacatggatttctatagatgtgtttgtttagaagtgggtagatattgcagataagactgttcttcagaatcatgttaactattgggttgtgactgaagtagtgcagggtttgccttgaaaccattacattctacatttaccaaattaaacaaataaaaactgtattaaatgttgc

SEQ ID NO: 288652 - DNA, 1000 bp, Homo Sapiens
gtccggagccagaggccgtggagcggggcccctgagaccagtcaccggcctgagaaggagtggcctattaagagtctcaaagtctacctgggagtgaagaagaaactcaggccacccacctgctggggcttcacagtggtgcatgagacagagaaacatgagaagcagcagtggtacctctgctgtgacacacagatggagctccgggagtggttcgctacctttctgtttgtgcagcatgacggcctggtgtggccctcagagccctcacgcgtgtcccgggcagtgcctgaggtccggctgggtagtgtgtcactgatcccccttcgaggtagtgaaaatgaaatgcgccggagtgtggctgccttcaccgcggaccctctgtctcttctgcgcaacgtctgagcacaggagcccatccttggctctaggattccgccgctggaagccttctgttcagacaccccttatgctccaaggcctgatgtgagccagcggggggtgcatgggaaactgcaccccacaacccacatcctccatcctgactgcagcatggggttccccggcaggggtgggaggcagcaggggtcagcctgggcaggaacctctcccaactctgtccaggtgttcagacctcttggcccaacctgctcaccccaccgggttcactgtccttgtggggctggagagatgggcataagtcaggaacttgggaggaccaccaccctttcagaggcgtgaggccctggggccctgccggaagggagccccctgctcctcccaacaaactccagaacagcagaaagcgggtgctgtagaggagcactcagctcacggggagggagctcttggctgagcttctacagggctgagagctgcgctttggggacttcagccttccttccagtctgggctgagtggggggtccagactacctgatgccccttccccaatttggggactttttgataatataaatatatctgtatattttacccta

SEQ ID NO: 288653 - DNA, 1000 bp, Homo Sapiens
agaagtccaccaaaagccttgttataggtcctcttgattttcgtttggatagcagtgcggtgcataggattttgaaaatgattgtgtgtgccttggaacatgaatatgaaccatatagcaggctaaaatcagatattaaggatgaaaatgaaacaatactgaatcctgaagaggtggctcttctggaggaatatattcctactcgacatacaagtgttactctcctcaaatgtacctgcacaatttccatggctgaattcaacttgctggaccatttactacctgtcattatgggagaaaagaactcaagtaacttcatgaatactacaaacttccagtctcttcggcctttgccatccattcgaatattggtggataaaattaatctggaacattcagtgccaatgtatgctgaacagttggtgcatgtggtcagcagccttactcaaccttctgataacctgcttcattattgttatgtacactgctatcttaagatatttggtttccaggcaggactgacgtctttggattgcagtggatcttactgcttacctgtaccagttattccctctttcagcactgctctttatgggaaacttctgaaactccccacatgctggaccaaaagatctcagattgctataactgaaggtatatttgaacttccaaatctcacaattcaagctacaagagcacagacacttctcttgcaagcaatatatcaaagttggtctcatcttggaaatgtcagctcttccgcagtgattgaagctttgataaatgaaatcttcctaagtatagagattgggtcttgctatgttgcccaggttgatcttgaactcctggcctcaaatgatcctcccacctcaacctcctgaagtgccgggattggaggcccaagccactgtgcctggccctttataaattatgttataatttcatgtaatacataattgtatagtcaaaatggctcacatattaaatattctttatacaa

SEQ ID NO: 288654 - DNA, 1000 bp, Homo Sapiens; identical to SEQ ID NO: 117171

SEQ ID NO: 288655 - DNA, 1000 bp, Homo Sapiens; identical to SEQ ID NO: 222436

SEQ ID NO: 288656 - DNA, 1000 bp, Homo Sapiens; identical to SEQ ID NO: 222437

SEQ ID NO: 288657 - DNA, 1000 bp, Homo Sapiens; identical to SEQ ID NO: 117172

SEQ ID NO: 288658 - DNA, 1000 bp, Homo Sapiens; identical to SEQ ID NO: 117173

SEQ ID NO: 288659 - DNA, 1000 bp, Homo Sapiens
cagatcagaaagaatctctcccaacattttagagtcttgcttcccaaaccagaaaaagtcagactcattgttgatttaaaacttttaacattttgtttggctggattgtactactttacctctactttaccaccaccacccttttcctccctcctttccaaataatatacagaactccaaaatagcttcatttaaggatttttttgtgagttaacaatttccttgaaatcctgtgagatagatttgcacagacaccttgtgagtgattggtattggaggtgttcaagaaactgttcgaaaaagaacaaaaacacttccctcgttattttctctcattttttgatgagaggaaaatttgaaacattattcttgttgttgttggtaatagcataatgacagtgggaggggtacaaggggataagaaaaatgtcatgatttttttccggtcctgccacatgtaacacttactctgttacctaaattttatagttagatcatatccaatctacttattaaactgtgttctatttaccagtggagattttctgcagtggttgcgtttcactgtaaggataatggagttcctctcctctgctttcctcagaggatggtcctttaacatagccagaaacaagccctgtggtttgaaggtgagctgtgaggatgggactaattgatatgcaccagtttacaaagacagtcttaacatccgagaatacaccatctttttctctggataattatttcttacatcatgcttgattcctacattttgttgggtctcaacattggctcacgaatgctgttaatatttattctgtattgataaaaagtcagtcttgccactacaagtaaatcccccatttaatattttcttctttagcatagcactgtcattttttgtgaaaatggttatgtttatttattacaatactgagtcatatataaattttcaataaaagcagaaactttcttaccttaaaaaaaaaaaaaaaaaaaa

SEQ ID NO: 288660 - DNA, 1000 bp, Homo Sapiens; identical to SEQ ID NO: 222438

SEQ ID NO: 288661 - DNA, 1000 bp, Homo Sapiens; identical to SEQ ID NO: 222439

SEQ ID NO: 288662 - DNA, 1000 bp, Homo Sapiens
atttcctgcgttgcagtgtcaggatttttcagggatcagccttggcactggagaccttcacattttccatctggttactatggcacacatcatacagatcttacttacctcatgtacagaagagaatggcatggatcaagaaaatcccccttgtgaagaagaatcagcagttcttgctttgtataaaacacttcaccagtatacgggaagtgccttgaaagaaataccatccggctggcatctgtggaggagtgtcagagctggaatcatgcctttcctgaagtgttctgctttattttttcattacttaaatggagttccttccccacccgacattcaagttcctggaacaagccattttgaacatttatgtagctatctttccctaccaaacaacctcatttgcctttttcaagaaaatagtgagataatgaattcactgattgaaagttggtgccgtaacagtgaagttaaaagatatctagaaggtgaaagagatgctataagatatccaagagaatctaacaaattaataaaccttccagaggattacagcagcctcattaatcaagcatccaatttctcgtgcccgaaatcaggtggtgataagagcagagccccaactctgtgccttgtgtgcggatctctgctgtgctcccagagttactgctgccagactgaactggaaggggaggatgtaggagcctgcacagctcacacctactcctgtggctctggagtgggcatcttcctgagagtacgggaatgtcaggtgctatttttagctggcaaaaccaaaggctgtttttattctcctccttaccttgatgactatggggagaccgaccagggactcagacggggaaatcctttacatttatgcaaagagcgattcaagaagattcagaagctctggcaccaacacagtgtcacagaggaaattggacatgcacaggaagccaatcagacactggttggcattgactggcaacatttataa

SEQ ID NO: 288663 - DNA, 1000 bp, Homo Sapiens; identical to SEQ ID NO: 117174

SEQ ID NO: 288664 - DNA, 1000 bp, Homo Sapiens; identical to SEQ ID NO: 222440

SEQ ID NO: 288665 - DNA, 1000 bp, Homo Sapiens
tgaaacagggccattgcagaggttgctgcccaaagccaggcccatgtccctgagcaccattgcaatcctgaattctgtcaagaaagccgtggagtcaaagagcaggcatcggagtcggagcttaggagtgctgcctttcactttaaattctggaagcccagaaaaaacgtgcagtcaggtgtcttcatacagtttggagcaagagtcgaatggcgagattgagcacgtgaccaagcgggccatcagcacccccgagaagagcatcagtgatgtcacgtttggagcaggggtcagttacatcgggacaccacggactccgtcgtcagccaaagagaaaattgaaggccggagtcaaggaaatgacatcttatgtttatcactgcctgataaaccgcccccacagcctcagcagtggaatgtgcggtctcccgccaggaataaagacactccagcctgcagcaggaggtccctccgaaagacccctctgaaaacagccaactaaacagcgcctcccaccagtgtccaggcaggcaggagcccttgaggaagcagtctcgtgtcctccgtgtgaaggcagctggatcacttcccgcagtccttgggcagcgctttgctgtggaacacgagagctcctcctcaggggcctggcactcaccttctattctgtatgatgtatttggttaaacactgtcaaataatagagatgtgccagatttagattttcttaccctaatctgtttaatattgtaactttattccatttgaaagtgtcaagcccattcagataagctataatctggtctttaaggaatacaactttaaaactgcagctttcttttatataaatcaagcctctgttaacttgaattccttatagtacatattttcccatctgtaatgccggaattttgattctaatattttttctattatttataagtgcaaatttttttaaaaagtgtacagctttcttaaagtaataaaggtttagcataaatac

SEQ ID NO: 288666 - DNA, 1000 bp, Homo Sapiens; identical to SEQ ID NO: 117175

SEQ ID NO: 288667 - DNA, 1000 bp, Homo Sapiens; identical to SEQ ID NO: 222441

SEQ ID NO: 288668 - DNA, 1000 bp, Homo Sapiens; identical to SEQ ID NO: 222442

SEQ ID NO: 288669 - DNA, 1000 bp, Homo Sapiens
ccaagttcatcgcagcatgttcaccatatcccagcctccaaatctatcctcctaccttccaacgcatgacctgttggggagcagagacttaacccccaactcagaggaacccttcctccagcgtctttggcatggtttctagggtgagagttcccaatttggatagaacggccaccatattggttactgaatctctctcccttgtttttattacgtttcctttttcaaactgtccatgggaaggctgaattgagtgactccccagaatgaagatgagaaggtgaatataatcaatgccaatgtaatgccagcgggtgagatggccgatggaggtttcaaagatgtagctagcattttgaaaccatatgggcaaaacccggcaaccagaaggggacagataaggaccgttccagaaatcccaactctcacacccagcccaggctgcagtctccacaccaaacagtcaacaaaacacaaaccctgaaggaaaaccttttccatacacccaggctatgcattgaagagttttccactgtatacatttttatccagatgaaggtatttttatattttgacaataggaaacagtgaccattttcagagtaatcaaatctggaacaaatgaaacatcttttagccaccaccaccctgttgcaattaagacaaccgtgggggaacacaccactttttactgttgaaaccaacacaacgttgaaatccaggcttatacgcagactccgattcctagagaactaaatttggctttagtgtgacgggatttgattaagcacttagtatagtcttttgaacacggaaatcctgttgtacttaaagctagcggacccgtgaacaactttgtcaggttcacgtcctataacggttaaaaaacacacacacacatacacaaaccgtttctatgagagattgatgaactttgtttaaaattttaaaaaaaggaacacgttctgtaaacgagtcgctaaatacagaattgtataat

SEQ ID NO: 288670 - DNA, 1000 bp, Homo Sapiens
aagctctcaaggcaatgactcgaagtttgcagtatggagaacaggtgaatgaaatcctgtgccgttcttcagtctggagtgccttcaaagatcagaaacatgatttgttcatttctgagtcacaaacagcaggatacctcacaggacctggagttgctggctaccttaccgcaggtacatctacatcagtcatgtctaacctgccacctcctgtagaccatgaggcaggcgaccttggctatcagacttgaaatattcacgagagacaataaacgctgaaaggccagtgccaagtccacattcctccagctgatacgttgaagcaaactcttactgcctttctcctggtttcatgacagtgttattcctttttctataaatatatttttaggaaaaaaagtcagtgatcctaattgtatcacattataagaaagcactctgtggatcaacataagtgggtacacaagaattttttttttcttggtgtatgtaagcacatttgttcctttatatctgtttacaaaactgtgaatcaaaaagacaaaactttcttcctagtttttgtaattttttttttgaactagcatgactgtagggttgagctacagtcaacaaaaattgggctaagtcacttttccccaggaaagaatatttccctctcctgcatcaagtctgcgtggccatcctccccccaccatccaagactattaggttttgtccctgcacccttcactggcatcctcaatcattaaccttctgaaagctcacagtacacattagtatgtataactggctttaccaaattgaatgaaaaggagcttgtgcaaaaaaatttaaaaatggatgtcaagatgttatgtaaaagatgagtgtaattgtgaaatgttctatacactatcaaatatataaagctttctatattgaatgtacattatacagatcattcatatgtgtacataaaattttaaaaataaagggaattgactgctttgttaatgag

SEQ ID NO: 288671 - DNA, 1000 bp, Homo Sapiens; identical to SEQ ID NO: 115351

SEQ ID NO: 288672 - DNA, 1000 bp, Homo Sapiens
tggacagaggctgaggaatttcctggcttccccagatagtgtcctgggacatggtatgctttggggctggggtagcatggaatccctctgaggacctggatactggtactacggggtggggaagaggaaccttaaacttggctttccccagccttcagcctgagtctagcatgtttctagctccccagtcccttgtgaagccttgagggctggcagaagggttaggaggttgaactctagattcccttcctgtctttgccttccttttacccctttccctgcaacctccttgactctggcctgaatttgttggtgcctcagtttctctgtctgtacctatttaagccaaaggcactagcctgaattttgcttgaagatcactttgtcttggaaatgactagagaggcagaggagaagggtttccagagttgctaggtttgggagtggaaggggcaggcagtgcacttgcccctcctcatgccccttctgacaccagctccctgtggaggcctggtttctgggtaatgcctcccttgggcatcttcatgcatcaaccaaatgggccatcaggtacttcattagtcatggcagaaggaggggaaaagacttgttttccagacagaaaatctactcccctgtccccagccatatccctggataggaagggataggaagagactacttggtgccatggggtaggggtgagggtataagtagatcagagtgggaagacctcagccttgggtggcttgtctctgcttcttgccaggtgggagggcctgtccacaccctggatccccgtaccacagtgccagccatgcccttcccctgggctaccattgtccctttcctcacccagttggtagaggagtcaggaggtgggaggccgtgggctttggttttataatgtaaccactgtgggggtgggggaggatggtgaaccatgtatttcagtgaaatatttaatatatttaaatatcaataaaatcaaactctttgt

SEQ ID NO: 288673 - DNA, 1000 bp, Homo Sapiens; identical to SEQ ID NO: 117177

SEQ ID NO: 288674 - DNA, 1000 bp, Homo Sapiens; identical to SEQ ID NO: 222444

SEQ ID NO: 288675 - DNA, 1000 bp, Homo Sapiens; identical to SEQ ID NO: 222445

SEQ ID NO: 288676 - DNA, 1000 bp, Homo Sapiens
aatacttctaacattattctttgattccagcttttagaatgggtgtacaatgccctgtttgtacttactggttagggtcagggtaacttgccagcccaagataaatactttaattgttaaaagtcagaagagacagaatatgtaggaaatgttttttgtttattatgtaaacatggcttacagaattatgaacagtggatagattaaaggcatttaatatttgtaattcataataactgtagaaatggccctaaagcatgctgcataattaataatttatattttcattattataagtgtttatattaatgatcttgcatttgattatatcaaattcgtcatttcatagcaacagtattgttttctctgtttttcttctctaacttctctgaaatcatctcctattaagggatagaaattgttactagaagagaatcacatgttctgtgttcattatccctacacatgtaaattaattattttatcaatactagatagagttcacatgctgactccctggatacctacagttgagaagaaaatgacagacaattatttttcctttaggtcaaaataatgtcactgctatctggataaattataagttcatatatttgaaataagatcctggaaacgaatttaaatggtgtcaaactgcagagcaacagggcttcagtatattcacatctaataggttaatatgtacatttggatgatgatttttcttgataacattaacattaattttattttttcagacatactgtaatttaaaaattaatgtgagcgtttgttttaagttcacagaaaacttaataattcaaattctcaggaattaaggactcaccataacattgtcagttctaatgaaattttgtaaaagatggcaagtttgttacctcacttgagtggggttttccttttcccccaattctaagagaatataatgtgtatactaaaacattaataaacataattttgaaaaaaaaaaaaaaaaaaa

SEQ ID NO: 288677 - DNA, 1000 bp, Homo Sapiens; identical to SEQ ID NO: 222446

SEQ ID NO: 288678 - DNA, 1000 bp, Homo Sapiens
ccacaaagaattttcagtgggaatgtctagtctgaggggtctgaggttgtttttactttattgtgttgtttaaatattttaaaaatatctttagcgtttggtcttttttttttctgtaaacatttaatttggtctgagaaaagctgaatgtttgggtgtgacgtttgactgaggtggattggggctgcctgtggacattagtgaacaggtggtaggcttcaggaatatccagttttaatcagttgcatttggtacagaattttgagtaatggtgaaaattgttgtctttggaaagcacaaaagaaacctggaaaggcagttcggctcaggtagctacacataacattgtgtatgattttcacttcaaagctgtctggaaggaaatgcagtcagctccagctagtactatttatgtacccagataactaagatattgtttcatggccttgccttagtcagaggcccttttctctgtcctgaacccccaggtatgggtgaaattggaaattactaatctattggaaatcagttcctgacatagtaaagtttgctttcataactgcagcaaaaaaggtcaacttgccaagtcactgctgccatgtgtgtactgtattattttcagaaaaaaatataatagtctgagtccaagttatcttgatttaaaattgatagagaaaagaaactgtcgagcaagttatataacaactaacaacattgcactttctgtatatgaaatcaatatttaaataacttatttttctccattgctgttcttaaaaacattgtaagtagctgtaatataccagtaccaatatgttcttgcaattgcttcagcccaagaaagctgtgtattgttttaaaaattgtaaaaattattgtgatgattcatttagcataaagagaggtggacggaagggttttcctatgtatcaaaacttgtctataattatgtcatctatgtacctagaaaaaagtaaataaatttcttcagttgaatatg

SEQ ID NO: 288679 - DNA, 1000 bp, Homo Sapiens; identical to SEQ ID NO: 117178

SEQ ID NO: 288680 - DNA, 1000 bp, Homo Sapiens; identical to SEQ ID NO: 117179

SEQ ID NO: 288681 - DNA, 1000 bp, Homo Sapiens; identical to SEQ ID NO: 117180

SEQ ID NO: 288682 - DNA, 1000 bp, Homo Sapiens
ttctgactacatctcagactgctgggatagcatttttcacaacaactggagggaaatgatgcccctgctgtccctgatcttctctgccctcttcatcctcttcggcactgtcatcgttcaggctttcagcgactctaatgatgagcgagagtcaagccctccagaaaaagaggaagcccaagagaagactgggaaaactgagccaagcttcaccaaagaaaacagcagcaagattcctaaaaaaggctttgtggaggtaactgaactcacagatgtaacatacaccagtaacttggtacgtctgaggccaggccacatgaatgtggtcctcatcctgtcgaattctaccaagaccagcctactacagaaatttgctttggaggtctacacatttactgggagcagctgcctacacttctccttcctgagtctagataaacacagagaatggctagaatacttactagaatttgctcaagatgcagctccaatcccaaaccaatatgataagcatttcatggagcgtgactacactggttatgtactggctctgaatggccacaagaaatacttctgcctcttcaagccccaaaagacagtcgaagaggaggaagccatagggtcgtgcagtgatgttgactcttccctctacctgggtgaatctcgagggaaaccttcctgtggccttggatccaggcccatcaaaggaaagttgagcaagctctctttatggatggaacgcctgctggagggctccttacagaggttttatatcccatcatggcctgaactagactgagaggattttccaaagagatttgaactcttcagactttttaacatgcccctgtgaacaggtattttcaggactcaaactaccacaatgaacagagtatagattttagattgctcttctagaaccatggctagaagaatctttcctttgtcctgttctaacctaggaatgaaaaacaccaccagttcgaaaaaaaaaaaaaaa

SEQ ID NO: 288683 - DNA, 1000 bp, Homo Sapiens; identical to SEQ ID NO: 117181

SEQ ID NO: 288684 - DNA, 1000 bp, Homo Sapiens; identical to SEQ ID NO: 222448

SEQ ID NO: 288685 - DNA, 1000 bp, Homo Sapiens; identical to SEQ ID NO: 222449

SEQ ID NO: 288686 - DNA, 1000 bp, Homo Sapiens; identical to SEQ ID NO: 117183

SEQ ID NO: 288687 - DNA, 1000 bp, Homo Sapiens
agagaaatgctaattttgaagcccttcctgaggattggagagcaaggctgaagagaaggaaaatggctccaaacacatagtttttaagtttttaaaacttttttgtattattgtttgttttgtgttcagttcaaagtcttaaccagttttattgtcaaataaactataaatgttatgggggagatcttataaatttcctgggcaagagtgtatgcatacaaagttttcacttttgtgaaatgtaatttttctgtttttgcaaagggatgaggtgattggaattgctttgaccatgctgcctttattctcaaactggcaaacttagcatgttaggtgtattaacctcatcagtcttgaagaacatgtggctcatgagtataacacttctgtagaggactccctgacaaaagtgaagaattaacttctcctccagaacaagtgcaattcagaaggcagctctgcattctaccttgcttgactggaattgtctgaagctttttctggcctcttttctctagtcggccacccctgaagtgctgaggtctaagtggtttacctcgtgctgatagatggccacactctttagagtagttctcataagttctagaactggtagctcggtcgtttcgcacactaggtggcatacaggcagcagcaggtgttcatatccttgattttgagaatttcccctcaagtatgtggcagtaaatacaacaagacactctatgtattaatgtctccattgtcttaaccctgttccaaaacaaaattcacctcctttctttatgtgaatgtattctccataaaattccagtatttaaaaagcagtttactgttctgtactttctgttgtatcacaatcaggtaaaagtcactttaaactgaggaaacggcaaattgtgttttaaagctctttgtatttctccagtttctgaccttgtaaatttgtatatatgcactaataaagctttttttataatcctgaaaaaaaaaaaaaaaa

SEQ ID NO: 288688 - DNA, 1000 bp, Homo Sapiens; identical to SEQ ID NO: 117185

SEQ ID NO: 288689 - DNA, 1000 bp, Homo Sapiens; identical to SEQ ID NO: 222453

SEQ ID NO: 288690 - DNA, 1000 bp, Homo Sapiens; identical to SEQ ID NO: 117186

SEQ ID NO: 288691 - DNA, 1000 bp, Homo Sapiens
ggaagagatctttttttactagagatctgcagaagaaacgcaatcttctgagcacaatatggaatctaaaggttttatcacttagttgttcatattatgaacctaaaaataatggcataaagtttggggatgccaggcatactttttcatgtttggtgttgagttattttacttttctaacccaacattccttggtgagaccattaaatccaaacacttgtcaccgttccttctcatagtcactctgggtcatcagcatgtcccagtcactgcagcaacgccttgtgtttgtttcatttttttaaaacccacacaaagccgctgtctcactttttcctactttaccaacctcagagtatttcggcccgtatcgaacttttgttctcagtatcagcccatggtttcaggatcaaagctgtcatgttggagattggtaatggctttcctgtctttgtacagttgaattcctagtcttccttcatccttgccctctgttggcacaggcattatctctgcaattttagaaaatgacaagtagagaatactacattgagaaactaaaccctcttcttggggtcctgatactcattcccatttgtcccagtgctgacaacccaatcttcccaatactttcaggcctgctctacaaaagtacctgttcttgtagaaattttacagtctgccattttgggtgcccaccccaatttttaccttttagtaagttggcatgaaattttggtaaaatctgaaaatcacatttcagaataaaacaattgggcaaaactacctaggctttactcttgagtgtctccttttgatagggattgtttctggaccagtttgtctaagtcctggctcttattggttcatatgaaataatgttaacttcacttctttgtatattatgtataaattagaaaatgaaaaatgtgtgaataacattgtatgaaataaacctggtcttgtgtttttctctagataaaataaaaatctgtacctc

SEQ ID NO: 288692 - DNA, 1000 bp, Homo Sapiens; identical to SEQ ID NO: 117187

SEQ ID NO: 288693 - DNA, 1000 bp, Homo Sapiens
acattttatttttttagttcaacagctgctctgtcacataatactttgtaaatactagtgtgaaaaacagataggatgccttttccagtggtaggagcatctgtaagtgcatttaaatcattagaagcttttttccaaaactagaaacccttattaaaaaatagacatttttttctaaagattattagttaaaaataactaaaagagttccttagagtaatcatttcaaccaaatgaatttcaagcaacaacttacttactatttatcaaagggatttaattattttgaatataattataaattaaatttcaaatatttaaaaatactattttatataattccttatgacattttaaactttatattttaaaatatttgaatacgaaaagatcagtctacctctactccattctagacaaagtattaatccttagtgaaagtaattaattaaattgccaacttggcattattattaaacttgataggaacgcaacattaaatttaaaaatgttttcccgtgggtaattttctattatatattttcatatgggcaaagggaaaaaatgataaatcctctgtaatcacaaaccccaatttcgttttgtttattcagcttctaaaatattgaacacccagacttttaattcaacctttaagaaccttatcatttatgtttcagtagatatcaaagtaatccatgtttgtgtcaaatgatcatagaaaataaatagaagagacagtgaagcaagtaaaaagaaaagcattgttttaatttgtttgcattaatttttttcatttgtcaaaatgcttcttttgttgccacagtaaagaacagtttttattgttttgtaagtaaaattacgtagctgattttgtatgtaaagattaatttccataataaaaattattgtatgtttactgtgatcttaatgggcagggttaagaaagttatttaaaataaagttacctattctactaaaaataaaaaaaaaaaaaaaa

SEQ ID NO: 288694 - DNA, 1000 bp, Homo Sapiens; identical to SEQ ID NO: 117190

SEQ ID NO: 288695 - DNA, 1000 bp, Homo Sapiens
ccaagatgcagggtggttggggccaggagtttggaccctctaggtcttgggggaagagctgggtaatacctggtgtctgagtgattctctgcagacccttcccctcctcaaggatcacccatcctcctttcagccccctttatggggaccaggcagctctggagccagccacaggggctgttagagaagcaaggcctggagtggcctgcaccgagtagcagggtcagggttcgtgtgctcctcctcctgctgcaggggctgcacatcccattgccccacttctgctttgtgtctccctctgtctagcttccagggcagggagcaggccccacctagggctgcaggcagtctggcctgtgccagcacggtctcctgtgcccaccagccccacaggtgctgtgctttgtgctcttggctgctgtgctgggacagaatgggatgccaggaagagaagaaagggggtgcagtctgaggccaccaccccccttcctatctaagggagggctgaagacaaggggccggcattcagtgggcagcagaaaggagaggctccttgaagctgctcagtcagaggcccccgtccctccttttgccttccgcaggactgaagacctgaaggggctggcttttggagtgttgaggtgaatatctgggagcagagatcatgaatagctcagggcagtgaatggcgcaccaagagcagggctgtgtgtgggaggctgcagccaggattgcctcagctcctccccctcaggctgggaggatagcacaggctaggggctcggggtggagggtctcagctctgctgcccccaccccagtactagcctagcttcccaagctgtggcttagaggatagttggcttcctgcctctctcctctaaaatagcaagtctgggaaatcctggggtgagtggagtcaccccactcccagttgctggcagagactgagactaaagcatcacttaataaaccccccaagcccaaaaaaaaaaaaaaaa

SEQ ID NO: 288696 - DNA, 1000 bp, Homo Sapiens; identical to SEQ ID NO: 222457

SEQ ID NO: 288697 - DNA, 1000 bp, Homo Sapiens; identical to SEQ ID NO: 117192

SEQ ID NO: 288698 - DNA, 1000 bp, Homo Sapiens; identical to SEQ ID NO: 222459

SEQ ID NO: 288699 - DNA, 1000 bp, Homo Sapiens; identical to SEQ ID NO: 117194

SEQ ID NO: 288700 - DNA, 1000 bp, Homo Sapiens
atcagaaaggaaaattctcaaggccttttgaagagcataagaagatgaagattgtaaacttgtataaaattatcttggtgagaagacaaattgtaaagtagatatttgtaatcttttaccactttggggttgcttttttcccggaattcatcagaactttgaattttttttttaaatgggctgtttttaatgcaggggcttttcttccctagaaacccaattctaagcagaaaaagaaaaaaaacacaaaaaataaaaaacccctacaaaaaaactttaaaaaaaatggcagcaaagggtagttttcatctggtgtcttttatttaagttttttaagttaagaaaagctggtgacatatttatacgtttttgtgcaaaaataaatgaatggcaatagattttaaaaaatcttattatgtacttctgtgtgaaaaagtctgtataatatttcccttaaatatgcattattttacttgtgagttttttactgaattaatctgaaatgtacaagccctggatttgctacagagtgagaagttattttatttttttttatttttaattttggaaattctgcagaaatcagaactcttaccatggtttgaacaaaaaaaggggaaatggggaggggaaaagggtgggattgtccagcatgcttgtatgtatatttcagaaccttttttaaatgtaaaagctgtacatttctgggaagttctgaatttcttttgtttccttttttccttcaagcattttgcagtgagcttcttttatatatagcaaacaatttgaaagaatacaaaaatatgtgaagttcatttaaaaaaataactacagtatagcgctggtacagtacactaaaagactttgataaaaagaaacaataataaaaggcctccattttaaatgtcattcatatataccttgtggatgagagctatatacttttacacacttttttagaggaataaattattgaattactgaaaaaaaaaaaaaaaaa

SEQ ID NO: 288701 - DNA, 1000 bp, Homo Sapiens
agtcacacatcaaaaaaagattacccttagtgtatgtgttttaatattagaaaattggcatatgtactttatttttgaaaagggaagagatgggtgtggggtggcaatagcattgtgccattttgtcatagaatgtaaaaattggttaactttacaaatgtcagctagttttgactactaattgggggaaattttagataatttttaaattcaaagttatttataaaatgctagaatttgttttaattttttgtattttgagccacttcacatgaagactcagttgcatttttatcgaatacatttttatcaaccagttaaagactatggtggttttttcagagtttggctaagaatgttgttaccatcttctttgtttgtggtacaatattttcagtgcaaaagagatgtcattcagttaaaaagacaaacctctagatgtgtaattacatggaaaatactagcaatgtgaatgcttttgtagtaaccatcttgtagtacctgtgaaatctataactcagaaatggtcagatggtcaggagccagctatgcagcagtataccatctgtttaattattttgtaggtcctgtgtgtggaaccaactataaacccagttctaaagttgtgtatgatggtgaacctttgggaatagttcttatcaacttaattggatacttttagcaaataggaacttaattctcagcactgaacatgaattacttccttggagtttttttcattcatatttttgttgtttccaggaatttatttgatattaatgggcgtaaaacagcatcattgtacttaagctatggatgtttttattttatattttctttatttataactgtgccaagtattattttgctacttaccgtgttattctgtggaaagaaaaacctgtaaagtgtttaataaattagccctccttacataaattaaatgtcaaaattttgtaaaatattaatcagaataaatactgactcttaaaaaaaaaaa

SEQ ID NO: 288702 - DNA, 1000 bp, Homo Sapiens; identical to SEQ ID NO: 117195

SEQ ID NO: 288703 - DNA, 1000 bp, Homo Sapiens
actgcaaagctgtcttctcactggtactgccttgtgagtactggttggactgtggggcatgtggccgctgcagttccagtggttatttctaagtctatgacaggacaggctgttcttgcttcagaaccttctctgacagacacggtaactaaatgtgaaaaaccaataagctggtgactcatgaatacacacgaggaaaagcagaggtttattttatctgccttttcaacatttctttccctctgtgaaatgattggtcagatgtctttgagaagtgttaaactaattcacatggtagtgtagggccaacatacaagctaccagtctaatgtgtatagtagactttgggaaaagcgattttttttcatgtattcattctgaatagttgaaatgtatatttgtacagtcttttagacctattcaagtgatgctcatgatcctgttactgtgtgcccatcatagatttctttttttagtgttgcccttgctgtgtaataaacgctctatctagtttacctagcaaaagctcaaaactgcgctagtatggactttttggacagacttagtttttgcacataaccttgtacaatcttgcaacagaggccagccacgtaagatatatatctggactctcttgtattataggatttttcttgttctgaatatccttgacattacagctgtcaaaaacaaaaactggtatttcagatctgttttctgaaatcttttaagctaaaatcacatgcaagaattgactttgcagctactaattttgacaccttttagatctgtataaaagtgtgttgtgttgaagcagcaaaccaatgagtgctgcattttggatatttagttttatctttagttcaacaccatcatggtggattcatttataccatctaatatatgacacactgttgtagtatgtataattttgtgatctttattttccctttgtattcattttaagcatctaaataaattgctgtattgtgcttaatgt

SEQ ID NO: 288704 - DNA, 1000 bp, Homo Sapiens
acctctcaccttatccttgccatccacctaagacagcacaacagaatggtgacactccagaagcccaaggattagacatcacaacatatggggagtcaaacttggtagctgagcctcagaaggtaaataaaattgaaattcactatgccaagactgccaaaaagatggacatgaagaaactgaagcagagcatgtggagtctgctgacagcgctctccggaaaggaggcagatgcagaggcaaaccacagggaagctggaaaagaagcggccctggcagaagtggctgacgagaagatgcttagcgggctcacgaaggacctgcagaggagcctgccccctgtcatggctcagaacctctccatacctctggcttttgcctgtctcctacatttagccaatgaaaagaatctaaaactggaaggaacagaggacctctctgatgttcttgtgaggcaaggagattgagttcactatggagaagtcagcagcaggaggcccatcccttactcagttgccgggacatccccagtctcgggggaagaagatgccatgggcttatacccaggctgtagccaactaccaacgtgcctgtttgtttgttgctctttccttctctccatcatagtctgggtgccagcgccctgaagctccgtgctcaactgattaaactttactgccctatggtgaccatctaggagaggggagggcagagggggtgagggtactattctggattgagaaaacctatatccattctttatatcaatgtatagttttagtctcctaaattgatctgttattttccaaactattctcttgtagaaaattttccagtgggcacttaatggtgcccttgaagaacttcctaatccatgtacataaaatacatcatatgtacacttataaatgtatatagaatgctcaaaaataaaattcttaataatagaactggcaaaataaaaaaaaaaaaaaaaaaaaaaaaaaaaaaaaaaaaaaaa

SEQ ID NO: 288705 - DNA, 1000 bp, Homo Sapiens; identical to SEQ ID NO: 117197

SEQ ID NO: 288706 - DNA, 1000 bp, Homo Sapiens
acggtaattcagtaccaaactgttcgatatgatatcctccccttatctcctgtgtcccggaatcggctagcccaggtgaagaggaagatcctggtgctggatctggatgagacacttattcactcccaccatgatggggtcctgaggcccacagtccggcctggtacgcctcctgacttcatcctcaaggtggtaatagacaaacatcctgtccggttttttgtacataagaggccccatgtggatttcttcctggaagtggtgagccagtggtacgagctggtggtgtttacagcaagcatggagatctatggctctgctgtggcagataaactggacaatagcagaagcattcttaagaggagatattacagacagcactgcactttggagttgggcagctacatcaaggacctctctgtggtccacagtgacctctccagcattgtgatcctggataactccccaggggcttacaggagccatccagacaatgccatccccatcaaatcctggttcagtgaccccagcgacacagcccttctcaacctgctcccaatgctggatgccctcaggttcaccgctgatgttcgttccgtgctgagccgaaaccttcaccaacatcggctctggtgacagctgctccccctccacctgagttggggtgggggggaaagggagggcgagcccttgggatgccgtctgatgccctgtccaatgtgaggactgcctgggcagggtctgcccctcccacccctctctgccctgggagccctacactccacttggagtctggatggacacatgggccaggggctctgaagcagcctcactcttaacttcgtgttcacactccatggaaaccccagactgggacacaggcggaagcctaggagagccgaatcagtgtttgtgaagaggcaggactggccagagtgacagacatacggtgatccaggaggctcaaagagaagccaagtcaaaaaaaaaaaaaaaaaaa

SEQ ID NO: 288707 - DNA, 1000 bp, Homo Sapiens; identical to SEQ ID NO: 222460

SEQ ID NO: 288708 - DNA, 1000 bp, Homo Sapiens; identical to SEQ ID NO: 222461

SEQ ID NO: 288709 - DNA, 1000 bp, Homo Sapiens
tttgggaggtgggaggggacgtcttattaacaaacgggggcgcatagctatcacctgtagctccctccctacctgtaattccagtctttgtgcatttgtcatctgcccttaaaggaatgattttcaacctttctcccttctcaaaatgcttgcctcataatgcataactttcactttgactctggtcttgaaattcctagtttaattcgccttgatgttctgccttataaatgcacaatgatttgtactgtctaataaaaacagtgtatactttgtatgtgtcgtgcattcagtggtcttcatcctgacacagtggttcgagatcaagttgtacaggctgtgcattttaagatactagtttcagtctttcaaagccagccaggctacacacagaaaatgtttactcaatcattcaaaaaagagaaaaggagagaaagtaactttgtttggtaaagcaccagtactccaaccttccagaaagccgattatcttcattgcttttaatgttctattctgtggcatatggttttctgttactttcgttgtcaaaatgccatacccaaatacacagcaatgaatggcacacaagtaatccacataatgcataagccacaccaaaaccagactcaatttaaatctgctccaaatgagtccatacccatcttcatcattggcatttgaacaaaagacttacttacaaagttgctggcagatgtatttgatggttactcttttgtaattcttgtccacttgtaaattgtttttactctttatacatacttttcagactgcctttcttttgtaatttatggacggtttataaatgaatgacaaagctttccccattgtgtcttcaaaaacgctattataaattgtaatataatagtatgtggtagatttattattaaaggaaatccatgtgtggttaagctctgtgtgggtgtgtgcatgtgcacagttagtgtaaaatattttctagaaataaaatttgttattttat

SEQ ID NO: 288710 - DNA, 1000 bp, Homo Sapiens; identical to SEQ ID NO: 117199

SEQ ID NO: 288711 - DNA, 1000 bp, Homo Sapiens; identical to SEQ ID NO: 222463

SEQ ID NO: 288712 - DNA, 1000 bp, Homo Sapiens; identical to SEQ ID NO: 222464

SEQ ID NO: 288713 - DNA, 1000 bp, Homo Sapiens; identical to SEQ ID NO: 117200

SEQ ID NO: 288714 - DNA, 1000 bp, Homo Sapiens
ctgacgacctgcggaagatgcaggaggaggaagccagaaaactacagcagaagagagcgcagatgctgcgggaggcggcagaggctggggccgaagcgaggctcgccctggacggggagacgctgggcgaggaggaacaggaggatgagcagccaccctgggccagcccgagccccacctcaaggcagagcccggcgtcccccccgcccctgggaggtggcgccccggtgcggacggccaaagctgaacggcgccaccaggagcggctgcgcgtgcagagtccggagccaccggcacccgagcgtgccctgtcccctgccgagctccgggccctggaggccgagaagcgtgcgctgtggagggcagccaggatgaagtcattggaacaggacgctctccgagcacagatggtcctcagcaggtcccaggaaggccggggcacgcgggggcccctggagcgactggccgaggccccttcccctgcgcccaccccgtcgcccacccctgtggaagacctcggcccccagaccagcacctccccgggacgcctgtcaccggactttgctgaggagttgaggtccctggaaccatctcccagccctggcccgcaggaggaggatggagaagtggctctggtgcttctgggcaggccctcacccggcgctgtgggccctgaagatgtggcactgtgcagcagccgccgccccgtaaggcctgggcgccgtggcctgggccctgtgccctcctagaggagcaggcacctcccccagacttggggtgggggccctgccagctccagcaccacccttgccccaagtcttttaacctgggtgttagcattttaaagagaccccacaggagttctggcctgtgactaactaactgccccaccccagccgagacctcggcgagactgtaactagtgatgtttgtacaaccaaagactctattttgtggtttaaggagaataaagttgactacattttaaaaaaaaaaaaaa

SEQ ID NO: 288715 - DNA, 1000 bp, Homo Sapiens
ttctctaagtcgagggctatgccataatacaaatggaaatgttacctttgattttcttataaaggagtttaaataggatttttaaataatgtagtaacactcctgatacaactctggttataagtgaattgagcattaatgtttcttttgtataaattcctgtcctgaaatattttattcatgaaaataaggtaagcaaaaaccaactccattttgccaggattttgttgtgctgagattgccaatcacggttaaacacaaagtgtttttatagaatgaagaaacagtctttaacagaaaaaaggtattgaaatattaaatggccaccaagtttactttgaagcccatttttggctgtttagtcagcatgaagtgggcatgataattttttaatatttctttttgtgaaatttcctgtacagccttttgtaggattactacaggttaatgtgagttgaggaagacagtctttctcaaacaatactacataccttttattatattacaaacctaagtgttttatatcctagagtcaaggaacaaatttccttaggattatagtattacatgccataaaatactatgctttattggtcccatgttttgtgcaattttaaagagatggctttctattaagtataaactatgtatatataagaaccatattttccacaactaaaatgtgcattattttttccaaagttttatcattgctatttatttttacctttgtttttgaacattcaatccgttcattttgtatgtatgcttaatacgtgtcggtcatatacagtattgaatttttactgtatagtaattctggaaagagcaaataaatgaagattgtttttatttgcctgataaagtaattgaaagtgtatttttggtatgaagctggttttctgtcacaattgtaatttcccaaattttaaaatatcttataataaaataaaaatatatgatggctaactgttcaaatgctaaaaaaaaaaaaaaaaaa

SEQ ID NO: 288716 - DNA, 1000 bp, Homo Sapiens
ttaaatttataattttagcattcccaatagatcctatcattccttaaacataataccctttgtcttggagtagaatactaagttagagttagtggatttctagtttaggagaggagctcaaaactataatctttaacaaattgaaaaatgaaatagggtgttttccctttttgtgcacacctatattaccttaagaaatttccttccatagacagctgcctcaaagggaaatcctctttaaaccgtagttggcgcagaggtcagtcctagtcggagcttaggaggggcggagacgctcacatcgtctgacttgagtcgccactgattgtggcaacagctttgcctcatgagtcaaaaattggcaatttcttttgatttttagttgttgaatttgctgtttcaagcatttgtacatattagaagtctaaggagtagcaagtcagtgggaggactttttcacccctggcattagcagcttcgacctcattttccagatgcaccagctcctattaataagttagcaaggaaagtgtatgtcacgtgcaggaacagtgaggcagggacaggggttctgctccttctcacttcaccaccggcacacagcttgcccctgtctttgcccccaaaggtattttgtgtctagtgtcaaattggagctattcttcactggtccttaaccttgggttttaaaaagaaggcttctctgtttgggtagcgtaagagctgagtatagtaagtcctcttccaaagagatggcaatatgctgggcatctactttaaaacaaagttgtctgatttttgcaagagaggttaggattttattgttcttatttccctttacagttctgcagttccatcacagtatttttttaaataactcaggtgtatgagaagaaattagaaaagaaaattaacttatgtggactgtaaatgttttatttgtaagattctataaataaagctatattctgtaattgttgagaaaaaaaaaaaaaaaaaa

SEQ ID NO: 288717 - DNA, 1000 bp, Homo Sapiens; identical to SEQ ID NO: 117202

SEQ ID NO: 288718 - DNA, 1000 bp, Homo Sapiens
gtaacagccacctttggacccttcgcctttatggttcccctgccctctcccatctttgattggcttggtatttggagcttctgttaacattatagagactcctaggatgtgtgttcatggcattatagcctttgaagaaaggccagtgatccagcaaagggggaaaaatatgcatttcaccccacatgactaggaatccacatcagaatgatacagagttagcaggtttttctaaggaaatgccattcaaatgcctcctaacttttatagttattttgttttatatttctaaattcttgtatcagatccaaagctctattgtacagcaaattattcttcaaaatgattataaccagttgcaccctgtatttctttttgcagccagcacaatgtgacccaacttaaaatttgggggaaaaagaatgcaggagtgaaataaccaagtcaaaaccatgtactatctccttgggggttagggatgctaagaagagcccacaaatagaggattactcttcccctgaatctctaaactcagaaacaattaccaaaaaatacataactcttccttgtagggccctttccttattcatttaggtagtgtgaacattaagtataaaataaattatgttcttaatgcctcttaaaccacttacattcaaaggggaacagaaatcattctaagcaggaaaatacttccactttttttttttcaagtatctctctaataactaaatgccacttatttgcattctccttgtggattttttgtcacctaaggaaatgcatttgatgagtgctggaaacttcttaagtgctttacagtttgttttcattgtttgcagcggatcactggacatcaaagattcattgcacttatgaacaaggaaccttcttttcaatttctgtgtaatttgcaaggctgtacaatgtgtgctgatgcaagcctttttcagttcaagagaataaatgtttacaaatataaaaaaaaaaaaaaaaaaaa

SEQ ID NO: 288719 - DNA, 1000 bp, Homo Sapiens; identical to SEQ ID NO: 117204

SEQ ID NO: 288720 - DNA, 1000 bp, Homo Sapiens; identical to SEQ ID NO: 222466

SEQ ID NO: 288721 - DNA, 1000 bp, Homo Sapiens; identical to SEQ ID NO: 222468

SEQ ID NO: 288722 - DNA, 1000 bp, Homo Sapiens
atacatatttcttccccttactaagctagcgaaaataaaatttaaggcaactgaaatatgcacccaatcaatgtgagacgagaccccagcatccctatctatggactccgacagtccatcttattaaataccaggcttcaggactgctatgtggactcaccggctctcaccaacatctggatggccagaacatgtgcaaagcagaacattaatgccccagcaccagctaccacttcctcttgggaagttgtaaggaacccattaattgccagttccttctccctggttaagcttgtactcaggcggcaactgaagaataagtgctgcccaccaccatgcaagtttggagaaggaaaactctcgaagagattaaagcacaaggacgattcagtgatgaaagccacccagcaggccaggaaaagaaacttcatcagttccaagagcaagcagccagcagggcataggaggcctgcaggaggcatcagagagagtaaagaaagttcaaaggagaaaaaactaacagtccgccaagatcttgaggacagatatgctgaacatgtggctgccacccaagcgctaccccaggacagtgggacagcagcctggaagggccgagtgttgcttcctgaaacccaaaagagacagcagttgtcggaggacacgctaaccatccatggtctccccacagagggttaccaggctctgtaccacgctgtggtggagccaatgctgtggaatccttcagggacccccaagaggtacagcctggagctgggcaaggccattaaacaaaagctctgggaggctctttgcagtcagggtgccatctctgaaggtgctcagagggaccggttccctggcaggaagcagccaggtgtccacgaggagcctgtactcaagaaatggcccaagttaaagagcaaaaaataggaacaagaactcatgggattagagtattctctgctagagatctgaaaaataaacacaactttgcaccttc

SEQ ID NO: 288723 - DNA, 1000 bp, Homo Sapiens
tgggaatacgttcagtccgaagaagacacctcctcggaagtcggcatctctctccaacctgcattctttggatcgatcaacccgggaggtggagctgggcttggaatacggatccccgactatgaacctggcagggcaaagcctgaagtttgaaaatggccagtggatagcagagacaggggttagtggcggtgtggaccggagggaggttcagcgccttcgcaggcggaaccagcagttggaggaagagaacaatctcttgcggctgaaagtggacatcttattagacatgctttcagagtccactgctgaatcccacttaatggagaaggaactggatgaactgaggatcagccggaagagaaaatgaagaccccagagacatttattggggagtaggatgtggctgagtgctttttttttggccagactagcggattcagtcctggaagagagtatcatataatgagacccacaggcactggcacccttgggttggcaatagaaggtgacatggaatggagaaaaccaagattccagatggggatagtaactagaaggtgcttcagatgcactgcctgcgggtgccagtctgaaaaccagaccgcacagaggcctggggctgctgatgagctttttggtgctctccacacacaagctcgcaaacacacatgtcccagaatagctctgttgggttgtgttgggagaagcggctggagttcattctctcacccccttatgttggtgtttggcgtgtgacagcagttctacagagctctgtgttggggtcatggatgagcggctctcttggctcttaaaggcaggcctctctcttcttgcctttaaagaatcctccttcctcacacctggcctcctctggcttcagcttctcagcagcaagcaccagccttccacaacaacactatatttttatgctactttcctgtttgcactactacttttttattaaacgatgttaaataaaaaaaaaaaaaaaaaa

SEQ ID NO: 288724 - DNA, 1000 bp, Homo Sapiens; identical to SEQ ID NO: 117205

SEQ ID NO: 288725 - DNA, 1000 bp, Homo Sapiens
ggattaacaaccctggaagagtccactgccaaaagagtagttgctttcctggaatttccaaagcttttggattttctggatcaagtaacccactttttaaaacctgaggtcaggagttcgagaccagcctggtaacatggtgaaaccccgtctctattaaaaatagaaaaaattagccaggcatggtggcgggcacctatagtcccagctactcaggaggctgaggtaggagaattgcttgaacccaggagacagaggctgcattgagccaagatcacaccactgcactccagcctgggcagcagagcaagactccatctcaaaaaaaaaaaaaagaaaaagaaaaagaaggttaatccttcagttatggaggtgggatgaatagagcttgtttgatgttaaagtgggtaaggagggagtggccttgagacacttgtattccaaactctcctggaggtttccagtagcactactgttcctaaaagggtttcatttttaacttcatctgttttgttaacatccagtccaattgaggtgatctcagaggtgcatcaggacatctagcactggggaggccaccttgcccagatagttgaaaagaaaattggtctgggcagcctgttgtcttttgtcttcatgtaatgttttttctttgttttaaaggactaatgtttattacagtgttaaataaaagtgtaagatactaagtgtgtagaataaaagtgcaataacaaaagacaatgactttggcacacacttcagtctttatcctctctcctttcttgtgctacctggctctttccataatattgttacagcaggaccgtcttaattgtgtgcattttgaagagatgcgactctgggttaatcttcattagtgtaatattgaagggttgggtttggttttatagagtattctgtatacttgttgggatacacaaataccagatgtgctgtataataaagatcacattaacgtttaaaaaaaaaaaaaaaaaaa

SEQ ID NO: 288726 - DNA, 1000 bp, Homo Sapiens
tgctggtggccccggcggagcggagagggcggccgtggtggaggcctccaccccaggagcaccccgcgcaccctcggaggacgggcttcggctgcgcggaggccgtggcacacctgcgggaggcagcgacggcccccacgcagacgccgggaacgcaggccgctttattcctctgtacttagatcaacttgaccgtactaaaatccctttctgttttaaccagttaaacatgcctcttctacagctccatttttgatagttggataatccagtatctgccaagagcatgttgggtctcccgtgactgctgcctcatcgataccccatttagctccagaaagcaaagaaaactcgagtaacacttgtttgaaagagatcattaaatgtattttgcaaagcctaaagttatatatttaacagtttttatatgttgtatatttgtagaaaatcctatttaacaattaacgtggcagtcccggccgtcctgagagtcgggccgagccccgtgtgtttctgaagactctgggggtgggacacggcggggaggtggtgccccgcggaccccggggtgccaggcacggaaggcgggactctgggagaagcgtgcggaggaccgtggcgtcggcgtcccggatgtgtcggtcgtgcccggggaggccgggttcccctcgctgcgggccaggcttggctcctgattccctctctggtccctgtattggtcaacacttgagcgtacaatatcttgaacatgcttcttccaatgggttttgtttcccatttcctgcccctttcgccactcacggaccttgaggccagttgacggcccttctccccacgcctgtttcttttgaaagcaagtgtagacaccttcgagggcagagatcgggagatttaagatgttacagcatatttttttttcttgttttacagtattcaattttgtgttgattcagctaaattatgaaaaataaagaaaaactcctttgataaaaaaaaaaaa

SEQ ID NO: 288727 - DNA, 1000 bp, Homo Sapiens
ccccaggtggactggctaacctgcatcccaggctcacggttgtacgcaaggttgatgctactgatgcaagctatccatcagtcaatacatgtgtgcattaccttaagttgcctgaatattcttccgaggagatcatgagagagcgcctgctagctgctacaatggagaaaggctttcatctcaattgagctttgaagtgcaatgggagacatcagagactttaaaaatactagtgaagcctcttgtgtttgtgtgcagagaagtatatgatccaccatgctaatgacacttgcctttttttccaccattaaggctttaagaacatgtggaataagttttttagctgctaatgacaaaacaaatcctgtaactacccagccagcaagtatatagcacagaacactgtgttactttacaagggcttatgtgactggaataaggtggtcccacttgactgttccaaagagcagcttctcagatcttcagtgttcactggtaaatttctaacagtgtatttgtgtaaagtttgtcatttcatactccatacactacagttgctgtcactgatccctgttttgctggcttttaagctacttggtcaaaaatcctgcttccttaaaacatagagaattaatgagcatctcaagctttttcttttcctttttaatgatgcctgcactatcaagagtattctagtgttctctctttgtttggcatataatcatgcaccaaactttttatttctttaaggtgggagtatatttttatttcctaaatgccatactatgaagatcaaagtcttaagtgtgtttgcagctcaaaaataaagatgtattaaggggggaaaacctggtctaagtgcaaggcacacttacagcgagttttactttcggttgtattttctttgtatattataaacatttatttaacttgttgccgtttgaagtaaaaaatttccaaaatgtatgctcaacaataatcattaaaatgtttgcagcgt

SEQ ID NO: 288728 - DNA, 1000 bp, Homo Sapiens
tgactatgctcttgtatatagcagacaatctagcctgttttccataccagacacaggaagagccgttgtttataatgcatcatatagacattacactctcagtttctggtagtaacctactgcagtcattcaaggagtctatggtaaaggacaaaaggaaagagagaaaatcatcacctagtaaggaaaatgagtcaagcgacagtgaagaagaagtttccaggcctcggaagtcacggaaacgtgtagattcagattcagattcagattcagaagacgatataaattcagtgatgaaatgtttgccagaaaattcagctcctttaatcgaatttgcaaatgtgtcccagggtattttattacttctcatgttaaaacaacatttgaagaatctttgtggattttctgatagtaaaattcagaagtactctccatctgaatctgcaaaagtatatgataaagcgataaaccgaaaaacaggagttcattttcatccaaaacaaacactggacttcctgcggagtgacatggctaattccaaaatcacagaagaggtgaaaaggagtatagtaaaacagtatctagatttcaaacttctcatggaacatctggaccctgatgaagaagaagaagaaggggaggtttcagctagcacaaatgctcggaacaaagcaattacctcactgcttggaggaggcagccctaaaaataatacagcagcagagacagaagatgatgaaagtgatggggaggatagaggaggaggcacttcaggggtgaggcggaggaggagtcaacgtatttcgcagcgtattacgtaaaatgatttttatgtgcttatatatgtcagtctattaaatgtacaccaagtaatgtaatacttaaaagagaaaacattttgtagatagagattctctacttacccgtttatacatccttttgtagaaagtttaacataaaagacaataaaaaaacagaaatgagatttatccagcaaaaa

SEQ ID NO: 288729 - DNA, 1000 bp, Homo Sapiens; identical to SEQ ID NO: 222469

SEQ ID NO: 288730 - DNA, 1000 bp, Homo Sapiens; identical to SEQ ID NO: 117207

SEQ ID NO: 288731 - DNA, 1000 bp, Homo Sapiens; identical to SEQ ID NO: 117208

SEQ ID NO: 288732 - DNA, 1000 bp, Homo Sapiens; identical to SEQ ID NO: 117209

SEQ ID NO: 288733 - DNA, 1000 bp, Homo Sapiens; identical to SEQ ID NO: 117212

SEQ ID NO: 288734 - DNA, 1000 bp, Homo Sapiens
tgtatacacatttattctgtttgtacaaaggttttccattctatggagaggatcccagtcttcagattctctggtaagttaataacccacaaaagattcaggaagaggatctattttaattttctctttcattctataaatcagtctgttgtatatagggactgaccatgattctccattttctggcataaatattagctgctcaatgattgattgttgaatgatagatgaagtattgctgaagccaaccagagatcttgatctctctctgaggaaaaaacctagaaatgatggttagaatcaggagacttgagaactacgaggaacatggcagcctctagctcatacttgtcgttgtacaattgagatcaagtgaattggccccggtctcacattttcagtgaagtcagactcagaactaggtcctgggtttcatgtttcctgctgctcttctcactgtgtacacaccatgcccacatacaacatacctatcagaaatggttttcattaagggagtagaatagtcacttaactggggctcttaacattgctaataacctgtggctcaatttcctcaactgtataatgaggttactactagtatctacctcaaagcgttgtcatgtggattgagatgatatgtatgaatcacataaaagagtgcctggcacatagtaggtgccattaataatattactattgttaacaccttaagggtctaacttgtaatgaagacagaaatatgtatgaggatgatcactgaaatatttatgacagtgcataatttgcaaaataaaaaatgtacactagcataatatttgtggcatatccgtgtaatggaagattatgcaggcattaaaatatgtacacaaaaagtttggtaaaggaaaaatgctgtcatgtgttacaaaagcatgataaataattgttaatatggaataagctcaaatatgtcaaaataaatgtaaaaaatgagtgttgcccaaaaaaaaaaaaaaaa

SEQ ID NO: 288735 - DNA, 1000 bp, Homo Sapiens; identical to SEQ ID NO: 117213

SEQ ID NO: 288736 - DNA, 1000 bp, Homo Sapiens; identical to SEQ ID NO: 117214

SEQ ID NO: 288737 - DNA, 1000 bp, Homo Sapiens; identical to SEQ ID NO: 117215

SEQ ID NO: 288738 - DNA, 1000 bp, Homo Sapiens; identical to SEQ ID NO: 117216

SEQ ID NO: 288739 - DNA, 1000 bp, Homo Sapiens
ggttccgcctgggcggggcccgcccgctcatcccgttgggcccgactgtggtacagacctccatgagccagtcccaggtagccctgctgggcctgagtctgctgctcatgctcctactgtatgtggggctgccaggcccccctgagcagacttcctgcctctggggagaccccaatgtcacagtcctggctggtctcacccctggcaactcgcccatcttttaccgcgaggtgctcccactcaaccaggcacacagggtggaggtggtgctgcttcatggaaaggcctttaactctcacacgtgggagcagctgggcacactgcagctactgtcacagaggggctaccgggccgtggcccttgaccttccaggttttgggaactcggcaccttcaaaggaggcaagcacagaggcagggcgggcagcgctgctggagcgggcgctgcgggacctggaggtacagaatgccgtgttggtgagcccctcgctgagtggccactatgccctgcccttcctgatgcgaggccaccaccagctacatggatttgtgcccatcgcacccacctccacccagaactacacccaggagcaattctgggctgtgaagactccaacccttatcctgtatggagagctggaccacatcctggctcgagagtcactgcggcagctccgccacctgcccaaccactctgtggtgaagctacgcaatgcaggccatgcctgttacctccacaagccgcaagacttccaccttgtcctgcttgccttccttgaccatctaccttgaactaacccactcccagctcccagcctggcatgagcttggacagtctggaccgccaccctccctgaaccagggagacagcctctgggattggaggccagaggccagggtcagacccagccaggactcctcatttcatctcacagacacaataaaaaagcatatttgtcctgcctgggaaaaaaaaaaaaaaaaaaaaaaaaaaaaaaaaa

SEQ ID NO: 288740 - DNA, 1000 bp, Homo Sapiens; identical to SEQ ID NO: 117217

SEQ ID NO: 288741 - DNA, 1000 bp, Homo Sapiens
ggccatgttgcaaacagcgcaattccaagctcgagagcttcagcctcaggaaagaacttccccttccctgtctcccatccctctgtggcaggcgcctctcaccagggcaggagaggactcagcctcctgtgttttggagaaggggcccaatgtgtgttgacgatggctgggggccaggtgtttctgttagaggccaagtattattgacacaggattgcaaacacacaaacagttggaacagagcactctgaaaggccattttttaagcattttaaaatctattctctccccctttctccctggatgattcaggaagctgacattgtttcctcaaggcagaattttcctggttctgttttctcagccagttgctgtggaaggagaatgctttctttgtggcctcatctgtggtttcgtgtccctctgaaggaaactagtttccactgtgtaacaggcagacatgtaactatttaaagcacagttcagtcctaaaagggtctgggagaaccagatgatgtactaggtgaagcattgcattgtgggaatcacaaagcaaatagtactccagaaagacaaatatcagaagcttcctattctttttttttttttttttttttttgagacagggtctttctctgttgcccaggctagagtgcactggtggtcacggctcactctagccttgaattcctgggcccaagcaattctcccacctcagcctcctgagtagctgggactacaagtgtgcaccaccatgcctggctaattttttgaatttttgtagtgatgggatctcgctctgttgcccagggtggtctcgaactcctggcctcaagcgatcctcccacctcgacctcccaaagtgctgggattacaggtgtgagccacctcgcctgggcccccttctccatatgcctccaaaaacatgtccctggagagtagcctgctcccacactgtcactggatgtcatggggccaataaaatctcctgcaattgtgt

SEQ ID NO: 288742 - DNA, 545 bp, Homo Sapiens
cgccgccatccggactcccgggtcctctgtgcaggttggaggatggttggttgtggcgagcgaggctgaaggagccgggacgcggggctctgggcctcgggaactgagccggtactcacctccgccccttctccccgtcgctgtccgcagccatggccctacgctaccctatggccgtgggcctcaacaagggccacaaagtgaccaagaacgtgagcaagcccaggcacagccgacgccgcgggcgtctgaccaaacacaccaagttcgtgcgggacatgattcgggaggtgtgtggctttgccccgtacgagcggcgcgccatggagttactgaaggtctccaaggacaaacgggccctcaaatttatcaagaaaagggtggggacgcacatccgcgccaagaggaagcgggaggagctgagcaacgtactggccgccatgaggaaagctgctgccaagaaagactgagcccctcccctgccctctccctgaaataaagaacagcttgacaggaaaaaaaaaaaaaaaaaaaaaaaaaaaaaa

SEQ ID NO: 288743 - DNA, 1000 bp, Homo Sapiens; identical to SEQ ID NO: 222471

SEQ ID NO: 288744 - DNA, 1000 bp, Homo Sapiens; identical to SEQ ID NO: 117218

SEQ ID NO: 288745 - DNA, 1000 bp, Homo Sapiens; identical to SEQ ID NO: 117219

SEQ ID NO: 288746 - DNA, 1000 bp, Homo Sapiens
ccagaagatttcccctcagtttccattgacttagatcaggttacagagaaaggcaatgtctgacatttttggtctctgttagaagtagactctgttgaaaagaaagaagctaagctaggtgtgaagaatggaattggaagcccactgccttcccataagaaaggtttaccataatttactcacttttttctgtgttagacattttgattatctgcagtttattactacaagcagtggcagagtgaatgtccttgtacattttgagttacatgcttaattatgtccttgagaaagtttctaaaagtggaatgattggtttgactggttcatagggctttaattatacaatttacccctctaattagtactatatgtatgtgacttccctccccctgccagaatactccttggtcaattgtaggtattctttttggtttaatttttgccaatgtaattaaaaaatggtatgtcatttttaaaatttgtatttctttcattacaaataagattgttatgtcagtattgttattggcttttcgtattcctcttaacgtgaaccgtctgttcattgtttttacctgttttcgttttagcaagtagtacttaatttaaagtgtgaacttaatatataagatgccaggaccatcatattgatgacaaaaatctattatgtggttgtagtgcatgtcttggagttaaactcttaagtatcaagaagtaaaataatttcattgtttctgttactaacattaaaagtgtgcaaattgtataaaattaggtacttcgattagtaaaagaaaaaaatttgaatgttttttttttttattttattaagcatgcccagttatgccaagcatagtaaataaaggtcaagtagcatttataatagaggaagtattgttatccctagcatgagtgtaatggtgatatgaaaaactttgtcttgtcattataataataaaaaaatgaacatttattatgaaaaaaaaaaaaaaaaaaa

SEQ ID NO: 288747 - DNA, 1000 bp, Homo Sapiens
ctgcggcctcacaacctgccccgaaccaggctgcccagcacccctcccgctgccagactcctgctgccaggcctgcaaagatgaggcaagtgagcaatcggatgaagaggacagtgtgcagtcgctccatggggtgagacatcctcaggatccatgttccagtgatgctgggagaaagagaggcccgggcaccccagcccccactggcctcagcgcccctctgagcttcatccctcgccacttcagacccaagggagcaggcagcacaactgtcaagatcgtcctgaaggagaaacataagaaagcctgtgtgcatggcgggaagacgtactcccacggggaggtgtggcacccggccttccgtgccttcggccccttgccctgcatcctatgcacctgtgaggatggccgccaggactgccagcgtgtgacctgtcccaccgagtacccctgccgtcaccccgagaaagtggctgggaagtgctgcaagatttgcccagaggacaaagcagaccctggccacagtgagatcagttctaccaggtgtcccaaggcaccgggccgggtcctcgtccacacatcggtatccccaagcccagacaacctgcgtcgctttgccctggaacacgaggcctcggacttggtggagatctacctctggaagctggtaaaagatgaggaaactgaggctcagagaggtgaagtacctggcccaaggccacacagccagaatcttccacttgactcagatcaagaaagtcaggaagcaagacttccagaaagaggcacagcacttccgactgctcgctggcccccacgaaggtcactggaacgtcttcctagcccagaccctggagctgaaggtcacggccagtccagacaaagtgaccaagacataacaaagacctaacagttgcagatatgagctgtataattgttgttattatatattaataaataagaagttgcattaccctcaaaaaaaaaaaaaaaaaaaaaa

SEQ ID NO: 288748 - DNA, 1000 bp, Homo Sapiens; identical to SEQ ID NO: 222472

SEQ ID NO: 288749 - DNA, 1000 bp, Homo Sapiens; identical to SEQ ID NO: 222473

SEQ ID NO: 288750 - DNA, 1000 bp, Homo Sapiens; identical to SEQ ID NO: 222474

SEQ ID NO: 288751 - DNA, 1000 bp, Homo Sapiens
tggactgtatttcttcatgctttccagagttagagccttgatcacggaacatcattgtgtgcagaagaatactgtacctagtactaagttcttttcatctttgatttttctttagcttcatcagtccttccttcctaatctctaatcccctgaagcctaacacagttcctaatgtgttttgccttaacctcttttctcttcccacattggtacttctggttggggctctctttacttactgcttaggcacatagtcaccttctctggactccctgcttccatgctttctccttcagtccattccgcaaactcttgtgatcttccaaaattagctctgattagctttcacttcctgtagaagcaagaacaagctcctctgcttggtacttagtctgtgtccatgtgatccaaaattaccttcctattgcatttcctactcctttgctacgtgtattggacctctggccaaattacaaaagatgtactctttgttctctaaaaccacactaaagttttctgacttctttcacactctttatgataatcctctgcctgaaaggctattgccacctgtcaaaatcttcattattctttgcctctttcctgagcctcttgcttgaatgtgatttctttctccctgagacccataaggttcatcttatgggaccttaatttgtcttgcatggacatttgtgattctcattttctcaccattaaattaccttggagggtagggctgtggtttactcctgtctaaacccctgaagcctaacacagttcctggcacacaacaggtgttcaacagatattgtgctcattcaataaatatttactcgctttgtttaatggattccacccctgccttcctaggtgaccttggacaaattctcgaacccattcaccaaccacacaagtttgttgtgagtcataaatggataatgaatataaatgcgcattgaaaataaacataaaatgttacccacaaaaaaaaaaaaaaaaa

SEQ ID NO: 288752 - DNA, 1000 bp, Homo Sapiens; identical to SEQ ID NO: 117222

SEQ ID NO: 288753 - DNA, 1000 bp, Homo Sapiens
aagcttaatgcagctcatttgctaccatttggatacttagacactttgagcaagattgtggcagtttttgcacaactttgaaatagaaatacctggtactctatcttgtttattgttgatgccatcttagaggaaaaaatgtaaaggtaagtaattaagcatatgacagcaacaaataagatacataaaactacaaaataaagtcccattaggttataagtattacaaaaaatccacctttctctaaggggaagtttgtaccccattgattcttggtgcctttgggatcgactgggttttaatggcctagttatttgaggattttgctgtgttgttttccatgtcttctctggtcaccttggattatatataaaaatacaggaaatagataaacatgaatgtgattaataatgctgaaaaagtattagcctaccaaagacacactcaggctttagtgaataactttacataacctcagtttttaacacatgcatatcttctccaaccatgaaatcaaagcacggtgcagaacttgtaccaagtacaaaaggtccatgtatgattagcattattttcttttgcttttgtttatggacaatgttcagctgacataagcagaagttggccaaaatactgcctgtactgttaatttcctgtataattcacttaaataaaagcaggttaacctcaatgatagcagttaaaatgttctatcttatgtatttcttttaagtattaccattatggtgctactgagcgttttcttttggtaaaaagaaaaatgccatgggctgcagtcttcttccatcacttttccctaccaggtccattaatatgcttataacactagtgccagttattttatttgataatgcttatggtatttgtatatttgtttgcattccaattttgtttaataatgagtgtgtaaactgcatacgttaaataaatgtaaatactaatgtactgctgcaaaaaaaaaaaaaaaaaaaaaaaaaaa

SEQ ID NO: 288754 - DNA, 1000 bp, Homo Sapiens; identical to SEQ ID NO: 118460

SEQ ID NO: 288755 - DNA, 1000 bp, Homo Sapiens
atgccattccagtgagtaaaagcacagggttttcaaatcctgcatcacagtcaacttcacagcgaccaaagttaaaaagagtgatgaaagaaaagaccaaacctcagggtggagagggcaaaggcgctcagtcaactccgatccagcactccttcctcactgatgtctcagatgttcaggagatggagagagggctgctcagtcttttgaatgatttccactctggaaaacttcaagcatttggaaatgaatgttccattgaacagatggaacatgttcggggaatgcaggagaaattagctcgcttgaatttggagctctatggggagttagaggaacttcctgaggataagagaaaaacagccagtgactccaatctggataggcttctgtcagatttagaagaattgaattcttccatacaaaaactccatttggcagatgcacaagatgttccaaatacttctgctagctaaaatgaaatgtagtttgctttcttgtgatttgaagagaagcagcagtctttacttttccagccaaatccagtagcagaatcatcttccacaacaaggaattaaagtaattaaagtgcaagttcaatgatcgttttcacttactgcttttagtaaatgtgactcgctgtaattcaccataactggaggcctaggccttgttgaaggcttcatcaggaaatgtgacgcagagattgtgctgctgtgcttcatattgttgccttatgggattatacttgaaatgcattgtgctgatgttcttgacagggcggagggatttctctttcctgagctcaccaaacttattccagtgttgatcgcaagctgttgatgcacaggcgtcttgtggcaagcccagcttcagtttatgttagacaatcagtacacatgctggtgtgttttccaatggccagtgataagaaattaaataagtatttgtgagatttgctattttttaataaagtaattgttttaaattaaaaaaaaaa

SEQ ID NO: 288756 - DNA, 1000 bp, Homo Sapiens; identical to SEQ ID NO: 222475

SEQ ID NO: 288757 - DNA, 1000 bp, Homo Sapiens
agagcagcgaaagcagtgaaacttgcagcagtaaaagccatgatggagataaattcattccagctccaccttcttctccattgagaaaacaggaattagaaaacttaaagtgctccatacttgcttgcagtgcctacgtggctctggctttgggtgataacctcatggctttgaatcatgcagataaacttcttcagcagcccaagctgtcaggatctcttaagtttttgggacatttatatgctgcagaagccctcatctctctcgacagaatatctgatgccattactcacttgaacccggagaatgtcactgatgtctccttagggatctcttcaaatgagcaggaccaaggatcagacaaaggtgaaaatgaagcaatggaatcctctggtaagcgggcccctcagtgctaccccagttccgtcaactctgccaggactgtgatgctgttcaaccttggcagcgcttactgcctgaggagcgaatatgacaaagcccgaaagtgtctccaccaggcggcttcaatgatccatcctaaagaggtgccccctgaggccatcttgctggcagtctaccttgaactgcagaatggtaatactcagctggccttacagatcatcaaaaggaatcagctgctccctgcagtgaaaacacactctgaagtgagaaagaagccagtgtttcagcctgtccacccgatccagcccatccaaatgccggctttcaccactgtgcagagaaagtgatacttcacttttggaaaactgttacctgagacccaggggagaatttactggccattttagttgtatcacagcagaatgaataaaagatggtgaaggctgttaattttgagtcaattctacccctgacttttggccaaaagcttacttaaaattaaggatttactaagtcatcatcagctgtttttcttaatttcagccagactattaattttgagccattatgtaatatatgccataggcaattaaaacat

SEQ ID NO: 288758 - DNA, 1000 bp, Homo Sapiens; identical to SEQ ID NO: 117223

SEQ ID NO: 288759 - DNA, 1000 bp, Homo Sapiens; identical to SEQ ID NO: 117225

SEQ ID NO: 288760 - DNA, 1000 bp, Homo Sapiens; identical to SEQ ID NO: 117226

SEQ ID NO: 288761 - DNA, 858 bp, Homo Sapiens; identical to SEQ ID NO: 30145

SEQ ID NO: 288762 - DNA, 1000 bp, Homo Sapiens
cccctccaatatgtgtttgttatgacctttacacttgatgatggaacaggagtactagaagcctatctcatggattctgacaaattcttccagattccagcatcagaagttctgatggatgatgaccttcagaaaagtgtggatatgatcatggatatgttttgtcctccaggaataaaaattgatgcatatccgtggttggaatgcttcatcaagtcatacaatgtcacaaatggaacagataatcaaatttgctatcagatttttgacaccacagttgcagaagatgtaatctaatattgccatccaatttagcatacataaaatgttgccactcaccttccctgtttgagcttcttttcctgacctgagttttgtatcagcaatgttgatgatgttagcatggatatgggattagaaaatgtccttaccttaaatctcttggcttttactgggtgcaaggtaaataatggctatggattttgttttgctttctgttttgcttttgtacaaagagacctgcttaaacaagtactgctgagataagtgtctgatcaagctacagtgtactttaagtagaaatggcaaagttgctttgttggggtgctgatactgatgattttaggataaattcatttctttaaacttgtaatacatggttttattgcttgtttctctccaggatagtagagatttctctatttcacctcaacctaataaaagtggtcagatttataatgttaatgacttaatattatccttttctaatagtctcatgtaaaatatgccgctattacaacttacaactaattgaatgagatgttaacttagtaaaatagtttgatttttacctgacagtgtttgtcaaatttaaaatcatgaatattcaattttatacaaacatttatatatatatatatagatttgtgtatgttatttgccaaagacagatataaattacctggtttaatattagtgaagaataaataagtgcacacat

SEQ ID NO: 288763 - DNA, 1000 bp, Homo Sapiens; identical to SEQ ID NO: 117228

SEQ ID NO: 288764 - DNA, 1000 bp, Homo Sapiens; identical to SEQ ID NO: 117229

SEQ ID NO: 288765 - DNA, 1000 bp, Homo Sapiens
gacatcttcctccacctgctcacgggcaaccttgcgctgctggccgacgaatttgcccttgaggacttctgcagcagcctcttcgatggcttcttcctcaccgcctctccaaggaaggagaacgtgcaccggcacgcgctgcggctcctcattcacctgcaccccagggtggccccatctaagctggaggcgttgcagaaggccctggagcctacaggccagagcggagaggcagtgaaggagctttactcccagctcggcgagaagctggaacagctggatcaccggaagcccagcccggcacaggctgcggagacgccggccctggagctgcccctccccagcgtgcccgcccctgccccgctctgagggccctccagacctgctcgggtgctggggccatgccgagtcgcggccctgctcagccggaagaggctcccggacctggatgtacagggcagtctctcttcccggggctatggctgggcctgtcctgccgtcatggccccctgcttcctgctccttggagctggctcccggaccttgcccaccatccatgcagtggctcccagggcagagcctctccttgtactttggcagccatagaaagcgtgctcattttctgttttcctgtgttaggaaaaaaccacctgttttccaaggggagagggcggggcctgagggtgggggcggggcctcttcattggcccagcttggcgaaagcgaggcacactgcttactgccttggggttgtggagatggacccgtgacctcgtggaggccgtgtgggggcagcagcctggcctgtgccatggtgggtgtcctggggcctgtgcggagggagccacctcaccctgcagcccaggttgcaggtgtggccttgtttctccttgcccagcagtgctgccttcagcggccgtgacggggccagctggacacacggtgagattttctcgtatgtaaataaaaggcaatttggtaaaaaaaaaaaaaaaaaaaa

SEQ ID NO: 288766 - DNA, 1000 bp, Homo Sapiens
gccctgagactggggtagcaacccccccttttatcttttaagaccttcccttccttgatccctggaccagactcagtggacatttgtgcaattgctcgccctggagggaaccagatcatttttaaaccagaaataattttttttattattgttacggattctatttttttcctcttctgcgttaccaggtgtgtgtgtacatataatatatatatatatatattataaatatcaaagaaattatatatctatcctgggatgggaaaatgagggagggatacatatacggagggggatcttactcttcccattcctcagaccagcaggaaaagaggggagacgtcagtctttttcctgtggttccctctcatttgtcccagttactaactacggaaatagcatcctctgctggtgctaagtgtgattaggaagaagcctggggagaggtgagtctggaattttggtcacaagagggaaggacttggagaggagaattagttttctaggctcattggcatttagtttccctaggaaaggggtcaaaacttcaagacactggtggtggtgggagatcaggaaaataacttggcctagctcaaacaatattggataatcccctccttgggggagagggattagagtgtgctcctactggccccttggagcctcccctagcttacacagttaacttgattttaaaatccaaggccaggagagaagaatccaaaaagcaatatttttcatcacatgccaaaaacgggggatagagagaaggagtggcaggcctaggcccctccgattgtcccttgggggttacccctcagcccacctcactatggtgctgggtagaggggatacctgggttctaacctctaaataggggagatcccagcctccacaaagaggcccttttattttttattctgattagccattttaaaccaacgaggaataaaaagaaatcctgatctaaccagcaaaaaaaaaaaaaaaaaaaaaa

SEQ ID NO: 288767 - DNA, 1000 bp, Homo Sapiens; identical to SEQ ID NO: 222481

SEQ ID NO: 288768 - DNA, 1000 bp, Homo Sapiens
atatattaaaatttatcaaggagaagatctgcctcaccccaagtccatgcttcaggccactgctgaagccaacaacttagcagctgcagcctctgccaaggacatttattataacaacatggaagaggtttgtgggggagagaaaccttatttgtctccagacattctagaggagaagcactgtgaattcaaacaacttgctctggaccattttaagaagaccaagaagatgggtgggaaggatttcagctttcgttaccagcaggagctggaggaggaaatcaaggaattatatgagaacttctgcaagcacaatggtagcaagaacgtcttcagcaccttccgaacccctgcagtgctgttcacgggcattgtagctttgtacatagcctcaggcctcactggcttcataggtcttgaggttgtagcccagttgttcaactgtatggttggactactgttaatagcactcctcacctggggctacatcaggtattctggtcaatatcgtgagctgggcggagctattgattttggtgccgcatatgtgttggagcaggcttcttctcatatcggtaattccactcaggccactgtgagggatgcagttgttggaagaccatccatggataaaaaagctcaatagcatcttaacgtgaagatcaaacaagaacacaacaagcccctactgatttctgggtttctgccacggccacaggttcatatccagaggaatggcagatctgagacgatccaggaagagctaaaacatggccctgtaataaatgagcagacctctcctgtggtttcaaattattaaacacacttccatttctcttggaagcatttcttttccttgctgttatagatgcaagcctgtgtctattttcatattactctgctttgtgcactttatggaggaggaagctagaggaaaaatggaaatgcagcttttaagttctttatgtgccacttagtgccttttaagattgattccatg

SEQ ID NO: 288769 - DNA, 1000 bp, Homo Sapiens
cagtgccacctgatagagcacagcttcgaagggatgggaggcaccttcaagtgtccagtctgctttacagtatttgttcaagcaaacaagttgcagcagcatattttctctgcccatggacaagaagacaagatctatgactgtacacaatgtccacagaagtttttcttccaaacagagctgcagaatcatacaatgacccaacacagcagttagtgcaagtacagtctctcaaggagaattgattttgtggcacaaaaagggaacatgttttactctttgcacgaaactttcattgttaatgtatattattcagaaacattgtattgtaccataaaacttgtattatcaaactgttggatgttcatgtgtttgaacttttgcgcaccggatagaccccttgtatataaagtgttgcacatgtattatgtcgtctgatactaaaatggtcttataaagacaagtggacttgggccctattcaggcaagattaaaaaaaaaaaagactatgaccaaaatggcttaagataaagtatttttaaggaagaaagattaaaaacaactgttatacatgagactatggttggacttccttttctttacacttaagcctagaatttctctttaggtatatcagcgcttaaatccaagactattttttattgctgaagattcttgcaaaccatgaagagatgttctcacagaacagaaccccacagctggataaggcccgtatatatatatttgtaagccttgcaatgtgacaggtagcatcactatatatgcaatagttgttatgtagactgtcaaagaatttttttttccctggatacatttgaagctttgagtgttcaaggttttccttaatgatttcacgcagccaaattcttgaatcagttgaactaacctgtatgttactgttattaatgtttactctgcagtctgaacctggagattactggaattgttttccaagaggaaataaattcagtttaccatt

SEQ ID NO: 288770 - DNA, 1000 bp, Homo Sapiens; identical to SEQ ID NO: 117231

SEQ ID NO: 288771 - DNA, 1000 bp, Homo Sapiens
gcctgccactgctgttttctcacttgaaagtatatgctttctgctttgatcaaacccagcaagctgtcttaagtatcaggaccttctttgggaatagtttttccttttcaagtttttcaagatgtaggtatatccatgaatgcaatttgcatttaaattccacgtatcctgtagttttaattcctcattgttcttaaaagactgttgatactataaacatcagtgaatcattatattttaaaacagaaaagggcttctcagataccctccatctactggcccatcccctctcctaaacaaaactccttcaaaacaggttaaaaaaaatatgttgtcatgaatcttcacagtaacatttcagaaaggtgcttttttggtactcttcatgggaacagtttagcagccatgagtgatcttcctttgaaagagaatgaaagaccctgtgacatttcacttcaaaaataagccctgtagctctttacggtcgcatagtataaaattataccctgcatgctgaccctcgcttggaatggaatgccagaaatgcatggcagcagctaataagtaaagctgattaactatttatttgtcaatgttattatttaatgagctttcacatgtgatttgtttcaaaactttaattttttaatgttttgaaactttttcatggacctaaatattttcctatatgatttgtggttgattagaaatatgaaatacatgttgtagatatgtaaaatgaatattttagtctccttattacatatatgttcatggtgaactttatcaatagtatggatctttttaaatcaataagatgctttgtaaagttgaaataagtaatactttcttgtttaatctgtgcaatcagaaggtgtcttgaccttcaattcaattggtttcttttaacaaaaataaacactgctaaaagttattgttgttgcctctaacatgtataaagggtgcaaaaattgtagaataaatgtataagggtaaaaaa

SEQ ID NO: 288772 - DNA, 1000 bp, Homo Sapiens
gggccgcacgggagcctttgcactgctctatgcagctgtgcaggaggtggaggctgggaacggaatccctgagctgcctcagctggtgcggcgcatgcggcagcagagaaagcacatgctgcaggagaagctgcacctcaggttctgctatgaggcagtggtgagacacgtggagcaggtcctgcagcgccatggtgtgcctcctccatgcaaacccttggccagtgcaagcatcagccagaagaaccaccttcctcaggactcccaggacctggtcctcggtggggatgtgcccatcagctccatccaggccaccattgccaagctcagcattcggcctcctggggggttggagtccccggttgccagcttgccaggccctgcagagcccccaggcctcccgccagccagcctcccagagtctaccccaatcccatcttcctccccaccccccctttcctccccactacctgaggctccccagcctaaggaggagccgccagtgcctgaagcccccagctcggggcccccctcctcctccctggaattgctggcctccttgaccccagaggccttctccctggacagctccctgcggggcaaacagcggatgagcaagcataactttctgcaggcccataacgggcaagggctgcgggccacccggccctctgacgaccccctcagccttctggatccactctggacactcaacaagacctgaacaggttttgcctacctggtccttacactacatcatcatcatctcatgcccacctgcccacacccagcagagcttctcagtgggcacagtctcttactcccatttctgctgcctttggccctgcctggcccagcctgcacccctgtggggtggaaatgtactgcaggctctgggtcaggttctgctcctttatgggacccgacatttttcagctctttgctattgaaataataaaccaccctgttctgtggcccgtaaaaaaaaaaaaaaaaaaaa

SEQ ID NO: 288773 - DNA, 1000 bp, Homo Sapiens; identical to SEQ ID NO: 117232

SEQ ID NO: 288774 - DNA, 1000 bp, Homo Sapiens
tctgtcgacagctccccatggaagctgagactcttgccccagttcaggctgctgtcaacccacccacgatgaccccagacatgagatccatcactaataatagctcagatcctttcctcaatggagggccatatcattcgagggagcagagcactgacagtggcctggggttagggtgctacagtgtccccacaactccggaggacttcctcagcaatgtggatgagatggatacaggagaaaacgcaggacaaacacccatgaacatcaatccccaacagacccgtttccctgatttccttgactgtcttccaggaacaaacgttgacttaggaactttggaatctgaagacctgatccccctcttcaatgatgtagagtctgctctgaacaaaagtgagccctttctaacctggctgtaatcactaccattgtaacttggatgtagccatgaccttacatttcctgggcctcttggaaaaagtgatggagcagagcaagtctgcaggtgcaccacttcccgcctccatgactcgtgctccctcctttttatgttgccagtttaatcattgcctggttttgattgagagtaacttaagttaaacataaataaatattctattttcattttctgcaagcctgcgttcttgtgacagattatacagaattgtgtctgcaggattgattatgcagaatacttttctctttcttctctgctgccccatggctaagctttatgggtgttaattgaaatttatacaccaattgattttaaaccataaaaagctgaccacaggcagttacttctgagggcatcttggtccaggaaatgtgcacaaaattcgacctgatttacagtttcaaaaactgtattgatgacagtagtaccaaatgctttaaaaactatttaacttgagctttaaaaatcattgtatggatagtaaaattctactgtatggaatacaatgtaattttgaatccaaaaaaaaaaaaaaaaaaa

SEQ ID NO: 288775 - DNA, 1000 bp, Homo Sapiens
tgcccccaacagagcaatcaggattactaaaaaccaggtttcacaacttctgccagagaaatttgcagagcagctgattcgagtatattgtaagaaggtggacagaaagagtttgtatgccgcaagacaatattttgttcagtggtgtgcagacagaaatttcaccaagccgcaggatggcgatgttatagccccactcataacacctcaaaaaaaggaatggaacgacagtacttcagtccaaaatccaactcgcctccgagaagcatccaaaagcagagtccagctttttaaagatgacccaatgtgaatgtctgtagtcagttgtttacaaactccctctcctgcacaattcatttagaggcttcaatcatagaattctgcaaattaatgacaactcatgctttaattttgtattttgaatgtacacgcatgctgaagctaagtaacttttaatcaaagaaataagatggtattaggcaaatcttactatactatgaaaagcattaccttgcctatttttaatattattaaagcctttctccttcagtagtctattttcttagaataacaactcttttatctattctgaactctattttttttcttttttaagagacaaggttttgctctgttgcccagcttggactcgaactttcctgggctcaagcgaccctcctgcctcagccccccaagtagctgggactaaagtcatgtgccaccacacccagcttactctgaacttttatgacagatgattgttttttgtttttaatgtagaaatgagacaagggtacaaattggaactagaaattgacattgtcattgacaaacatggctaaaaacaaaacatcaaatcctgcccccgtgaagagttccctgtcacctcaagtttgaggatagtcctctaagagtgacctaagcataagtgaaagacacctcccctcacccttctagccccctacaaggtgccaggttggggtaaagagttggagatgat

SEQ ID NO: 288776 - DNA, 1000 bp, Homo Sapiens
tgcttggcataagcatttgtaggtcttcattcaattctgttagatttttttattggacttacataatgccgtttatttgagaaacacataacatctctcctttctatgaaaaattttttaaaaggtggttaaaattgcctttaattgcccagtagactaattccacagtcagaacatgcaaacttttttgaagaaattacttgaataagtagttttcatgttttcaatatgcagttttgaaaatgaggattcacctagacttttttagatttactactaggaaaccttcctcatatgaataaccatttatatgtgttttgcttaaagtattccaatgcctattttccaagcacagttctgccccccggttgacttttatgccacgtgtgcttcatgatggaacttttaggtcagttcctattaaatgagctcttctgcagatagcacattcagtagccttattttgttgatggaatactgtatcatatgctcaactctgaaaaccttgaacacggccaaaatccataaagattataaaagcaaactaagttgtgaagctatagtacatgtaggcatttagttaagtatagcaattcaaactgacctgcatccatccaaaacaaattcctccttcaaccttatttttacttgaaatttgctagaagaaatagcaaaccgaaatttgttttatgcatgagttaataccactggctcagcaaatacaagttagtttgctttaagcaggtaactttttttgtaatggaagaaatgcactacaaagttaagacagatttttgctaagtgcaggaggccctttattattgctgcagaaaacaaaagcctggctgagttgatgttttacattctcccttactgaaatctacatgacatgatgcttcttgctgggtttttgtacatgtaaacattgtcaagctgtgaaagaaaatggctggaggtgtgctttgtgtgaaaggtgagcaataaagtatctgttaagttc

SEQ ID NO: 288777 - DNA, 1000 bp, Homo Sapiens
gccaagcaatggttcagcatgtataaacctatcacctacaacacaaacctgctcacagaagagaccgactcctttgtgaataagctagatcccagcaaagtgtttaagagcaagaacaagatcgtaatcccaaaaaagaaagggcctgtgcagcctgcaggtggccagaaagggccctcaggaccctccggtccctccacttcctccacttctaaatcctcctctggctctggaaaccccacccggaagtgagcacccctccctccaactccctaccagctccagagtggtggtttccatgcacagatggccctaggggtgacctccagttttgcgtgtggaccgtaggcctctttctagttgaatgaccaaaattgtaaggcttttagtcccaccgacattagccaggctcgtagtgaggcctccagagcaggttgtgctgtcccctgcctctggaagcaatggggaatttggaatcttgtgtaagtgcccaaataagtctgagtgctttcctcttcttcaacactcaaccctcaatcccttagcactgattgattagagaggtcccccaaagaaaccactggttttgacccatgaagcattagaactgcattgttcattcaggagccactagtcacatatgactatttaaatttaaagtaaattgtatgaaaaattcatttcttcaattgcattagccacattttgagtattcatgtggctggtagattctgtattagcacaaagatatggaacatttccatcaccacagaaagttctgttggacagcactgcattagaatattttcatactgctcttcctcaattaatttttgttgttaatgttgatgtcttcattggatgggtcataatgttccatgaaacctctcaagtacacaattgtatgttctttgtatcccttaccacaaatatctcgctctgctcatttcttttgcagcttcctataaagtttgtcttcctcatcaaaaaaaaaaaaaaa

SEQ ID NO: 288778 - DNA, 1000 bp, Homo Sapiens
atgcactcacacactgaagaaacaaggaagatgcctttcaagcctcactgggcctctctgggacatggccacctgacctgtgtgtggctggtgcagcctggcaccaagtgggctacctgttaggaacatgaataccttacaaagctgaagctggaacttttcccaaagggttttgggtatagcctgccctggaggggaaggaagtccatgcaagcaaagacatgcagtttgcttgcacacaccagcagagctaagactggagtctcctgtggcctaactttcaatgagggaaccggatgctgttcacactttgactggatggagatgcatttacaaaacagactggagaaggacttaatactcagatggattggaactatcatggtcactgctcctctcccctccccacaaaaggaaaaaaaagctggatttgattttttttttctggtcactcgagcacatctaagatcacccattaggttttatctgggacctgcagtttggctttgggattgatcatcttgtggattttattcctgacgattcccttgctgcctacccttttctctcctctggttctcaacctcaacgagttcaaatcagttgtcctttttagctcccgtggaactgttttgtatctgcctctttactagtctaccttagtgccatccaccagctttactctctgacacacacacgcacacacacacacaattttaacttgtttttttgtacataatgtacatactgtcaattttttattaaaagaaatatgctttgatgtgctagcataactgctctagcttcttgtgtaccatagtactgtggcttcagatttagtacctatgaacagatgtacaagacatttattacactttttaccaaagggagttaccattgtagtacttttgtgtaaaacttgtcttcccctttgcccccaacttttttttttttttttggtaaaaaaaaaaaaagcttgggttcttacttaaaaaaaaaa

SEQ ID NO: 288779 - DNA, 1000 bp, Homo Sapiens
aacttcttttccaaatgaaacggcaacgattatcagccagtacaagctatttccaaccagatttgctagaggaaggcgaattacttgtgttgtaaaacatccagccttggaaaaggacatccgatactctttcatattagacatacagtatgctcctgaagtttcggtaacaggatatgatggaaattggtttgtaggaagaaaaggtgttaatctcaaatgtaatgctgatgcaaatccaccacccttcaaatctgtgtggagcaggttggatggacaatggcctgatggtttattggcttcagacaatactcttcattttgtccatccattgactttcaattattctggtgtttatatctgtaaagtgaccaattcccttggtcaaagaagtgaccaaaaagtcatctacatttcagatcctcctactactaccacccttcagcctacaattcagtggcatccctcaactgctgacatcgaggatctagcaacagaacctaaaaaattgcccttcccattgtcaactttggcaacaattaaggatgacacaattgccacgatcattgctagtgtagtgggtggggctctcttcatagtacttgtaagtgttttggctggaatattctgctataggagaagacggacgtttcgtggagactactttgccaagaactacattccaccatcagatatgcaaaaagaatcacaaatagatgttcttcaacaagatgagcttgattcttacccagacagtgtaaaaaaagaaaacaaaaatccagtgaacaatctaatacgtaaagactatttagaagagcctgaaaaaactcagtggaacaatgtagaaaatctcaataggtttgaaagaccaatggattattatgaagatctaaaaatgggaatgaagtttgtcagtgatgaacattatgatgaaaacgaagatgacttagtttcacatgtagatggttccgtaatttccaggagggagtggtatgtttag

SEQ ID NO: 288780 - DNA, 1000 bp, Homo Sapiens; identical to SEQ ID NO: 117234

SEQ ID NO: 288781 - DNA, 1000 bp, Homo Sapiens; identical to SEQ ID NO: 222486

SEQ ID NO: 288782 - DNA, 1000 bp, Homo Sapiens; identical to SEQ ID NO: 117236

SEQ ID NO: 288783 - DNA, 1000 bp, Homo Sapiens
tgtggttccagtccattttcgatatgctcgagcacttccgggtgcaccccatccctttggagtcgggaggctccagtgatgttgtccttgtcagctatgtcccatcctcccagcgacagcagggccgggagcaggctgggagccatgcgggggtgtgcgagggagatggatgccaccccgatgcctcctgcaccctcatgcccttcggagcgagtgactgtgtaaccgaccacctcccatgacccaccccagccccctgaacccccttcatggacagatcccccacagcctggggcagaagaggcgtcgagggcgccagaagtggcggcagcagcagccgcagcagccaaagagaggcaagagaaagagaaagcgggcggtggaggggtcccggaagagctggtccccgtggttgagctggtccccgtggttgaattggaagaggccatagccccaggctcagaggcccagggcgctgggtctggtggggacgcgggggtgcccccaatggtgcagctgcagcagtcaccactagggggtgatggagaggaagggggccaccccagggccattaacaaccagtactccttcgtgtgagccaaccccacccgctccaccctttttaaaccccccagccctgctcgtgagattgggctgggtagggacagaggaggccgaaatccctcccccatgcttcctgacccttgttggccaagggcatctttgatggtacaagcagaggctcgggagaggctcccgtcacacactacaggtcccctccccagggcaggggatttgggctccatgagctccttgaggggctcttctggtcagccccaccctgggggccatttccccattaactacccccagcccgaggcagggtgagggggaagggctgtcagttacattaaggtggttgttgttgttgttttaaacaaaatggagaagcataaataaataaaaaggtttatctcggttcaaaaaaaaaaaaaaaaaa

SEQ ID NO: 288784 - DNA, 1000 bp, Homo Sapiens
tctcaaaaaaaaaaaaaaaagtacctgcctcaggtagggactgaataaacacgtgtaaggcactttggaaaaatacctggcatatatagtaagcagtatgttggccattacgaaaggccctgggaattctgtactgctgctcatgggtgtagtcggttctagaggggtgggcaggtgggagtagctgaggaagacaagtggctggaatggtatcacatgatacacagaagtatcctcagttctgaatctaccttggcctcaagggcccaggagaataacttttcccagctgacagcctctctgaggacaatgacatatgaatgaggatcaaaacgagctttggccaggcactgtggcgctcacctgtaatcccaccattttgggaggctgaggcggaggaccacctgaggcaaggaattcagaaccactctgggcaacataatgacactaaaaaagactatctctaatcaaggctagaaccaagggaaggctaagaattgcccagtactgtgcaactactgaaagccctacccaaggccaccagccttgtcttcctctttcctctgtcagttcaaaaagaacagaaacctccagctcttttacatagcaggtaccaggcatttatcagaagaggccaacttctggttcccatgcagccctttgaatagtgtgtctaaacaaaaataggtgtccaagtagtcacactgagactttaactggtaacccaccctgtggcgtcagtcgcagtgctctggccaacactatagcagggcttattcttctccctcatgtgtagtgaaacaaaatgtaacaccttgggttcattcagttccattccctatgtctacctgtgtcaatataattccctgatttggaggcagctctcctcattttccccaaaacagggaaagcaaggagtaaattcctcttaaaatcaaaagctaataatatgcttcctaaaataaagactcatcaaggtctcaaaaaaaaaaaaaaaaaa

SEQ ID NO: 288785 - DNA, 1000 bp, Homo Sapiens; identical to SEQ ID NO: 222487

SEQ ID NO: 288786 - DNA, 1000 bp, Homo Sapiens
aaaaacaaccatttgaaaaatttttgtcaccagcaaaacttttcactaattagtgatatgaaatgtgatttttgtgttgttaaacttcagctttggaaaactcagtctctttcattatcatccattccaatttgaaggagttgggcagctaatttggttaaaggcagtcttgagggttagaagtattacttccttttcgggttccagacctagcttgtgactgaaagttttagaaaaaggaagtacatctatagccgaattgataaggttattactgtgttttgcacaaagtatattagcaaaagtatttgctggaattattggtagatggcagtcccactcctacacctgctttgtcagatacagctgggttccctggctgactctgtaccttacttacactacttacttaatagaaacacaaacttggaaattgtgccagtggtccagctggagcacaacgtttggtgaatatgctgtttcctcagttcagagaggtagcaactaggtaaactccttataaaaagcaaatacctggatttacaaaagtgaaagtagttgttcacaaaagaattcgccatggaattctttcagttaccaagctctcctggtaatgtttgtggttatatcatttacacaaaacttttcaggaacttctgtgttgtttaagcaagatgtatctgtactgatgtctcagtgaatcagtctgtttattaagcacttatcagggcttccacacacttatttattttgccctagttaatcctgttgtttgctgccattggcatgaaatggccaactgtggctgttacagttctttcattcaattataacttgtaaaccagtgactcctaatctttttcaagttaagacaccttaccattgcttatttggttttatgagacttgttcctttttttctccctaaggaaaaagaaagctttatgacatatttatttttttaataaaactaagcaaaaacaaaaaaaaaaaaaaaaaaa

SEQ ID NO: 288787 - DNA, 1000 bp, Homo Sapiens; identical to SEQ ID NO: 117239

SEQ ID NO: 288788 - DNA, 1000 bp, Homo Sapiens; identical to SEQ ID NO: 117240

SEQ ID NO: 288789 - DNA, 1000 bp, Homo Sapiens; identical to SEQ ID NO: 117241

SEQ ID NO: 288790 - DNA, 1000 bp, Homo Sapiens
tagaacaggaggtggaaggaatgaggaaagagctcattctcatgaagaagcaccatgagcaggaaatggagaagcatcatgtgccaagtgacttcaatgtcaatgtgaaggtggatacaggtcccagggaagatctgattaaggtcctggaggatatgagacaagaatatgagcttataataaagaagaagcatcgagacttggacacttggtataaagaacagtctgcagccatgtcccaggaggcagccagtccagccactgtgcagagcagacaaggtgacatccacgaactgaagcgcacattccaggccctggagattgacctgcagacacagtacagcacgaaatctgctttggaaaacatgttatccgagacccagtctcggtactcctgcaagctccaggacatgcaagagatcatctcccactatgaggaggaactgacgcagctacgccatgaactggagcggcagaacaatgaataccaagtgctgctgggcatcaaaacccacctggagaaggaaatcaccacgtaccgacggctcctggagggagagagtgaagggacacgggaagaatcaaagtcgagcatgaaagtgtctgcaactccaaagatcaaggccataacccaggagaccatcaacggaagattagttctttgtcaagtgaatgaaatccaaaagcacgcatgagaccaatgaaagtttccgcctgttgtaaaatctattttcccccaaggaaagtccttgcacagacaccagtgagtgagttctaaaagatacccttggaattatcagactcagaaacttttattttttttttctgtaacagtctcaccagacttctcataatgctcttaatatattgcacttttctaatcaaagtgcgagtttatgagggtaaagctctactttcctactgcagccttcagattctcatcattttgcatctattttgtagccaataaaactccgcactagcaaaaaaaaaaaaaaaa

SEQ ID NO: 288791 - DNA, 1000 bp, Homo Sapiens
ctagaaccttaatggtagaaggaattgcaaagaatcaagtccacccttctcatgtgacagatggggaaactgaggccttgagaaggaaaaaggctaatctaagttcctgcgggcagtggcatgactggagcacagcctcctgcctcccagcccggacccaatgcactttcttgtctcctctaataagccccaccctccccgcctgggctccccttgctgcccttgcctgttccccattagcacaggagtagcagcagcaggacaggcaagagcctcacaagtgggactctgggcctctgaccagctgtgcggcatgggctaagtcactctgcccttcggagcctctggaagcttagggcacattggttccagcctagccagtttctcaccctgggttggggtcccccagcatccagactggaaacctacccattttcccctgagcatcctctagatgctgccccaaggagttgctgcagttctggagcctcatctggctgggatctccaaggggcctcctggattcagtccccactggccctgagcacgacagcccttcttaccctcccaggaatgccgtgaaaggagacaaggtctgcccgacccatgtctatgctctacccccagggtagcatctcagcttccgaaccctgggctgtttccttagtcttcattttataaaagttgttgcctttttaacggagtgtcactttcaaccggcctcccctacccctgctggccggggatggagacatgtcatttgtaaaagcagaaaaaggttgcatttgttcacttttgtaatattgtcctgggcctgtgttggggtgttgggggaagctgggcatcagtggccacatgggcatcaggggctggccccacagagaccccacagggcagtgagctctgtcttcccccacctgcctagcccatcatctatctaaccggtccttgatttaataaacactataaaaagttctttgctttaaaaaaaaaaaaaaaa

SEQ ID NO: 288792 - DNA, 1000 bp, Homo Sapiens; identical to SEQ ID NO: 117242

SEQ ID NO: 288793 - DNA, 1000 bp, Homo Sapiens; identical to SEQ ID NO: 220928

SEQ ID NO: 288794 - DNA, 1000 bp, Homo Sapiens
ttttagtaactttatataaaatgtgtgagacaaaaacttattaaggttaaatagaattgtttcttctgaataatctaacaaaggaaaatataagtgattgaatcataagatataaggggggtaaagtattaaaaataacttttttgtttgataacttgagaatttagaagattttgccaagtatgtgttgttgcttgacttcttaaatatggcattgatgaatttaaagtaggagcatcagttattacttctgattcattaatggccagaattttgtgtttggtgtaatagttgtgtcaccattcttgttgctttttaaaaatcaggctaatcatgtggtccatgtctcttcaaagcttgacctgcacaaatgccatatttctatttggaccacatattctccattttgcattgagcagtagagtacagtggaaagggaataagaatactgattattctgaacagtttagtcccaagagaatagcgttttaaaaaagaaaaacaagatttggagtcattgtgggttatttttggtgggatggaggatcttaaaaatgcctaattgtgagagaatcaattgctgaaagtgttaaaatttctgaaaataaatgcttaattacatatacaggaattaaatagtttggaagagggttggattatcattacctttacaatactgtataatcagaagttctctgaacctcaattgtatatctagacataaaaattgttttctgtataggatgttgtttggtttgtttctgagtgtttaaattttgcaaaaacaaatgttaaatttgtgcttcagtacctagataaattggaaaggttaatgttctagtttctggaaggtaagcctgggagacacataagcaattcactgctataatttagttgatgtaaaatgacggaaactgactcaatatgtcaggtttaactctgcccaaaagcagcagacatgtaagcagatgtgcaataaaaaatgatcttgatccatttc

SEQ ID NO: 288795 - DNA, 1000 bp, Homo Sapiens
cccatggtcaccctgaagcccttagattccaacccctcaatcagagacttccttcattaacaaagacccttgttcttatccctcaagaagaaacccaccataaccagcccactgtcacccctaatttacagacaccaaaacagtcctggaagtgctaattacaggaccccccaagtcttcctaccctctgcaccctcaagaaacccccagtgccttgtatgaagcccaccccacatggcccacagctcctgtgctggccagactcccagaaaattctctattttttaagtaacgacttccccctttgggggaccccaaaatttggaggccccattctaggactctggggatcccaaaccctagagtacacacgtcccaaactcccctgtgccctcaagtcctacagcccctagaagaccccaatgccgtaactcctaggacccccaaatcatggaatcccaaatccccagggaatcccaaatttgaaaatccaatcccaagtccccaggaaacccaatcatgaggtccttgtgcctggtatggaggagactgcagtcaggatatgcattccaggctcccagacacctcaagccctattcacaggcaccaggaaaccccacacaggaattcccatccctggaaactggagaatttcaatgccccgagtccatgggtttcaagacaccaaattccaagagccccagccctaagggaaccccaaatcctaaagcctccatctctaataaatggaaggccccaaggccctgaggggatctcaaatcctggaaccccgatttcaatctacgttctagtcactggcctcaaaggaccccacagcacctgggccagaccaacagctcgagggagaacctgaaggcccagggggtccagggcggacctggggccccgaccaccaaggacagctcacgactgccccttcactgcatgtccccaaactcagcatgactcctgtcctcttcaataaagacgtttctatggc

SEQ ID NO: 288796 - DNA, 1000 bp, Homo Sapiens; identical to SEQ ID NO: 222492

SEQ ID NO: 288797 - DNA, 1000 bp, Homo Sapiens
gcaactttgacctcaaggtcctaaatgcccagaaggctggatatggtgccgctgtagtacacaatgtgaattccaatgaacttctgaacatggtgtggaatagtgaggaaatccagcagcagatctggatcccgtctgtatttattggggagagaagctccgagtacctgcgtgccctctttgtctacgagaagggggctcgggtgcttctggttccagacaataccttccccttgggctattacctcatccctttcacagggattgtgggactgctggttttggccatgggagcagtaatgatagctcgttgtatccagcaccggaaacggctccagcggaatcgacttaccaaagagcaactgaaacagattcctacacatgactatcagaagggagaccagtatgatgtctgtgccatttgcctggatgaatatgaggatggggacaagctgcgggtactcccctgtgctcatgcctaccacagccgctgcgtggacccctggctcactcagacccggaagacctgccccatttgcaagcagcctgttcatcggggtcctggggacgaagaccaagaggaagaaactcaagggcaagaggagggtgatgaaggggagccaagggaccaccctgcctcagaaaggaccccacttttgggttctagccccactcttcccacctcctttggttccttagccccagctccccttgtttttcctgggccttcaacagatcccccactgtcccctccctcttcccctgttatcctggtctaataaccccccacacatacacctctggtgacctatttgcacagaccgtcgtcttccctccagtcttctgagggataggggacattccatcccaagcttctcccttacccacacctatccttttgaggggctttggggtggagctggggcaagcagagggactgggtcttcacttcttgggctaataaaattgtttctttgtggactaaaaaaaaaaaaaaaaa

SEQ ID NO: 288798 - DNA, 1000 bp, Homo Sapiens
tgtggagacttttcttccccattttccctccctcctttttcctttccatgttacatgagagacatcaatcaggttctcttctctttcttagaaatatctgatgttatatatacatggtcaataaaataaaactggcctgacttaagataaccattttaaaaaattgggctgtcatgtgggaataaaagaattctttctttcctactacattctgttttatttaaatactcattgttgctatttcactttttgacttgacttttatatttctttaaaaaattccttccttttaaaaaatataaaagggactactgttcattccagttttcttcttctttgttgttcttctagtgtgacttttcaagtgtaacagccattcttcctgactttaatattgtccagttctggtcttttctgtgaattaccactgggccccttacctcaatgctttttgttgatgcccactctggttcccttgtttatctgagtctgttggtaccccaaatgaccccacacccatyttaaagtactttttttcaccttccctgtttagtactggccagatgagttttttctagagctctgtcactatctgaaaagaaagaggctatgggaaacatagaaatggtatgtattaataactgatcataggctgaggagaaaaaatgtagctggctgcaaacccagtgctgtgaggtgacttatatgaggttccagatcaaagacaggccgtgtgagccagtccaggagggtgtaagttctgaatggttccttgctgactttgggtgacacatgtaccacatactggctcagtttaagtcatggttctattgtagatttatttttatattagttaataaatgactttaaattgtcaccaattgaaaatcttgtcactcttttggttttctttatatagctcagccaaatctctgttttatgtcctgtcctcatctcttaagctaaatctgtttggatcatattaataaacctcgtgccg

SEQ ID NO: 288799 - DNA, 1000 bp, Homo Sapiens
aaccattctttggaattggcgtggtatatttaaccacgggagcgtgtctggaaacgcaaactatcattaatttcatactagtttgtaccgtatctgtaggcatcctgtaaataattccaaggggaaaactaaacgaggacgtgggttgtatcctgccaggttgagtggggctcacacgctagggtgagatgtcagaaagcgcttgtattttaaacaaccaaaaagaattgtaagggtggcttgctgccaggcttgcactgccgttcctgggggtgtgcatcttcgggaaaggtggtggcggggcgtccactaggtttcctgtcccctgctgctccttccgtaagaaaatgaaatattctatgcctaatactcacacgcaacatttcttgtactttgtaagtcgtttgcgagaatgcagaccacctcactaaactgtaaacggtaaagagatttttacttttggtctccgtgagtcgcatctctactaaggtttacacaggaattccacctgaagacttgtgttaaagttctacagcgcgcactgttaactgaacgtctttttcttcagcctatacgcggatccttgttttgagctctcagaatcactcagacaacattttgtaactgctgctgttgctttctacatacaccttataaagtgacatttcaaaagaaataaggtgccacagttttaaaccagaaggtggcactctgtggctccttgtagtattatagctatactgggaaagcatagatacagcaataaagtacagtaattttactttttttcttgtgttacatctaaattacaacccttaattgccacgtgtgcacttactactctccagtatgtcttattactctccagtatgtcacgcatctttaacttttcacgtcctatgtttgctttctcccatttttaagagatggtaagttaactggaattgatttactgaatgaaattaaatgcagatatccctgtttttgaaataagaaaaaa

SEQ ID NO: 288800 - DNA, 1000 bp, Homo Sapiens; identical to SEQ ID NO: 117243

SEQ ID NO: 288801 - DNA, 1000 bp, Homo Sapiens; identical to SEQ ID NO: 222494

SEQ ID NO: 288802 - DNA, 1000 bp, Homo Sapiens; identical to SEQ ID NO: 117244

SEQ ID NO: 288803 - DNA, 1000 bp, Homo Sapiens; identical to SEQ ID NO: 222496

SEQ ID NO: 288804 - DNA, 1000 bp, Homo Sapiens; identical to SEQ ID NO: 117246

SEQ ID NO: 288805 - DNA, 1000 bp, Homo Sapiens
gagcagttacaccaaggagagcgtgaaggagatgattgagccagagaagaaacgggttgtgatggtaatggtgtgggggaaatgaacttgagctttaaacttgatttgagtttcagtgtctctgaattgaacatcccacgttggaagaagatacatttgggggctccaggactacagtagaaaagtatagagcaagcaggaaaatcttctagtaaaacttacatgcaggacaacaaaatgatgaaagatatccaaataccagataatccaccaggaaggcttttgtttaggaatttgtttcaagaggaacaagggatgagggagaaaaatccgttttatccatcagagtcagtgctataaaattgcctattaaggtaaaagaaaaatgtggagactattttactatacagagagcattaattcagatggcttagaaaagtgataccagcccaagaacagggatctaggtgagcccattgtaagtatcattgaaaacaaaacatgcccgtcaacatgtcacagaaaacgaacgaaggacaacaagaagtggatgagaatattttgttgaccttcatgggtttacagcctctgtctctaaacaaagtatggaaacaagtagagcttttattttgcttttgtttttgttttgtttttttttttgttttcccccactaaatagaaatgagggtccttagtctgtttctgacaatctgttaatttcttaggacagctgtctttggtttgctttccagcaggcgtagtatatttagtcggagagcacatctgtatgcgacaacttgattacatctttttttctagctattttgcattttttcttttaccatgtttcagtttctgcatgtagatttaaataaaaaacaaaacttgtaaagttgtaacatttcacatggaaatgctgcccaatcttcaccagcttcagaaatctgacctttgccgatgctgcaataaagtgttgtaatttaaaaaaaaaaaaaaaaaa

SEQ ID NO: 288806 - DNA, 1000 bp, Homo Sapiens; identical to SEQ ID NO: 222498

SEQ ID NO: 288807 - DNA, 1000 bp, Homo Sapiens
tgcccaggctggtttcaaactcctgacctcaggtgatctgcctgcctctgcctcccagagtgctgggattacaggtgtgagccaccacacctggccgaaagacagtattttgatatagccacatacatgatttaatgagtaatgttaagtacagaaaagctgccatatccacatagttttagggggcatttcttcttcagtctaacaagaatatgatatccaattgtggttttccaatttatttctcttccaatttcttttgtatacctcacaggagaaattgaatcctagaactgggagatgactgccctgcccagggttttgtaatacataattgaaaataaaagtccctgaaactaaatgtttgcagcctgtatgaaatggactgtggaagggggataatttctctcctcacagaaagccactcgtctccttgaatgaggcattgagcagacacacgtttctctgtgtcgtggggcaggaagcaattcccttgcctcttcagcacatctcagttctttcccacatgaccccagaaccacatagaaaacattgaaaataatggattcttcattgtatttgaattttttttttttaacctttagcccaaaagggaagtgtgcctcgtggaaagagcaaatgccgtaaaatagaaaccaggagttttaatcgccatatattttaatgtgcttgcatgatgggaatgtgacttttagcactgcatggtgtttgggggcaagatattaatgtggaaatcttagcttaagttttactgtgctctcatcctgtgtcagctacccctctaaactgaaaaagaggcatggctcatttctctcctgctttatgtttttgaggttgacttgtaagataaaaataaaaataagaaaaaaatatatctaggcaaatgacatgaaaaaaaagttgaaatatactactggtgttcatttttgtcctgcagtgttgctttctcaaagaaataaacatgtggctggaagtgttt

SEQ ID NO: 288808 - DNA, 1000 bp, Homo Sapiens; identical to SEQ ID NO: 117248

SEQ ID NO: 288809 - DNA, 1000 bp, Homo Sapiens; identical to SEQ ID NO: 222500

SEQ ID NO: 288810 - DNA, 1000 bp, Homo Sapiens
cacgcactctcctctcctcagtctcctttccccagcacccccacctcacggcgggccttgcacagaacactgtcggacgagagcatttacaatagccagagggagcactttttcacctccagggcgtcacttctggaccaagccctgcccaacgacgtcctcttcagtagcacgtacccttctctccccaagtcgctcccgttgaggaggccttcttacaccttaggaatgaaatcgctgcatggagagttctcagcctcggacagctccctcactgacatccaggagacccgcaggcagcctatgcccgaccctggcctgatgcccctgcctgacactgctgcagacttggattggtccaacctggtagatgctgccaaagcctatgaggtccagagagcctcattttttgctgctagtgatgaaaaccatcgccccttgagtgctgcatccaacagtgatcagctggaggaccaggctctggcccagatgaagccttacagcagcagtaaagactcctctcccactctggcttctaaagtggaccagctggaaggtatgctgaagatgcttcgggaagatttgaagaaggaaaaagaagacaaagctcaccttcaggcggaggtgcagcacctgcgagaggacaacctgaggctacaggaggagtcccagaacgcctcggacaagctgaagaagttcacagaatgggtcttcaacaccatagacatgagctagggaaggctgaggaggacaggagaagggcccagacactccctccagtgagtgtcctgcagcccttattccctccatagaaagcatcctcagagcaccttccctggcttcctactctgccccctttcggggagtgcacaacacaatagttgcagatcaacaatcatcacctgccttttgtagaaaagaaaaacaaaaaaagtaaataaaaattttaaacagtaaaataaaagtttaactgctaaaaaaaaaaaaaaaaaaaaaaaaa

SEQ ID NO: 288811 - DNA, 1000 bp, Homo Sapiens; identical to SEQ ID NO: 222501

SEQ ID NO: 288812 - DNA, 1000 bp, Homo Sapiens; identical to SEQ ID NO: 222503

SEQ ID NO: 288813 - DNA, 1000 bp, Homo Sapiens
attatagttgagagtgaagtactatgtgtgagttatagatctctcgaattatatttatagatgcagtgtcctgcccagttttgtttgcctcctacattttactgtaaaatatttattgtcttctagccttgagcctctgagggtcagtaagtgaagtacagatagcaaaattttactacctcgttaacccttttcttaaaatattctctatctttctatgtctctttctgacatagtaatcccaaaggattgtgttactccccgtgaaagttattacttttcctttaaaaatggttttataataagactgtttaaaacctttccagtattggtacatcttggcttctggcccaaaccccaagcagaaaagaaaatggaataatggagcattgtttttccacattagtattagggcatcagattcttggtgaaacactataattaagtagttataattaaataactgttcttcatacttaggactcttaatacatttctttaagacttgtaagtataattgtaaagcttgttaactgtttatatactaaagaaaaagctttacaagataagactgaaattcagaataccacatctgtacagcgttgacaactctaactaaaaggattacagcccttaaaattttagcttaaggacattttaaaattgcatgagattagcaaaattattaatttaaaaccccaaagtaaattgcaaattttaaaatttatttttgactcttttatcacatgctccaatgtatgtacataagtgtctgtggcttaaataatatgttgttatttgatacatttttgtggtgcaagtaattaatgttattatttgattgttataccatatgtgcccattaaaattctttttaattaaaaatatttcaaatatgcagaaaaataataatataaatgcccttgtacccttcacatactattttgccatatttgcttctgatttttaaataaataaaatgttactcttttgtacttct

SEQ ID NO: 288814 - DNA, 1000 bp, Homo Sapiens
ctcaccatcatatgccccaaacaactgaaagttggcggttatcaccagactgtgagtttctggcaagtagcttggggaagctgaataaactctaggcccagggctactaaagacttcaggatagaattctccatcaaatatacagcataagtaaaactgctctgcactgtttaatccatttccaaggggcttagaaaagctaacaagggtgtgtcccctgtcctgccccaccggtttgctggctttgtaataacataagaccattgtggttgttggtgtcagataccttcccatcctgagctctctcacctacctgctctctctcctagagcaggatactggggtacttttaagaagggtgctccttttaagatgcccagaaaagctgtatttaactcttgctatttgtaacttggggatggtctcccctgccccagggcacataagagcaaaggctccaatggtcagtggatgactctgcaaaagtgaccccctgtgccagaagctatagccctctccccaacaggtctctcttgttggccagagggcctgcttcccatgggcattgcaagtgccaccgtgcggggcctggctctgcacacccaggaaaagtctgcagacccccagccctccgcaataattcaccagaccagaagccactggtgtacagagaacacttaaaaaaatgtattttatgtgaaaaaaaattaaaactctgtatactgtatcagcagctttgtgtaaaaatggcaatcaagagagtctaatatatttaaaacttttttaaaaaaaatcttcgcagatctttgatatcgtactgaggtaacttccacgtagccccttgccacgcggcaccggtgggccttgggtccaaaactgtggctcagccacatcccaaagggggcacatgtccctggagttgcttccagctgccaaggcctgtgacagaattcgctgttaagagtttttaattaaaattattaaattccttttaataaca

SEQ ID NO: 288815 - DNA, 1000 bp, Homo Sapiens; identical to SEQ ID NO: 222505

SEQ ID NO: 288816 - DNA, 1000 bp, Homo Sapiens
tgcaactgaatacttgaagtaggaagtaggaaatccagtagggaaaatagggtccttgaaacagaaaaaaaaaaccaacccatgtatagctagctatttctatgtatgtgccaattttgtcacagctcttgtttggagggatcattttctgcccaactttcattggttaaaatattactgatcttacctttatgaggtcgtataatttagtcccttaaaaattaaattctctctaacataacaacctttcccatttcgtgtaatattctctgatgtttgggggttaccaaaaatatccctttttcacatattaagaatagtctctgggtttacaacaaacactgtgatgttgggaagctatttcctttgcgcaaactttaacaggttttcttctaatcataacatagttgaaaaaagaagtttgggctaacatttaggagaagttggtcttactttgtgcaaaagcaggcttgtgctttataccccatttgatttcgatgtacagtctcaattttgtatttaatgatttttgtgtatccagtatgcacgttaacagcgtgtcaactttcatttgaaagtgggtttcaatttactttttaaacagtgtttatgacgagacctcagatgtgttgacgtaagctctatctgcaatgtttttgtgtagagtggcgattgaatgctgcccagggtcagtgtatctaattccccgagaccctcgtttgatagtgcttcttgtaatatttcttcaagtgagtggcatgtgggttgtgatattgaccatgtgattatggacatcgatatgaaaaataaataaataaaactaaggaaccctggaaactaccagtgggcatgtattagccagtcattgtaacctcgtgtctagtagaacaatgtacaaggtatgtacagttcataaatttgttgtcatgtgtatgagaagtactttgtgctgatcgccttatttatattcatcaaataaaccttgtttctttctgaagtg

SEQ ID NO: 288817 - DNA, 1000 bp, Homo Sapiens; identical to SEQ ID NO: 117250

SEQ ID NO: 288818 - DNA, 1000 bp, Homo Sapiens; identical to SEQ ID NO: 222507

SEQ ID NO: 288819 - DNA, 1000 bp, Homo Sapiens
tgttaattttgtcacagcctatttaattaaaagaacgaaaacacttgcctttaagcttgccaggttgttccgctctctcatgagaagagcttggatacagtgagtttgcacagctcagtttttacctaaccacacacttgcagacctcctgaggtacacagagtagctgagcagttcacttcagggatcaggtcatctctgctcctcctagtttcaccatgttctggcaataaaaaacacatattatatcctggttttctctatccttgcattactaaggtgactgtctctctttatacatccttgtatggttctcccagtattagcaagattgtatatctgtaaagaatgtccagttttgtaaatatttccctgcctttttttttctttttttacatctgattttaatgcttcgttaacttcaaaaggaactggtagagttcagaaggtgagctgttgtttttctaaacctcttcccaggaaggggacattgacacttgaatttttgtcacctttttcctcattagaaggaaagtagaaagccttactgtaggatttttaaaaaaaaatccatctcaccccatattggtcttaaataagtatagactaattaacctaagctacctttaacaacgtagaatttagatgggttcatatatgtgagaaaaacctgaatataggacaggggtcctacttttttccccacctctgtcgcccaggctagagtatagtggtgtgatcttggcccactgcaacctctgcttcctaggttcaagtgattctcctgcctcagcctcccaagtagctgggattgtaagagtatgccaccacgcccagctactttttgtatttttagtagagacagggtttcatcatgttggccaggatggtctcttaactcctgccctcaagtgatccaccagagaggagatcctcggcctccccaagtgctgggattataggcatgagccaccgtgcccagcctactttctaattaatt

SEQ ID NO: 288820 - DNA, 1000 bp, Homo Sapiens; identical to SEQ ID NO: 222508

SEQ ID NO: 288821 - DNA, 1000 bp, Homo Sapiens
tctctactaaaaatacaaaaattagctgggcgtggtggtgcatgcctgaaatcccagctacttgggaggctgaggcaggagaattgcttgaacccgggaggcggaggttgcagtaagccgagaccatgcttattgccctccagtctgggcaacaaaaatgaaactccgtctcaaaaaaaaaaaagtaggtcaattcgtaacagtttattttggacacaccctgaagcttttgttttgaattaagaaatgagtttcaggaattgacaaaccatttgttaaccagctgtcctgggctattgaagaagatttcattttccgcgcatccacttgttgcagtccaagtcctctagtgcaacgccatagcaaatataaagatttactatgcacgtgatacattttatggagtgcctcaagccaagatagtgaatttatatgaagggtgtgaaatgtatttctttactactatagtagtttagttataactttgcatctataattgagctttctcatctgtcaaatgctatggttttcttaaaatgttacaattctagatctatccaccttgtttttttattgtctacaaaccattaaatgtaaatattgtttttagagtcagtcattggctttgtcatttaccctttgagagttccacaagtggtagtagagtggtttaacgtctttcctctagtactaccagtattcataaatgtataccccttactgtaatttgttcctcttagaagtcagatcatctgatttatagaggattatgaaaaccagagtttttgaaaaggcttattttatacatacgtattatatagagaaacaaatgtttttattaaatgtttcattgacccaagtaatttaaaagtaatatgttacctatgtctttcaggaaaaataattatagcagctgatctgtaaatgactttaaaagctattttagtaatttaaataaatttactttcttggtttatactctcaaaaaaaaaaaaaaaaa

SEQ ID NO: 288822 - DNA, 1000 bp, Homo Sapiens; identical to SEQ ID NO: 222509

SEQ ID NO: 288823 - DNA, 1000 bp, Homo Sapiens; identical to SEQ ID NO: 117252

SEQ ID NO: 288824 - DNA, 1000 bp, Homo Sapiens; identical to SEQ ID NO: 222510

SEQ ID NO: 288825 - DNA, 1000 bp, Homo Sapiens
cgattctcgggattcgaagatggctgcacagtcagcgccgaaagttgtgctaaaaagcaccaccaagatgtctctaaatgagcgctttactaatatgctgaagaacaaacagccgacgccagtgaatattcgggcttcgatgcagcaacaacagcagctagccagtgccagaaacagaagactggcccagcagatggagaatagaccctctgtccaggcagcattaaaacttaagcagagcttaaagcagcgcctgggtaagagtaacatccaggcacggttaggccgacccataggggccctggccaggggagcaatcggaggacgaggcctacccataatccagagaggcttgcccagaggaggactacgtgggggacgtgccaccagaaccctacttaggggcgggatgtcactccgaggtcaaaacctgctccgaggtggacgagccgtagctccccgaatgggcttaagaagaggtggtgttcgaggtcgtggaggtcctgggagagggggcctagggcgtggagctatgggtcgtggcggaatcggtggtagaggtcggggtatgataggtcggggaagagggggctttggaggccgaggccgaggccgtggacgagggagaggtgcccttgctcgccctgtattgaccaaggagcagctggacaaccaattggatgcatatatgtcgaaaacaaaaggacacctggatgctgagttggatgcctacatggcgcagacagatcccgaaaccaatgattgaagcctgcccatcctcccatgagagactcttgttagtcaacacatctgtaaataaccttgagataacagatgagaagaaatctgattgatgctggatggacctatcacaataggctgtggacttacttgccaccagcttgtgcatttagtgtgttccttttactttttgatactgtgttgtatgaaacccttttgtcctttgatttggttttttgtttttgtttttttagggggg

SEQ ID NO: 288826 - DNA, 1000 bp, Homo Sapiens
gacgccgctgcagctgctgatgcttctcctagtctcaatcgagaagaagtgatgaaactcctcagtatatttgagtctcggttgtcatttcttctccttcagtccattaaactgctatcttcaactaaaaagaaaacaagcaataacatcgaagatgacacaattctcaaaaccaacaagcacatttactcccagcttttgagagcaactgcaaataaaaccgcgactcttctggaaagaatcaacgttatcgtccacctgctgggccagcttgccgccggcagtgcagcgagcagcaatgccgttcagtgactgcacagagccgtgtcccagacacgctgtcagtgccttcaacacggagccggtttgttcattcggtgctttgtttcattaaataatagggaaatatccatttaaaacaggtatatcagtggaaacacagagttattttaagtgacagacaaattacggttgagttctgtggcttcttcacttgaagtgctaacatcagaatcaaacttaaagcttccactatttatgtctttgagaagtatgtagtacctcggtattaacagacctgctgtgatgcagttacactttcacgtatttttgaagtatgtcaagctacacgggtctaagatatgattattttggataaaatgttactttggtcaagagaacttttatccagatgacattacaggttcaagtgggttaaggagacctcctgtacatctacagtgtttccttttaaattgtccagaaaaaaggtgtgttcttcataagcttcagtgcaggatttttcaaagacgagctgttgtgcaatttgctgtatttaatgcatgttctgaaaggattcacttttgactttatatgacagttgatcaagaacaggtactacccctttttttcatttcaaacttgaaactgtgaataaggtaagaaaactattttgaataaataaactatttatttaaaatgtcaaaaaaaaaaaaaaaaa

SEQ ID NO: 288827 - DNA, 1000 bp, Homo Sapiens
agtcattctatagtgacatcatcccagactgccttctgtattcccctgtgtacagtctccttctgtttctaggtttagaagttcagaggtgactgtgtttctccatttccacagccaaatgggggaagaggtgaggctaggggagtgctgtgctgattctccagccatggtcagacaggtcacccaggagcctcgaggaaagccctggagggaatcacatgtgtactttttcatgaagctttttgcaaagcacatctgcgatacactagtttattgaactaatgtccaggagtagacatgattggtggccaagttatttggggacacctaaacagatcagtgacctgaatgacttctcagaacctttaatatgccaatgtgtgtggcaaacttacaagaagggagctaagtatccagcctctcccaaacctctttgaacaaagcttctgtccctcccacacctctcacctcacaggcacatcaggctgcagaatgcgctttagaaagcattgttttagtccaggcacagtggctcacgcctgtaatcccagcactttgggaggccgaggtgggtggatcacaaggttgggagattgagaccatcctggctaacacagtgaaaccctgtctctactaaaaaaatacaaaaaattagcttggcgtggtggtgggcgcctgtagtcccagcagcttgggaggctgaggctggagaatggtgtgaacccaggaggcggagcttgcagtgagccaagatcgcgccactgcactccagcccgggtgacagagcaagactccgtctcaaaaaaaagaaaagaaaaaagaaagcattgttttaattgagaggggcagggctggagaaggagcaagttgtggggagccaggcttccctcacgcagcctgtggtggatgtgggaaggagatcaacttctcctcactctgggacagacgatgtatggaaactaaaaagaacatgcggcaccttaaaaaaaaaaaaaaaaaa

SEQ ID NO: 288828 - DNA, 1000 bp, Homo Sapiens; identical to SEQ ID NO: 117255

SEQ ID NO: 288829 - DNA, 1000 bp, Homo Sapiens; identical to SEQ ID NO: 117256

SEQ ID NO: 288830 - DNA, 1000 bp, Homo Sapiens; identical to SEQ ID NO: 117257

SEQ ID NO: 288831 - DNA, 1000 bp, Homo Sapiens
gatatgatggatttgaaggttgccattgctgacaggctaagggatcctgattcacacattgtaaaaaaaataaataatcttaataagtcagcactgaagtactaccagctcttcttagactccctgagagacccaaataaagtattccctgagcatataggggaagatgttcttcgccctgccatgttagctaagtttcgagttgcccgtctctatggcaaaatcattactgcagatcccaagaaagagctggaaaatttggcaacatcattggaacattacaaatttattgttgattactgtgaaaagcatcctgaggccgcccaggaaatagaagttgagctagaacttagtaaagagatggttagtcttctcccaacaaaaatggagagattcagaaccaagatggccctgacttaatccttgtttttaaagaaaggaaatgtgcaatattgaagtgatctttttccctagtcagacaggcccaattccattgtgatgtttacctttatagccaggtgagtgcagtttgaacttgagatacagtcaactgagtgtttgctaggatcctaaggaacataaagttaattaaaaacttacacctaattatgtaaattgccttgttaaagacatgtgatttgtattttagatgcttgtttcctattaaaatacagacatttctaccctcagtttctaaatgtagactatttgttggctagtacttgatagattccttgtaagaaaaaatgctgggtaatgtacctggtaacaagcctgttaatatattaagattgaaaaagtaacttctatagttactccttctaaaatatttgacttcctaaattccccccacccaaaatctttcccttttgaaaatactaaaaactaagttatgttattataaagtgtaaaatggtttgtcttaattataggagaaaaaggccttgttagaaataaaataaactgacttatttcactaatgaaaaaaaaaaaaaaaaaa

SEQ ID NO: 288832 - DNA, 1000 bp, Homo Sapiens
cttcgtgtgtttcctaaacacatttagctgcttttttaacaaactcagccccatacttgagtcccttgttgttgggagcatttccaggcatcttttaagggaactgtgacaaacagcctcgggcagatgaacacggaggctctctgttgtctgtctctgagatctttgtgtctgggaatgcctaaagattttatttttttttctttgtttttattttattttattttatttttttgagacagagtctcaccctgttgcccaggctggagtgcaatggtgcgatcttggctcactgcaacctccacctcccagttcaagtgattcccctgcctcagcctcgcgagtagctaggactacaggcgcatgtcaccaagcccggctaatttttgtatttttagtagaaacggggtttcaccatgttggccaggatgatcctcaatctcctgacctcgtgatccacccgccttggcctcccaaagtgcgggattacaagcgtgaaccaccctgcccagccagaaactagattttctttatgcctccaccccttcttattcatttactttacaataccaaaataacaaattgcataggagtgtgggatgtggtttctgccttctagagagagatcagaattaaactagtactatgaaatgtccttttgaatgttaggtcaagaaatccatgtacagagtcgtgcacttcattggctgtaactgtcaaacttgccttgtattagaagttaaatcccatcgtaaatacatcacgaggccagctgtgtgatttctgagacctagatgagagtccatttacttcagcctttgattcagtaaatgttaagcagcagaagacttcgaatggttgaaattcattgttacaggatttaactcataaaccaatgagagattttttttttctctgcaatggttgctaagtctattccatgttaacactgtggaaataaatatgaagatgtggacattgcaaaaaaaaaaaaaaaaaa

SEQ ID NO: 288833 - DNA, 1000 bp, Homo Sapiens; identical to SEQ ID NO: 115431

SEQ ID NO: 288834 - DNA, 1000 bp, Homo Sapiens
cctcttcagcctgccacagcccctggcaggccagcagacccagtttgtgacagtgtcccagcccggtctgtcgacctttactgcacagctgccagcgccacagcccctggcctcatccgcaggccacagcacagccagtgggcaaggcgaaaaaaagccttatgagtgcactctctgcaacaagactttcaccgccaaacagaactacgtcaagcacatgttcgtacacacaggtgagaagccccaccaatgcagcatctgttggcgctccttctccttaaaggattaccttatcaagcacatggtgacacacacaggagtgagggcataccagtgtagtatctgcaacaagcgcttcacccagaagagctccctcaacgtgcacatgcgcctccaccggggagagaagtcctacgagtgctacatctgcaaaaagaagttctctcacaagaccctcctggagcgacacgtggccctgcacagtgccagcaatgggaccccccctgcaggcacacccccaggtgcccgcgctggccccccaggcgtggtggcctgcacggaggggaccacttacgtctgctccgtctgcccagcaaagtttgaccaaatcgagcagttcaacgaccacatgaggatgcatgtgtctgacggataagtagtatctttctctctttcttatgaacaaaacaaaacaacaacaaaaaacaaacaaacaaaaaagctatggcactagaatttaagaaatgttttggtttcatttttactttctgtttttgtttttgtttcgtttcattttgtactacatgaagaactgttttttgcctgctggtacattacatttccggaggcttgggtgaataatagttttcccagtctccctcggatggtggccttaaggcctggtagtgcttcaagaggtccactggttggatctctagctactggcctctaaatacaacccttctttacaaaaaaatcttttaaaaaaaaaaaaaaaaaa

SEQ ID NO: 288835 - DNA, 1000 bp, Homo Sapiens; identical to SEQ ID NO: 117258

SEQ ID NO: 288836 - DNA, 1000 bp, Homo Sapiens
gggccgcgatggccgcgacggccgcgacggcgcgcccggggctccgggagagaaaggcgagggcgggaggccgggactgccgggacctcgaggggaccccgggccgcgaggagaggcgggacccgcggggcccaccgggcctgccggggagtgctcggtgcctccgcgatccgccttcagcgccaagcgctccgagagccgggtgcctccgccgtctgacgcacccttgcccttcgaccgcgtgctggtgaacgagcagggacattacgacgccgtcaccggcaagttcacctgccaggtgcctggggtctactacttcgccgtccatgccaccgtctaccgggccagcctgcagtttgatctggtgaagaatggcgaatccattgcctctttcttccagtttttcggggggtggcccaagccagcctcgctctcggggggggccatggtgaggctggagcctgaggaccaagtgtgggtgcaggtgggtgtgggtgactacattggcatctatgccagcatcaagacagacagcaccttctccggatttctggtgtactccgactggcacagctccccagtctttgcttagtgcccactgcaaagtgagctcatgctctcactcctagaaggagggtgtgaggctgacaaccaggtcatccaggagggctggcccccctggaatattgtgaatgactagggaggtggggtagagcactctccgtcctgctgctggcaaggaatgggaacagtggctgtctgcgatcaggtctggcagcatggggcagtggctggatttctgcccaagaccagaggagtgtgctgtgctggcaagtgtaagtcccccagttgctctggtccaggagcccacggtggggtgctctcttcctggtcctctgcttctctggatcctccccaccccctcctgctcctggggccggcccttttctcagagatcactcaataaacctaagaaccctcaaaaaaaaaaaaaaaaaaa

SEQ ID NO: 288837 - DNA, 1000 bp, Homo Sapiens; identical to SEQ ID NO: 222515

SEQ ID NO: 288838 - DNA, 1000 bp, Homo Sapiens; identical to SEQ ID NO: 222516

SEQ ID NO: 288839 - DNA, 1000 bp, Homo Sapiens; identical to SEQ ID NO: 222517

SEQ ID NO: 288840 - DNA, 1000 bp, Homo Sapiens; identical to SEQ ID NO: 117260

SEQ ID NO: 288841 - DNA, 1000 bp, Homo Sapiens; identical to SEQ ID NO: 222519

SEQ ID NO: 288842 - DNA, 1000 bp, Homo Sapiens; identical to SEQ ID NO: 117262

SEQ ID NO: 288843 - DNA, 1000 bp, Homo Sapiens
tgcttcctgtccttcagaacacttctctgtgctcagtgggagccaggaagcctcaggcttcacgactgaatgcacccaatatccgacctggctgcgtgtttctggctgggctgccgtgtgcacagcaagttaactagaggggctgtgggccatggaactgtcagcgttattctcagaaggcggccgtggcatgggcagggtatagtgaggagtggaaggagacgtgtgcctggtaatatggggcggaatttccactcagctccatttgctggggatttaaagagaacccttgtgctacgccaggcagttaccgagccgaagggagatgatgggccttcgcccctcagtgggatggcagctgagggggccctgcatttgaccgtcgagactgcagcagcgcctttcctgtctgtggtttaagtctttgcagtcaagtactgatgcatccaagccaggcccatgcctggtgtctccctgactgcagaggagccccagggcaaggacagctcagctgctggcagcctgcctggcccatagacatcccccaagtagtctcaggcctctgacatgtccctgaggggcccctaagaaagaaagtggaggggacactccagaggctgtcgtgggaggatcatgtgagcctgggaggtcaaggctgcagtgagccgtgattgcaccactgcactccagcctgagtgacagagcgagaccctgtctcaaaaaacaaacaaacaaacaaacaaaaacagaacattctgggcacggtggctcatgcctgtagtcccagcactttgggaggccgaggctggtggatcacaaggtcaggagattgagaccatcctggctaacacagtgaaaccccgtctctactaaaaatacaaaaaaattagccaggcgtggtggcggtcacctgtagtcccagctactcgggaggctgaagcaggagaatggcgtgaacctgggaggcggagcttgcagtgagccgagatcacaccactgc

SEQ ID NO: 288844 - DNA, 1000 bp, Homo Sapiens; identical to SEQ ID NO: 117264

SEQ ID NO: 288845 - DNA, 1000 bp, Homo Sapiens
gcgtgcgacaacgcggcgcagaagatgcagacggtgaccgccgcggtggaggagcttttggtggccgctcagcgccaggatcgcctcacagtgggggtgtacgagtcggccaagttgatgaatgtggacccagacagcgtggtcctctgcctcttggccattgacgaggaggaggaggatgacatcgccctgcaaatccacttcacgctcatccagtccttctgctgtgacaacgacatcaacatcgtgcgggtgtcgggcaatgcgcgcctggcgcagctcctgggagagccggccgagacccagggcaccaccgaggcccgagacctccactgtcttcccttcctacagaaccctcacacggacgcctggaagagccacggcttggtggaggtggccagctactgcgaagaaagccggggcaacaaccagtgggtcccctacatctctcttcaggaacgctgaggcccttcccagcagcagaatctgttgagttgctgccaacaaacaaaaaatacaataaatatttgaaccccctcccccccagcacaacccccccaaaacaacccaacccacgaggaccatcgggggcaggtcgttggagactgaagagaaagagagagaggagaagggagtgaggggccgctgccgccttccccatcacggagggtccagactgtccactcgggggtggagtgagactgactgcaagccccaccctccttgagactggagctgagcgtctgcatacgagagacttggttgaaacttggttggtccttgtctgcaccctcgacaagaccacactttgggacttgggagctggggctgaagttgctctgtacccatgaactcccagtttgcgaattaataagagacaatctattttgttacttgcacttgttattcgaaccactgagagcgagatgggaagcatagatatctatatttttatttctactatgagggccttgtaataaatttctaaagcctcaaaaaa

SEQ ID NO: 288846 - DNA, 1000 bp, Homo Sapiens
gctaaagaattacctccaaagccattgtcaagaccacagcagtcatctgcaccagtccagctgaactctggctctcaaagcaacagaaatgaatataagctctatcctggactttccagctatcatgagagagttggcaatttgaatcaacccatagaagtgacagcgctgtattcatttgaaggacagcagcctggggatttgaattttcaagctggagacagaatcacagttatatcaaaaacagattcacattttgattggtgggaaggaaaacttcgaggtcaaactggcatttttccagccaactacgtaaccatgaattaaagcgtatactattttcttctttgagaattacaaaaaaattatttctacactgacaggatttactagttaagcaatgtttaatataaattttaaaaaacttctgttctacaaaatttccattccgtatgtaaaagattttgtttttctatataaaaagagctgactgacatatctttaaatactttgtactaactttatcacacttactgtgtcatagaatatcatacagtttatacgctcatagttctcttgtgaacacttcaaacatcgctaagcatttgatctggccatgtatatggtagctgtgttttaatttgagaatcttgagggtagagccacaaatttcaattcttacatttccatttgcaaagtgactagagaaaaagaaatcagcttaaatgaggtattaagtaatgtttagagttgtaggtattaactagaatataaatccttagaaattgtctttataccttcaaaaattatactatgcatttatcatagaaatgtgattacaaagaagtctgactaccatgtctttaaacatatggcatctctcaacttttcttccttatggggctacatttgttcatttccagcagtagcataaacttacggtgacatggtagacttgtctctaaataaaatttttaaatgttaaaaaaaaaaaaaaaaa

SEQ ID NO: 288847 - DNA, 1000 bp, Homo Sapiens
tacaaagaaaattcagccctaccctgcataatttgaagacacagcagaaagggggcttagggatgaggtcctggtttttcttgtataaataggagtcatgggcgttagttctgtagtaataacttcccagcacctggacatctcttccagagttatcccactggcttggtgtgtatacattaggggaggataatctgatgctaactttttttttctctttggttcttgaatagcttagtttctttaataacaagtcaaactttattacaacaataactgaagttattcttttaggttctcgtgaaattctcactgaaagccacattcttagcctaaggcatttcatcttttatgatataaaatgatggctatcaaatgattttccatacattgtactgatcaagttatacacccaggggtatatacactttcttcatgtttcttctttgtatatttggtgactgtatcgtcatagatgtacatattgtgtcggtagggctatgaggcatgttacaggaatgtaattttctcagaatttacactcactcgcagtcatttatttaaaaagataaaacaagataatgggttctttgtattggcactttgcaccagaaacatatcattatttattgatgtgattacttatttgttatccaccttgtactagtaagttttagcactgaattccttcttcactgttgtttgtatttatgaaattctgaaattatggggaatcagcgtaatgattaagttattcatcaccaggctgtaagcaatatcttgagtttgtagcttagaattgggaggatacttaacatctggaagacaagttcatttcatcttgagatcatggtgaaatattttggatatataaattccttaagctattgtaaccatgttttattgcaaagatgtaaaatatgccagatgtgtgtgagttggaaatcaaaaaaagaaaaataaaatatgcaaagaattcaaaaaaaaaaaaaaaaaaaaa

SEQ ID NO: 288848 - DNA, 1000 bp, Homo Sapiens
gacgggaggctggtagagaagacaacctatgaccacgtgaccagagagaagctggaccgcattctggccgttatccaaggctcccatcagaaggccctggtgatgtactccaacctcgacctgaagacccaggaggcctatgagatggccgtgagaggcctgatccggcccatgaacaagtccccgatgctgataactggcatccgatgcctctactttgcacctccggaattcctcttagaggtgcagtgcatgcatgagacgcagaaagagctgcggaagttggttcatgaaatcggcctggaactaaagaccactgctgtctgcacccaagtgcggcgcacgcgcgacggcttcttcacgctagacagtgccctcctgaggacccagtgggacctaaccaacatccaggatgctatccgggctgctacccctcaggtagctgcagagctggagaagagcttgagcccggggctggacaccaagcagctccccagtccgggatggtcctgggactcccagggcccgagctctaccttggggctggagaggggtgcggggcagtgaatgcccaggcagctcctggggcagtggatggataaatagaagaactgctatgagctggacctgatagctgtgcagaaagtgagagcaggggcaccttttctacgtaagacacaaaactcaagctgtaacagaaaggtcaatggacttgacccaactgagaaggaaaaacttctgtatggaggaaaagacagtaaacatgacagactgatagaaagtattggcagaccaggcgtggtggcgggcacttgtaatcccagctactcccaaggctgaggcaggagaattgcttgagcccaggagtttaaggttgtagtgcgctagacggcgcctgtgaatagccactgcactctagtctggggaacatatgagacccctgccatctcaaaaaaaaaaaaattctcaataaactatgtgcccacgaaaattaaaaatt

SEQ ID NO: 288849 - DNA, 945 bp, Homo Sapiens; identical to SEQ ID NO: 117266

SEQ ID NO: 288850 - DNA, 1000 bp, Homo Sapiens; identical to SEQ ID NO: 117268

SEQ ID NO: 288851 - DNA, 1000 bp, Homo Sapiens
gggatgtgatgctagtgagtgaatgggagggcgggcctggagctgcgtgagagtgaaaccaagaagcggatggggaagggagagctggccttggtcagcttagggatgaatggagaaggaatcattcatgggcctcggctaggtcccagactgattacatgagactggggagtccttccctgccagttttctcatttattacagcctatcccccaaccctacccctgtgccctgcctacacactcccgtttggccctcagcactttgggcctggtcacataccccatccctagagtgctcttttcagctggggaggggaagaggtgctggctcctttccagacatgcttatgtataagtaaaggggcaggtgcttgggctccagagagaccctaggtactgccttctaactcctgcatcctcagaaggggaaaagggactgggaagtaaagggaaaccatatggccccagggaatggacccttggagactcccatcctctcttccccctcaccaagtgcccaggagacccctggctcagaccagcccaaggccttgcccagtggcaggggaaaggggcacctcactccacctcaaagtcatttgactgcccccatccaccccaccaccctaatcttccaccacctctccggctgcccctgccctccatcacagacagcagagccgggcagctttcttatgccattttctacactgtgcttcatgagtaggactttcttgcactagttcctatgactgagtctccaaactggtttcctagtagtcccccatcccttcctcccttacccagctatgattcagttgtctctgccctccctcttaccctgcctctgtgtttcggtgagagtctctgtatatgtactgctttctgttttgttgcattgtggggcagaggcctctctgctcttgtttaaccccataaagaaataaatggtaagacttgatgataaaaaaaaaaaaaaaaaaaaaaaaaaaaaaaaa

SEQ ID NO: 288852 - DNA, 1000 bp, Homo Sapiens
tcagtccagttattactgtccgaccagtaaacgtgacagccgaaaaggaggtttccaccggcactgtccttcgctctcccaggaatcacctctcctcacggcctggtgcaagcaaagtgacgagcactatcaccataacaccggtcacaacgtcatctgctcgaggaacccagtcagtgtcaggacaagacgggtcatcccagcggcctacacccacccgcattcctatgtcaaaaggtatgaaagcaggaaagccagtagtggcagccccaggagcaggaaatctgaccaaattcgagcctcgagctgagactcagtctatgaaaatagagctgaagaaatctgcagccagcagcaccacctctctcggaggggggaagggctgagggcagtggctaagggggtatgttgtgcagatgctactgctgccgtgaaagtgaaccttcatctgtttgtgccagttctttacatgtactaatttaagttttaaatattgtgtttataaaataaccaactaataaccatttgtctttcccattttgtgcatttgttttgatgctggggaacaaaattagcaaaactattgcttgctgcctagaagccagggcgtggtttctagttccagttttgcttctagcaagtggacccatcaatagacccatctgagcctgtttcctcatcagttagatgtggggactcaatcacacgctcttcaagtccggctcccatatttcctaattgcaagccaaatttaatgtaccttgttccacaataattttttattaaaaaaatcctattacaaaataagacatactttaactattgtcatttgcctctttcacatcatgaatttgctttatgtgctggaaaaaacatcacatagctatcacagggcctggacctctaaaattttgcaaaaacaaaaggttctaagatgatttcaggaaataatgtgaacatgtaataaaatggaaatgaaatatggaatcctaaaaaaaaa

SEQ ID NO: 288853 - DNA, 1000 bp, Homo Sapiens
aagctcagcatcctgtccaagtgctgccacgcgatggtggcgctgatctaccccttcgcctggcagcacacctacatcccggtgctgccacccgccatggtcgacatcgtgtgctcgccgacgcccttcctcatcgggctgctctccagctcgctgccactgctcagggagctgccgctggaagaggtccttgtggttgacctcgtcaacagccggttcctcagacagatggacgatgaggactccatcctgccccggaagcttcaggtggtcctggaacacattctggaacagaggaacgagctggcttgtgagcaggacgaagggcccctagacggcaggcacggtccagagtccagccccttgaacgaggtggtgtctgaagcctttgtccgcttcttcgtggagattgtgggacactactctttgttcctgacgtcgggcgagcgtgaggagagaaccctgcagcgggaggccttccgcaaagctgtctcctccaagagcctccgccacttcctggaggtcttcatggagactcagatgtttcggggcttcatccaggagcgggagctgcgccggcaggatgccaaaggtctgtttgaggtccgagcccaagagtatctggaaacactccccagtggagagcacagcggtgtcaataagttcctgaagggactaggcaataaaatgaaatttctccacaagaaataactctcagcctcaagggaaaacttcctcctagtgcagccctattctttaaaaacagttcctggtggcctttctgaaaggctgggtcccaggttgtcacggtgcggaactggaggccgcggtggcttctggccgaggctgggctcttccctggatgaggacctgggagccgcctgggaggacagccccagaaagggagcccgagaccaggcgtgtcgccgacatgcaaatgggttgttttggtggttgggtttttttttttttatcttagatattaaaagtaagaaaaatg

SEQ ID NO: 288854 - DNA, 1000 bp, Homo Sapiens; identical to SEQ ID NO: 117269

SEQ ID NO: 288855 - DNA, 1000 bp, Homo Sapiens; identical to SEQ ID NO: 117270

SEQ ID NO: 288856 - DNA, 1000 bp, Homo Sapiens; identical to SEQ ID NO: 222526

SEQ ID NO: 288857 - DNA, 1000 bp, Homo Sapiens
cttcaccttctcaaaaatggaaggaaaaaaaaactgtgaatggggaatgctgactgacaaaccaacacaactttcagaggcttcagtgtctgttctctggacatttcttttcacctcctgagcaccaaagtcgcagggccagttgcaggccgctgattgccatgttgatttttaacctgatattctttttaattgttttaaatttttcataggggagttttggacaaaacagtcactggggagatcactgccatttttacacacttgactttttaaaaatacaaccaaccaaccaccacaacttcttatacatttgggacatgagccagagtttaaaagggaaccaacaaaacactataacttaaaaggatggggttttggattttgtataataataaaaacaatacagcatatggctagggaaggacatggtgtatataattgtaaaatactgttctaaattattcaggcctatagtttccattactggagtcctccattgtgtggccacacagtgtcgttgatttaaaggagccagtgcttcccctctccccaggtagttggtcagctgtggactctgtgacctttgtctaaacctgtgttgtaagatcttgggacttcctctctttctatgtctatctcttccccccaacactttctcttcttagtctctctctttatttttcaatctctgaatattttagtctctctctgagtctcattttttaaaatgctcttttagaacgggaaacggctcagatcctgctgtggcacggggcctatgtgtctctgtcgcgtctgctgtgaagcacatgatgctctatttattgtagagagtgactttatttgctttctagaattgtttataacagatggtataagagaggtaataaacagagaaaaatctatgcttgtaaagaatacaaaagttaattttacctactataatatgactgtctgaaacttattttctctctgagaaataaatgttctaatgggc

SEQ ID NO: 288858 - DNA, 1000 bp, Homo Sapiens; identical to SEQ ID NO: 117271

SEQ ID NO: 288859 - DNA, 1000 bp, Homo Sapiens; identical to SEQ ID NO: 117272
  misc_feature (956)..(956): n is a, c, g, or t

SEQ ID NO: 288860 - DNA, 1000 bp, Homo Sapiens
agacaggtgactgtaaaactaaagtgcaaagaatcagattcacctcatgctgttactgtatatatgctagagcctcactcctgtcaatatattcttggggttgaatctccagtgatctgtaaaatcttagatacagcagatgaaaatggacttctttctctccccaactaaaggatattaaagttaggggaaagaaaagatcattgaaagtcatgataatttctgtcccactgtgtctcattatagagttctcagccattggacctcttctaaaggatggtataaaatgactctcaaccactttgtgaatacatatgtgtatataagaggttattgataaacttctgaggcagacatttgtctcgctttttttcatttttgttgtgtcttataaactgactgtttttctttgcttggatactgtgattccaaaataaatctcatccaagcaagttagagtccagcctaatcaaatgtcataattgttgtacctattgaaagtttttaaataatagatttattatgtaaattatagtatatgtaagtagctaatgaagtaaagatcatgaagaaagaaattgataggtgtaaatgagagaccatgtaaaatatgtaaattctagtacctgaaatcctttcaacagatttttatatagcaactgctctctgcaagtagttaaactagaaactgggcacatggtagaggctcacatgggagttgtcctcacccttgttaatctcaagaaactcttatttataataggttgcttctctctcagaacttttatctattacttttttcttcttatgagtatgtttactctcagagtatctatctgatgtagacagttggtgatgcttctgagactcagaatggtttactctaacaaaacactgtgctgtctatcccttgtacttgcctactgtaatatggatttcacttctgaacagtttacagcacaatatttattttaaagtgaataaaatgtccacaagcaaa

SEQ ID NO: 288861 - DNA, 745 bp, Homo Sapiens
gtcgggtacgggaaggtccaagccgctgccgggtgcccgagggccgtcgtggccgccgtcgccacgggtcccaatggagccgccgaatctctatccggtgaagctctacgtgtacgacctgtccaaaggcctggcccggcggctcagccccatcatgctggggaaacaactggaaggcatctggcacacatccatagttgtgcacaaggatgagttcttcttcggcagtggtggtatctccagctgccccccgggagggacattgcttgggcctccagactctgtggttgatgtggggagtacagaagtcacagaagaaatctttctggagtacctctcctccctgggggagtccctgttccgaggtgaggcctacaacctctttgaacacaattgtaacaccttcagcaacgaagtggcacagttcctgactgggcggaagattccttcttacatcacagacctgccctctgaagttctctccacgccctttggacaggcacttcggcccctcctggactccattcagatccagcctccaggagggagctccgtgggcagacccaacggccagagctaacaggactgcctgggaccgccctgcctcaccagggcttttcctttttaaacaaaacaaaccctaccagatttctattttataattttacatcagagctaacaaccaggggacggctttttaaatttcccagggaaggagaccgtcaggccgcatgtagacaatgct

SEQ ID NO: 288862 - DNA, 1000 bp, Homo Sapiens; identical to SEQ ID NO: 117274

SEQ ID NO: 288863 - DNA, 1000 bp, Homo Sapiens; identical to SEQ ID NO: 222527

SEQ ID NO: 288864 - DNA, 1000 bp, Homo Sapiens; identical to SEQ ID NO: 117275

SEQ ID NO: 288865 - DNA, 1000 bp, Homo Sapiens
ccttttcgaattcagctcttctcgagcgggatttctgcccctgtgggatgtggcggccactgactttggccagacgaaccaaaagtttgggtttgaactgggccccgtctgcttcagcagctgagagtgtccggggtgggagggaccgtgagggagccccagaatggggtgcatttggtgctgaggctttgaagccaccgtatttttcgttacctgtgactatggagccaatgggatgtgacttcgctcatcacggtcagtcattccttctcctttccagggtgctgggggctggggttccctggcccaagggtccagcctcctctcaccccattccaggtggcatactgcagtctggctctttctcccctccctccccacccaagcctcacctccccaccccttgaacccccatgcaatgagcttctaactcagagctgatgaacaaaagcccccccacccccaatgcctgcctcctcactcctccgtcgctgcccttcacaccttttggtgctacccctccccagagttaagcactggatgtctcctgatcccaggctgggacccctacccccaccccctttgatcctttctacttccacggtgaaaggactgaggtcggactacagagggaagagggacttcccttgactgggttgtgtttcttttcctgcctcagcccagctctgcaaatcccctccccctgcccctcacctccccaggctcaccttgccatgccaggtggtttggggaccaagatgttgggggggtgaatcaggatcctaatggtgctgccctatttatacctgggtctgtattaaaagggaaagtcccccctgttgtagatttcatctgcttcctccttagggaaggctgggatatgatgagagattccagcccaagcccggccccccaccgccaggccatagggcataatttgcatctcaaatctgagaataaactgatgaactgtgaaaaaaaaaaaaaaaaaaaaaaaaaa

SEQ ID NO: 288866 - DNA, 1000 bp, Homo Sapiens; identical to SEQ ID NO: 117278

SEQ ID NO: 288867 - DNA, 1000 bp, Homo Sapiens
cctggatggagtgctgctgcgtctccagcggcatctcggagaggatgctgtctctcttggtggtggacgtgggcaatcctgaggaggtcagactgttcagcaaaggctttctggtggccctggtgcaagtcatgccttggtgcagccctcaggagtggcagcgccttcaccagctgaccaggagactgctggagaagcagctcctccatgtcccttatagcctggaatatattcagtttgttcccctgctcaacctgaagccctttgcccaggagttgcaactctccgtcctcttcctgaggactttccagtttctctgcagccatagctgtcgtaattggcttcctctggaaggctggaaccacgtggtcaaactcctctgtggcagtctgacccgcctcctggactcagtcagggcgatacaggcagctggcccttgggttcaaggaccagagcaggacctgacccaggaagccctgtttgtttacacccaggtgttctgccatgctctgcacatcatggccatgctccacccggaggtctgtgagccactctacgttttagccttggaaaccctcacctgctatgagactttgagcaagaccaacccttctgtcagctccttgctccagagggcacacgagcagcgcttcttaaagtccattgctgagggcattggccctgaagaacggcgccaaaccctgttgcagaagatgagcagcttctgacttggcgtggggagctgggccccaacatggcgggtctgcagaagatcagcagcttcttacctgtgcgggagcgaaaaagctgggcttcaacatggcaggtctgtaggggtcagacccgagcagcctggactttacagttatgtgaaactgtccacaaaaagtcatggcaataatggtgtaaagaaaatagtttcttgggtatttgtaacgtacaaactatcataaaaattctcctctttcgcatctcaaaaaaaaaaaaaaaaaaaaaaaaa

SEQ ID NO: 288868 - DNA, 1000 bp, Homo Sapiens; identical to SEQ ID NO: 117279

SEQ ID NO: 288869 - DNA, 1000 bp, Homo Sapiens
gtttaaatacctatatattctctgaatgcaataaagggacttaagagtgaacaagagtaatggtgtggaagtgacacctggggtcagtttacctctgtgtatggtcactagagattgggacttaccctttaggttttaggaggcttgagaatggaaggatcctcatttctgcccttcctggttccctgctttggtgtaggggttgggaaaaacaggaaattcctctcagctctgcctcagatctcctacctctccttaagtcttgtagggggttccaaggatggctcttctaaccagaggctggcctgtctttaaaacttaactactttagggtggtgccaccactgcagactattgtggtactttgtgacagaagacatgtacacacacaccacacacatacatacacactctctcactctgtctctcttacctttagctgcttgatcattaagccatccaacttcatgccagttcccttctttatagaagagtgaagggaaagacttcctgggtttgacttaaaccttgtccacctcttgatattttaggattgaggaataagtcattaatctaaggactgattacagtggctggagcttgggcacttgtcttatcactggtcactgagtctgaaagtcccagctgaattcttgcccttaagtgcttttgctgctatttttttgcccccagttccacaagatccaaccaagaattctgtatcctgggacagtcagattcttctaaatcaggccaggaaggaggggaaaagagtgagagaatggtattcccagatacttcttcctcctgccccttttcccagcagctctgagaccagatgttggctgctgtacttactccctgaggtagggaatgtgtggtgatcgagtggtctgtgttcctattgctggtggggtgatagggtgggctaaaaaccatgcactctggaatttgttgtattttctcccagtaaagcttttcttctcccgactgctaaaaa

SEQ ID NO: 288870 - DNA, 1000 bp, Homo Sapiens
cttctcctcctcttcctctcccacctccggcggctgtgaacacggcctcttcccctacggccacaggggcccctcctctaatgagtggtcggaccgtggggaagggccccactcagggatctcagacctagtgctcccttcctcctcaaaccgagagactcacactggacagggcaggaggagggggccgtgcctcccacccttctcagggacccccacgcctttgttgtttgaatggaaatggaaaagccagtattcttttataaaattatcttttggaacctgagcctgacattggggggaagtgggaggccccggacggggtagcaccccccattggggctataacggtcaaccatttctgtctcttctttttcccccaacctccccctcctgtcccctctgttcccgtcttccggtcattcttttctcctcctctctccttcctgctgtccttctccggccccgcctctgccctcatcctccctctcgtctttcgcacattctcctgatcctcttgccaccgtcccacgtggtcgcctgcatttctccgtgcgtcctccctgcactgaaacccccccttcaacccgcccaaatgtccgatccccgaccttcctcgtgccgtcctcccctcccgcctcgctgggcgccctggccgcagacacgctcgacgaggcggagcgccagtggaaggccgagttccaccgctggagctcctacatggtgcactggaagaaccagttcgaccactacagcaagcaggatcgctgctcagacctgtgaccccggcgggacccccatgtcctccgctccgcccggccccctagctgtatatactatttatttcagggctgggctataacacagacgagccccagactctgcccatccccaccccaccccgacgtcccccggggctcccggtcctctggcatgtcttcaggctgagctcctccccgcgtgccttcgccctctggctgcaaataaactgttacaggcc

SEQ ID NO: 288871 - DNA, 1000 bp, Homo Sapiens; identical to SEQ ID NO: 117280

SEQ ID NO: 288872 - DNA, 1000 bp, Homo Sapiens; identical to SEQ ID NO: 284848

SEQ ID NO: 288873 - DNA, 1000 bp, Homo Sapiens; identical to SEQ ID NO: 115458

SEQ ID NO: 288874 - DNA, 1000 bp, Homo Sapiens; identical to SEQ ID NO: 117282

SEQ ID NO: 288875 - DNA, 1000 bp, Homo Sapiens; identical to SEQ ID NO: 117283

SEQ ID NO: 288876 - DNA, 1000 bp, Homo Sapiens
ccatgtacagccagggtaccccggaaacgcccaccttcaaagaccactccttcttttcaaatctacctgatgacatctttgaaaatggaaaggcagccgaggagaaaatgccactgtcgctcagcttcagtgacctgcccaacggggactgcgccctcacctcccactcaacaggctccccttccaactcaacaaatccagaaattaccatcacccctgcggagtttaacctcagcagcttggcctcccagaatgagggtatggatgacaccagctcagcatcttccaggaactccctgggagaaggccaagagccaaagtcacacctgaaggaggaagacccagaggagcccagaaaacctgcctcggccccatctgaggcttgccgccgacagtcctcaggtgctggggctgagcacctgttccttgagaatgatgttgcagaagcacttctgcaagagtctgaggaggcctctgagctcaagcctgtggaactggacacttcggaaggaaacatcacaaagcagctggtcaagaggctcacatctgcagaggtgccaatggccacagacaggctgctctctgagggttctgttggtggagaatctgaaggctgcagatcctttctagatggaagcttagaggatgcttttaatgggcttttacttgcattagaaccacataaagagcagtataaagagtttcaggatctgaaccaagaagtcatgaatttggatgatattctaaaaaagtagagaagatcctctaatggatcccagtgtgcccatccctcaacctcctcagtgatcaactcatggccaatcttgtttcctattcttcaacctgctgacttccctctggattcttctgcaaccagtcccagatattgtgccattttatccatggttgtacttcttttttggatataaagatttttaaatgcattttttaaatgctaacaaaaaataaaaacttgaaacaaaaaaaaaaaaaaaaaaaa

SEQ ID NO: 288877 - DNA, 1000 bp, Homo Sapiens; identical to SEQ ID NO: 222528

SEQ ID NO: 288878 - DNA, 649 bp, Homo Sapiens
cgtgtcagtggtggacctgacctgctcctggccccttggctggccgggctgtttctggccatgggtcgctcccgccggacaggcgcgcaccgagcgcactctctagcccggcagatgaaggcgaagcggcggcggccggacttggatgagattcaccgcgagctgcggcctcagggatccgcacgaccccagcccgacccaaacgccgagttcgaccccgacctgccagggggcggtctgcaccgctgtctggcctgcgcgaggtacttcatcgattccaccaacctgaagacccacttccgatccaaagaccacaagaaaaggctgaagcagctgagcgtcgagccctacagtcaggaagaggcggagagggcagcgggtatgggatcctatgtgccccccaggcggctggcagtgcccacggaagtgtccactgaggtccctgagatggatacctctacctgacatggcctgaagatgcagggcagaggaattgcccatggacagtgacgcaaggactaggctgggagggagcgtgccaaccccttttgcctctgggtttggggagcggagggcctcttcttggtgccctgcccccaataaaggaactggacaaagagaaaaaaaaaaaaaaaaaaaaaaaaaaaaa

SEQ ID NO: 288879 - DNA, 1000 bp, Homo Sapiens
atgaggatgccatcgatcctgacctgatggcctacctaagctccctgcaccaggacaacctggcaccaggcctggacagccaagacaagctggtgcgcaaacgccgctcccagatgcctcaggagtgccctgtctgccacaagatcatccatggggcaggcaaactgcctcgccacatgaggacccacacaggcgagaagccctttgcctgcgaggtctgcggtgttcgattcaccaggaacgacaagctgaagatccacatgcggaagcacacgggagagcgcccctactcatgcccgcactgcccagcccgcttcctgcacagctacgacctcaagaaccacatgcacctgcacacaggggaccggccctatgagtgccacctgtgccacagggctttcgccaaggaggaccacctgcagcgccacctcaaaggccagaactgcctggaggtgcgcacccgacggcgccgcaaggacgatgcaccaccccactacccaccaccctctaccgctgctgcattccccgctggcctcgacctctccaatggccacctggacaccttccgcctctctctagctcgattctgggagcagtcagcccccacctgggccccggtctctaccccggggccccctgatgacgatgaggaggaaggggcacccaccacaccccaggctgaaggtgccatggagtcctcttaaagagggacgagggccagactgaagcagcacaaggccggggacacccatgccaagcagtgggagcacgcaggacagacacagcaggggtctggggcacggagccttgccggcatcagcatcagcccttcctcccagagccctcattccaattccaagctaagaaggtattggggcagaggctccccaaattggggtgatcccccaaggagtgatacatatattgtgtatatatttacagctgtattgtaaaagtggggtccctgtcccagctgctcctggggagtagaagcaaaaaa

SEQ ID NO: 288880 - DNA, 1000 bp, Homo Sapiens
gagggtcaggagcctccccacttctgggaggccctgggaggccgggccccctaccccagcaacaagaggctccctgaggaggtccccagcttccagccacgactgtttgagtgctccagccacatgggctgcctggtcctcgcagaagtggggttcttcagccaggaggacctggacaagtatgacatcatgttactggacacctggcaggagatcttcctgtggcttggggaagctgcaagtgagtggaaggaggcggtggcctggggccaggagtacctgaagactcacccagcagggaggagcccggccacacccatcgtgctggtcaagcagggccatgagcctcccaccttcattggatggttcttcacttgggacccctacaagtggactagccacccgtcccacaaggaagtggtggatggcagcccggcagcagcatcaaccatctctgagataacagcagaagtcaacaacttgcggctatccagatggccgggcaatggcagggcaggtgccgtggccctgcaggccctcaagggctcccaggacagctcagagaatgatctggtgcgaagccccaagtcggctggcagcagaaccagcagctccgtcagcagcaccagcgccacgatcaacgggggcctgcgccgggaacaactgatgcaccaggctgttgaggacctgccagagggcgtggaccctgcccgcagggagttctatctctcagactctgacttccaagatatctttgggaaatccaaggaggaattctacagcatggccacgtggaggcagcggcaggagaaaaagcagctgggcttcttctgaacccaagccctctcgactgcccctatcccctggaccccaacatacctacaatgctggggaggccctgcttccactcccctcagaggcttttggtcatcctctgcgtgtcagtaaaagcaggcagcccataaaaaaaaaaaaaaaaaaaaaaaaaaaaaaaaaaaaa

SEQ ID NO: 288881 - DNA, 1000 bp, Homo Sapiens; identical to SEQ ID NO: 117284

SEQ ID NO: 288882 - DNA, 1000 bp, Homo Sapiens
gcattataatatttgtgctgtggttggaaatagtgggatcctgacatttatccagtgtggacgagaaatagataaatcagattttgttttccgttgcaatttcgccccatcggaggctttccaaagagatgttggaaggaaaaccaatcttaccaccttcaaccccagcatcctggaaaaatattacaacaatctcttgactattcaggaccgtaacaactttttcctcagtttaaaaaagcttgacggggccattctttggatccctgcatttttcttccacacttcagcaactgtgaccaggacattagttgacttttttgttgaacacagaggtcagttaaaagtccaactggcttggccgggaaatataatgcaacatgtcaacaggtactggaaaaacaaacatttgtcacctaaacggctgagcacaggtattcttatgtacacccttgcatcagcaatatgtgaagagatccacttgtatggattttggccgtttggatttgaccccaacacaagggaagatcttccataccattactatgacaaaaaaggaaccaaatttaccaccaagtggcaggagtcccaccagctgcctgctgagtttcagctgctgtaccgaatgcatggggaagggctcaccaagctgactctgtcacactgtgcctaagaactccaaacggaaagcgccaaatggctgtttaaaaagtgccccaaatcaaattgaatagccttcagaatagaaccctagagaatgtcttataaggattgtctgccatttaaaaggaaagatgtcttttctcttttgcactgctcttttaagagttttagcagatttagcaggacagatgcattgaagccacatggtttagacttgattgataaagggaatgttgcatttgggactatgctgctaacgaaatggtttgaagtattttcatgtttggattttaataataaactgcctctcatttttatgaagactagagctatattt

SEQ ID NO: 288883 - DNA, 1000 bp, Homo Sapiens
ttttgtgcaggtatctggcataattttgtccttgcactcttgggtattttagctcttgttctcctcccagtaattctcttgccattttactacactggagttggggtgctcatcactgaagttgctgaggactctcctgccattggacccagaggcctttttgtgggagaccttgtcacccatctacaggattgtcctgttactaatgtgcaagattggaatgaatgtttagataccatcgcctatgagccccaaattggttactgtataagtgcatcaactttacagcagttaagtttcccagttagagcatacaaacgactagatggttcaactgaatgctgtaacaatcacagcctcacagatgtgtgcttttcctacagaaataattttaataagcgtttgcatacatgtcttcctgcccggaaagcagttgaagcaactcaagtttgcagaaccaataaagactgtaaaaaaagctcaagttcaagtttctgtataataccttctttggaaactcacactcgcttaataaaagtaaaacacccacctcagattgatatgttatacgtaggacatcctctgcatcttcactacacagtgagcatcaccagttttatcccacgttttaactttctaagcatagatctgccagtggttgtggagacatttgtcaagtacctgatttccctctcaggagctctggctattgttaatgcagtaccctgctttgctttggatggacaatggattctaaactctttcttggatgccacccttacctcagtgattggagacaatgatgtcaaagatctaatagggtttttcatcttgctgggtggcagtgtacttttggctgccaatgtgaccctgggactctggatggttacagcacggtaatgtttgcactcatctgacagaatccctgagttacagtatacagctatgtggtaatattcattgccattgaaattcttacttggtatgaaatataaagtgt

SEQ ID NO: 288884 - DNA, 1000 bp, Homo Sapiens
agttaaggaagaacgaattgatacaccaccagcttgtacagaggaaagcatagcaacaccctctgaaattaaaacagaaaatgacacagtcgagtcagtttaaataaaatgagaaaggtatgtttttcttttttaaaaaagctgctgttggatctagaaggtgaagaatttttttatgtatatatagacatatctatataaattgtctggctgaggcagggccttcagctatcatttggttaataaatacattttagtatttgcatttcctactgcctgcagagtttcaggtgcttgttgtgtgaaagttctgtagatgtgtgcaaatttaacgaaatgaaattgtatgtgtaaaaatgtacgatttttcactgtgcaactgtaaattataaataaaaaatatttttgctattcatggagtgtaatatttatgcacaccatcaaatagtttctgtactttttattgggtaaaaatggaattgaacagcaacctcaacataagattttttttctagtagcctcccactgattaaagaagcaagtttgaggtttcatccttcaaaagggggttccgagagagcaccgtagggcttttctcaaatagaaaagccagattttgaaaaaattttaaagataaaataggacatattttgcagatatatatatatatatacacaaacacatctccaggtatagagaaccatccagatgttcacttttgaaaatatctaatgatgcaaagttttattcttgaacttggacactgatgccatcaaacaattaacaaatatatttaagtactaaaggtgattttttttttaaagactttttcaaattgtcaaatgatttaatgcagatgaacatatttctattttaagtaacgggaatctgtaagaatgtttgcttgagatatggttaacttttttcttttgttggttttgacttagatggacaccatgagatgttaatattcatacatgtaataaatagaatgatgaag

SEQ ID NO: 288885 - DNA, 1000 bp, Homo Sapiens
attatttctccacctttaattattggcctatcatttgttagtgttatttggtcatattattgaactaatgtattattccattcaaagtctttctagatttaaaaatgtatgcaaaagcttaggattatatcatgtgtaactattatagataacatcctaaaccttcagtttagatatataattgactgggtgtaatctcttttgtaatctgttttgacagatttcttaaattatgttagcataatcaaggaagatttaccttgaagcactttccaaattgatactttcaaacttattttaaagcagtagaaccttttctatgaactaaatcacatgcaaaactccaacctgtagtatacataaaatggacttacttattcctctcaccttctccagtgcctaggaatattcttctctgagccctaggattgattctatcacacagagcaacattaatctaaatggtttagctccctcttttttctctaaaaacaatcagctaataaaaaaaaaatttgagggcctaaattatttcaatggttgtttgaaatattcagttcagtttgtacctgttagcagtctttcagtttgggggagaattaaatactgtgctaagctggtgcttggatacatattacagcatcttgtgttttatttgacaaacagaattttggtgccataatattttgagaattagagaagattgtgatgcatatatataaacactatttttaaaaaatatctaaatatgtctcacatatttatataatcctcaaatatactgtaccattttagatattttttaaacagattaatttggagaagttttattcattacctaattctgtggcaaaaatggtgcctctgatgttgtgatatagtattgtcagtgtgtacatatataaaacctgtgtaaacctctgtccttatgaaccataacaaatgtagctttttaaagtccattgtattgttttttctttcaataaaagagtataattaa

SEQ ID NO: 288886 - DNA, 1000 bp, Homo Sapiens; identical to SEQ ID NO: 222529

SEQ ID NO: 288887 - DNA, 1000 bp, Homo Sapiens; identical to SEQ ID NO: 222530

SEQ ID NO: 288888 - DNA, 1000 bp, Homo Sapiens
cgtctttctgctggtgttgtctttctgccatcagagaagggacacacagcccgttcgaaggtgtgcagagggctctgagcgccaggatggccagggctgtttttgctactgaaggagcgtgtgtcctgaactcccacttgcagggacagtccccaccttctctatagccggcactgggagcagccgccagcagggaaatctggcctgagcacaaggatgctttagggagagatcacttcagtgtgtgtgtatatttatttgcagtacagtgcgcgcgtgtgtgtgtgtgtacgcgcacgtgtgggtgagtgcgtcttctgagtgggttctgttcagttgctaatgaggctcctccgctctggacacaacccttttatagattaatttctctgccaattaacttgtcattttcagtacatattttactattccacaccaaccataattacaacaagggatttttcttatgcactcctatgcatgtgaataacatgtggtgtaattctgcttcttacagaagtattactgaaggtattatttccaatattatttggtttattatgcggatcttttttatatatgcagtcccatcccttctgtgccactcaatgccatccagacatggtttttccctccaggggcctttctctccagagggcacttcggctgcctctgcttcctctcattcgaggcccggctcttgctgacagaataggttccgttctgggcggtggttctcgagcctgccattcaaaaccaaagcaaattggagcatttctcacaacatggtattgaagttcctttttgttctcaaaagttgtgaccgtgttaaattgtactcccttagtcctgtaaggtatgttaagtgaatcgcagttacgctgtacttttattaatatttaacataattaaagatggacccataagagtgacgcctgtggagcgcgtgctcttcctctgcagccaaaaaaaaaaaaaaaaaaaaaaaaaaaaaaaaaaa

SEQ ID NO: 288889 - DNA, 1000 bp, Homo Sapiens; identical to SEQ ID NO: 117285

SEQ ID NO: 288890 - DNA, 1000 bp, Homo Sapiens; identical to SEQ ID NO: 222531

SEQ ID NO: 288891 - DNA, 1000 bp, Homo Sapiens; identical to SEQ ID NO: 222532

SEQ ID NO: 288892 - DNA, 1000 bp, Homo Sapiens
ctggctgccccaccttcttttacgcaggttatagttatctgatctgtgatcacatgagggctgtgcacctctacatcagcgccctggagaattcctgtccactgatggcctttccctgtgccagctacaaggccttccttgctggacgctgtctggattgctttaacccttttctgctttcctgcccaaggataggactggtggaacaaggtggtgtcaagatagagccgctccccaaggaagtgaaagtctacctcctgactacttccagtgctccgtactgcatgcatcacagcctcgtggagtttcacttgaaggaactgagaaacaaggacaccaacatcgaggttaccttccttagcagtaacatcacctcttcatctaagatcaccatacctaagcagcaacgctatgggaaaggaatcatagcccatgccaccccacaatgccagataaaccaagtgaaattcaagtttcagtcttccaaccgagtttggaaaaaagaccggactaccattattgggaagttctgcactgcccttttgcctgtcaatgacagagaaaagatggtctgcttacctgaaccagtgaacttacaagcaagtgtgactgtttcctgtgacctgaagatagcctgtgtgtagtttaacctgggcaggacacatctccctgcattttttttttttttttttgagagagaggtgtgatgagggatgtgtgtgtgcagcttattgtagaccattactactaaggagaaaagcaaagctctttcttattttcctcataatcagctaccctggaggggagggagaactcattttacagaacttggtttcctttgccgatcttatgtacatacccattttagctttcccatgcatacttaactgcacttgctttatctccttgggcattcgtacttaggattcaatagaaacatgtacagggtaaacaattttttaaaaataaaacttcatggagtaaaaaaaaaaaaaaaaaa

SEQ ID NO: 288893 - DNA, 1000 bp, Homo Sapiens; identical to SEQ ID NO: 222533

SEQ ID NO: 288894 - DNA, 1000 bp, Homo Sapiens; identical to SEQ ID NO: 117286

SEQ ID NO: 288895 - DNA, 1000 bp, Homo Sapiens; identical to SEQ ID NO: 117287

SEQ ID NO: 288896 - DNA, 1000 bp, Homo Sapiens; identical to SEQ ID NO: 117288

SEQ ID NO: 288897 - DNA, 1000 bp, Homo Sapiens; identical to SEQ ID NO: 222534

SEQ ID NO: 288898 - DNA, 1000 bp, Homo Sapiens; identical to SEQ ID NO: 117289

SEQ ID NO: 288899 - DNA, 1000 bp, Homo Sapiens
cacgaatcctttttctggatcccagtggcaaggtgcatcctgaaatcatcaatgagaatggaaaccccagctacaagtatttttatgtcagtgccgagcaagttgttcaggggatgaaggaagctcaggaaaggctgacgggtgatgccttcagaaagaaacatcttgaagatgaattgtaacatgaatgtgccccttctttcatcagagttagtgttctggaaggaaagcagcagggaagggaatattgaggaatcatctagaacaattaagccgaccaggaaacctcattcctacctacactggaaggagcgctctcactgtggaagagttctgctaacagaagctggtctgcatgtttgtggatccagcggagagtggcagactttcttctccttttccctctcacctaaatgtcaacttgtcattgaatgtaaagaatgaaaccttctgacacaaaacttgagccacttggatgtttactcctcgcacttaagtatttgagtcttttcccatttcctcccactttactcaccttagtggtgaaaggagactagtagcatcttttctacaacgttaaaattgcagaagtagcttatcattaaaaaacaacaacaacaacaataacaataaatcctaagtgtaaatcagttattctaccccctaccaaggatatcagcctgttttttcccttttttctcctgggaataattgtgggcttcttcccaaatttctacagcctctttcctcttctcatgcttgagcttccctgtttgcacgcatgcgtgtgcaggactggctgtgtgcttggactcggctccaggtggaagcatgctttcccttgttactgttggagaaactcaaaccttcaagccctaggtgtagccattttgtcaagtcatcaactgtatttttgtactggcattaacaaaaaaagagataaaatattgtaccattaaactttaataaaactttaaaaggaaaaaaaaaaaaaaaaaaa

SEQ ID NO: 288900 - DNA, 1000 bp, Homo Sapiens
tggtctgtcatctccctgctgcgtggtgaggcttatgtctgtgctctcagtgagttcgtggacccttcctcactcacggccagggaagagcacttcccatcagcccacgccactgaaatcctggccaggttcccctgcaaggagaaccctgacaacctgtcagacttccgggaggaggtcagccgcaggctcaggtatgagtcccagctctttggatggctgctcatcggcgtggtggccatcctggtgttcctgaccaagtgcctcaagcattactgctcaccactcagctaccgccaggaggcctactgggcgcagtaccgcgccaatgaggaccagctgttccagcgcacggccgaggtgcactctcgggtgctcgctgccaacaatgtgcgccgcttctttggctttgtggcgctcaacaaggatgatgaggaactgattgccaacttcccagtggaaggcacgcagccacggccacagtggaatgccatcaccggcgtctacttgtaccgtgagaaccagggcctcccactctacagccgcctgcacaagtgggcccagggtctggcaggcaacggcgcggcccctgacaacgtggagatggccctgctcccctcctaaggaggtgcttcccatgctctttgtaaatggcactacttggtcccaaactgaaccccactgcttgctcacatccatatcagaaggggatttttaaaaaactgttatcttcttggccaggggaaaggaccacaaggcaatctggggtgtggacagacccagtagacaatggaagcccagccagcagggccaggtgacagtgaagctcaccagtgggctcctttatggtactctatgcagttaacatgtatctagctgcatagggacacccagcgcagcagtgcaccactgggaagtggcctccagtgcagcctctggccttattttatatatttaaatttttgataaagtttttcttactaaaaaaaaaaaaaaaaaa

SEQ ID NO: 288901 - DNA, 1000 bp, Homo Sapiens
gccactgctcttccggagcctgcagcatggggcccctgccgcgcaccgtggagctcttctatgacgtgctgtccccctactcctggctgggcttcgagatcctgtgccggtatcagaatatctggaacatcaacctgcagttgcggcccagcctcataacagggatcatgaaagacagtggaaacaagcctccaggtctgcttccccgcaaaggactatacatggcaaatgacttaaagctcctgagacaccatctccagattcccatccacttccccaaggatttcttgtctgtgatgcttgaaaaaggaagtttgtctgccatgcgtttcctcaccgccgtgaacttggagcatccagagatgctggagaaagcgtcccgggagctgtggatgcgcgtctggtcaaggaatgaagacatcaccgagccgcagagcatcctggcggctgcagagaaggctggtatgtctgcagaacaagcccagggacttctggaaaagatcgcaacgccaaaggtgaagaaccagctcaaggagaccactgaggcagcctgcagatacggagcctttgggttgcccatcaccgtggcccatgtggatggccaaacccacatgttatttggctctgaccggatggagctgctggcgcacctgctgggagagaagtggatgggccctatacctccagccgtgaatgccagactttaagattgcccggaggaagcaaactcttcgtataaaaaaagcaggccatctgcttaacccttggctccaccataaggcactgggactcggatttctctatctgatagaggtattttctgtggccctgggagctgtctgtctttcccctacccccaaggatgccaggaagacgtccaccattagccatgtggcaacctttacttctatgcctcacaagtgcctttcagagagccccaattctgctttcccacaaaataaacctaatgccatcaggcaaaaaaaaaaaaaaaaaaaaa

SEQ ID NO: 288902 - DNA, 801 bp, Homo Sapiens
tgcacgccggaccggagagcgcggaggcagccatggtgcggttcaagcacaggtacctgctctgcgaactggtgtctgacgacccccgctgccgcctaagcctcgatgaccgagttctgagcagcctcgtacgggacacgatcgccagggtgcacggaactttcggcgcagccgcctgctccatcggcttcgcggttcgatatctcaatgcctatactggaatagtgctacttcgatgcagaaaagaattctatcagcttgtgtggtcagctcttcccttcatcacatacttggagaacaaaggacaccgttacccatgctttttcaacacattacatgtgggaggtacaataagaacatgtcagaagttcctaattcagtacaacaggagacagctgttgatcttgttgcagaactgcactgatgaaggagagcgggaagctatccagaagtctgtgacaagaagctgcttattagaggaggaggaggagtcaggtgaggaggctgcagaagcaatggagtgaacctctgctccccacacagctggctacactgctcaggcttcaggcccacttgttgaacagaacaatctgggtagcaacagcatcttccacagttttccaaactggatagctgccaaccagcagacattacccacttgaaatggagtactcagttaaactgaagttgcctttacctagcattccctggtgaagtgttgcaggttgtgaactctgtagacatctttattgcttggctaagagtagatttaataaatgtatctggtttccgtggcaaaaa

SEQ ID NO: 288903 - DNA, 835 bp, Homo Sapiens
aggaagacgacgtagcagccatcttttccctggctttggtgattcagccctgacttctcaaaaagcactgcacagaggaggaggcagcagaaccccatttcagcttcttaggactctgcacttccccagaaggaagaattaaaaatgaatatgttcaaggaagcagtgaccttcaaggacgtggctgtggccttcacggaggaggaattggggctgctgggccctgcccagaggaagctgtaccgagatgtgatggtggagaactttaggaacctgctgtcagtggggcatccacccttcaaacaagatgtatcacctatagaaagaaatgagcagctttggataatgacgacagcaacccgaagacagggaaatttagataccttacttgtaaaagctcttttgctctatgacctggctcaaacttaaacttggatttgaagttagaagaaatgttggaagtcatttatatatgaagaaatgttggaaggactcatatatgcatacattccttgagtgactatgaatgactgccgggcagtaacttctgggctgtggttgtaaactgtgagcactacaaaatgtttttccttattgataccatattatggtaggaaagacatggaataaaaaatttagatagtatgtcagtagttgtgtttttaaatgggtttcattagtgcttagcaattgggagcttggtggaccatctcttggttttggaccatctcttggtttctgtcagtatgtaaaccagaaacttcaaatgtgtcacaaaagatgagcagaactatcccgaggttcattaaagtcttttactctgtcaaaaaaaaaa

SEQ ID NO: 288904 - DNA, 1000 bp, Homo Sapiens; identical to SEQ ID NO: 222537

SEQ ID NO: 288905 - DNA, 1000 bp, Homo Sapiens; identical to SEQ ID NO: 118601

SEQ ID NO: 288906 - DNA, 1000 bp, Homo Sapiens; identical to SEQ ID NO: 117292

SEQ ID NO: 288907 - DNA, 1000 bp, Homo Sapiens; identical to SEQ ID NO: 117293

SEQ ID NO: 288908 - DNA, 1000 bp, Homo Sapiens; identical to SEQ ID NO: 222349

SEQ ID NO: 288909 - DNA, 1000 bp, Homo Sapiens
gaaaggtacctgaagctgttcactttcctgcccctcccagagattgatcatatcatgcagctgcatgtcaaagagccagaaaggcggggtcctcagaaacgactggcagcagaagtaacaaagcttgttcatggacgagaaggattggattctgctaaaaggtgtacacaagccctttatcacagtagcatagatgcactggaggtcatgtctgatcaggagttaaaagagttgtttaaagaagctccattttctgaattttttctcgatcctggaacaagtgtcctagatacttgccgcaaagcaaatgccattccagatggtccccgagggtatcgaatgataacagaaggcggagtcagcataaatcaccaacaagtaacaaatcctgagagtgttttaattgttggacaacatattctcaagaatggactttccttacttaaaataggaaaaagaaatttctacattataaaatggcttcagttgtgatgaaaagtccttctggttgtccaaataaacttacccatcattcattctcaagacctctgaagggttggctccagaacttagacctttgcttatgcaaatcagaaaaacagaatggactaggactcagtgtgagtaacttcattatttttatgggccggttaataaatatttgtttaataatgggatgttttattttctgatgtacaaagcttgattaccatagaaaaccatgattttcagggttaatctctttttaaaattatacttcagaagagaaagaaatgctgctttcctatcttacccttcctgctctcctttttgtagtgatgaggaacaatgaaaaagaggtagtgtaaggaattgtgaggctgggcatggtgtaagtgctccactttagagagtgtaccttaattactactgtatttgcaaattaagggaaatttaggtcatcatttgattttcggaaatctaaaaggaactgaccatcattaccaagtctttctatata

SEQ ID NO: 288910 - DNA, 1000 bp, Homo Sapiens
ttgttttcagtgctcactcaaaccactaaaacagatggatagctttgaggttttagataaggaaagattatggagaatgtagttgttattgatttttggcaattttacatttggaattttatcactgtgcttttttatatgaggcactgtagtattttcacatagtatagtactctggatgtaaaagctcaaaaattgtgattccttgaacgttcactaaatcttcaagcaaaaacacatttttacattatttttacgttgattattttagtgaaagaccatatgaagaagcatttttaatattaacttgttacatactttgatccactttacatcatttttatgttgttgaggtagggaaattagggttcagtttatcactggacattcaggaggcaagtcaatcttttttatttccttataaaattaactcttcaaaagccgttaaacagagagttatcttaatttttattgcagtaggaggaaatatatttaaaatatttgtagatttatagcaaatagagactcgttatttaaaggttaaataacaatttgttcttttgttgtttttgccagtttagggcagtagctgcttttgtcataaatatcttcctaccacatcaaaaatgctgcttttaaaatttttgtttataaattgagaaggaattttctctctataagtttctgtcattgaacagatcaccattaaaaagaatattagaatccagcatgaagataatggctaataaaaatgaggtacatactttataaaaccattaatcagatttgaatgaggaatgcttcccacatccttgaaagaaaaactgtggcttacgttttgaagtattctgagaatgaagtattaagatccaatttctataagcaagatcagacttgttaagtatgccgcaagtaagagctaattcattcattccatgtgtgccactaaataaagagattgagcaagtgcaaaaaaaaaaaaaaaaaaaaaaaaaaaaaa

SEQ ID NO: 288911 - DNA, 1000 bp, Homo Sapiens
ttgtggtctactgtcagtacaaagagcctctgttggaatgctacacaaaactgcgggagaggggaggggtcatcaacctcaggctgtctgaaacctggctcagaaattatcaggttttgccagatcgaagtcatcctaaactgctgatgagtggaggtgggggttatcttctctccggcttcaccgttgccatggacaaccttaaagcagacaccagcctcaaatctaatgcaagcactttagaatcacacgagactgaggagcctgcagctaaaaaacgaaaatgcccagagtctgactcttaacccttttgagaattgctctgaattttgttctcaggcattatacagttagtaattaaactttaaatgccattactacttgttttttcatatcccaagaataagaacatgtctatgtacccgtttctaggaaggaggagtatatgccttttgtctatttctgacacagatgcatttggtctgtcaaaactgcaaccatggggtatgtagtatgaccaactgcatttaacaaaactcctctaagtacttctaaatattctgtgcaaatatcttgagaacttcaacatcctaaaaatgtgtttctacaagactttatattttaagctaagtggaataatacaacgtaactaaaacatggcgggtaccgaaaggagggcaattcatggaagaaatttcctctgttcattccgttctcttcaacctaagcaatatggatgtgtgagtgtgtgatttattatggtaccaaaaatgtccaccttctttcctgcagcggaataagcttttttgaaatgctgaggttttattttaatagttgacaacctgggaaagttctgagtatttattttactgctcttttttgtgcatagaaaggtttagtagggtacttttttgcattaatttgccaatactcttattctttgttctaaataaagtgactagaatttttgtgtactattcaattaaaggaaacaaatgtc

SEQ ID NO: 288912 - DNA, 1000 bp, Homo Sapiens; identical to SEQ ID NO: 117294

SEQ ID NO: 288913 - DNA, 1000 bp, Homo Sapiens; identical to SEQ ID NO: 117295

SEQ ID NO: 288914 - DNA, 1000 bp, Homo Sapiens; identical to SEQ ID NO: 117296

SEQ ID NO: 288915 - DNA, 1000 bp, Homo Sapiens; identical to SEQ ID NO: 222542

SEQ ID NO: 288916 - DNA, 1000 bp, Homo Sapiens
aggcaaatatatcttcaaggaaagagaatcatttgatggccgaaatattttaaagttgtttgagaacttctactttggctccctaaagctgaattcaattcacatctctcagaggttcaccgtagacagctttggaaactacgcttcctgtggacaaattgacttctcctgaggtggatcttggaaagcactagaaactaaacatcttcaccaggtgctgaagaaaagtgtcttcgttttaattgccaagcagggatgtggacatttggatggtgactttcctgggtggttccccatagattcaccattgcctctaatggtgtctacacccgtcatactaccagctgagatggtggtgggcataaggagaatttgtgcctataacccttagtgtgttctggttttttttcttttaatttttaaattgtcgtaaaatactcataaaacatactgtcttcaccatttttaagtgcacagttcagtaacgttaactgttaatacattcataatgctgtgtggccgtcaccgccgtccatctccataggcttctcagcttgtaaaatggaaactgtacccattaaacagtaattcccactcctcccagcccccgcagccaccattctgctttctgtctctctggttttgactattctcagtatctcatataagtggaatcatacagtgacttgtctttttgtgactggcttatttcacttagcataatgtcctcaaggttcatccatgttgtgtcaggtgacaggatttccttcctgtattatacatataatggaatgttccgttacatgtgcgtaccacactctgttcctccatcagtgaacacttggcttgcttcctcttgactattgggagtagtgctaatacagacacgggggtgcaaatatctctttgagactctgcctttaattcctttaccacccagagttttatctttagcaaaataaccattaaagttgtttgccttttacgaaaaaaaaaaaaa

SEQ ID NO: 288917 - DNA, 1000 bp, Homo Sapiens
tgtgcagatgccgtcattggaaatgttcaagagaaagctatgaaacttcataatgcttctaattctgaaatggtattgtattcgtattcaattggttttgtatacattttactgggattgacatgcactagtggattaggccctgcagtaacattttgtgcaaagaatccagttcggacctatggttatgcgttccttttttccctcactggatattttggaatctcctttgttctggctttgattaaaatttttggtgcacttattgctgtaacagtgacaacaggaagaaaagcaatgaccattgtactttcgtttatattctttgctaaaccattcacgtttcagtatgtatggtctggtttgttagttgtccttggtatatttctcaatgtttacagcaaaaatatggataaaataagactaccatcactgtatgatttgataaacaaatcagtggaagcaagaaagtcaaggacgctggcacagactgtatagacagtgattgtcctatttaaaatagaattttaagggaacaatcatcaattaattaactttccaaagggactgataaaaaccaaaggatctggaggcattgctatcccatttgtgggcagatttcatatgaagttgttttgcggtgtcagccttttcttcagagcatttgtttgactgacttccaaagcaatcaagagagccacgtctagcagactttacaataaaatgtcaatatgaaggactgtaattcctagcagtttattgagaatttcactggaaatggaccatgtgttgcaagactaattggctataattatatcctatcaaagaaatcgatacgtaatagcagattgttttatattcattccattttgatggtgttatttaaattgattctctgttataagagtaaactgatgagttgaagtctggagagaataacattcattataaataaaattattctgtgatctttaaaaaaaaaaaaaaaaaaaaaaaaaaa

SEQ ID NO: 288918 - DNA, 1000 bp, Homo Sapiens
cgacgacggctggagggacgtttcagaggcgagtcctgggtggctcctcgccttgggggctcctggccctgaggctggcggtggccgcatgccggcgcgtgtctgtttctgtgcggcggctcagggtggcgcggctgctgctcactgtgctgctgggacccaagagtggggcgtcgcccctgctggccgccgcgtcccccgagattgacccacaataaagcacaggccttaccgcggcgtcaccctctcccactcctttgttctgggtcctttcgggagggctgatgggcagcacaggaggcccgtcctcggggggctgcgcacatcacgctccttgccgggcgtccggcacagctgcggtcaccaaagcaggtgctggccctcggacctgagagcccagccagggcccatgtggtctgcaaatgggagcggctgtttttgaacacggggtcattctgcagtcaggacgaaccggtccccgtcgcagacggagtgcacgtgccctgcgccacatcctcacgctcggtggagggacgcgtgcggcgggacggtgcctacgggtacttgcagctgtgtcccatgtggcatcccagagctgcgccctgctggtctctgtgagcgccacgctgctgtgctggaaatgccgctttaaaaagggataccgtgggactctgcccgtctctttcataacgcaatatttatttgtattgggtgatgattgattctttcgacctaacattttgggttttaaccaaataaccggtccaggagtgagcagctccgttctgtcagatgctactccaaatgttaccagaacgatgacaaaaggggagacgctctattttttcacagttaaatgacagttgtagattgatacgcagttgtgcatgggaaggggaaacgcacagctttatttactgtaaagtggaatttcaggaaggcttgtgtgaaccgttgcgcataaataaaccctttctaccggaaaaaaaaaaaaaaaaaa

SEQ ID NO: 288919 - DNA, 1000 bp, Homo Sapiens
tcccatttcagcctcccgagtagctgggattacaggatgacgcggcatggcaagaactgcaccgcaggggccgtctacacctaccacgagaagaagaaggacacagcggcctcgggctatgggacccagaacattcgactgagccgggatgccgtgaaggacttcgactgctgttgtctctccctgcagccttgccacgatcctgttgtcaccccagatggctacctgtatgagcgtgaggccatcctggagtacattctgcaccagaagaaggagattgcccggcagatgaaggcctacgagaagcagcggggcacccggcgcgaggagcagaaggagcttcagcgggcggcctcgcaggaccatgtgcggggcttcctggagaaggagtcggctatcgtgagccggcccctcaaccctttcacagccaaggccctctcgggcaccagcccagatgatgtccaacctgggcccagtgtgggtcctccaagtaaggacaaggacaaagtgctgcccagcttctggatcccgtcgctgacgcccgaagccaaggccaccaagctggagaagccgtcccgcacggtgacctgccccatgtcagggaagcccctgcgcatgtcggacctgacgcccgtgcacttcacaccgctagacagctccgtggaccgcgtggggctcatcacccgcagcgagcgctacgtgtgtgccgtgacccgcgacagcctgagcaacgccaccccctgcgctgtgctgcggccctctggggctgtggtcaccctcgaatgcgtggagaagctgattcggaaggacatggtggaccctgtgactggagacaaactcacagaccgcgacatcatcgtgctgcagcggggcggtaccggcttcgcgggctccggagtgaagctgcaagcggagaaatcacggccggtgatgcaggcctgagtgtgtgcgggagaccaaataaaccggcttgggtgcgcaaaaaaaaaaaaaaaaaaaa

SEQ ID NO: 288920 - DNA, 1000 bp, Homo Sapiens
gtttaccattattcctgtactggttggagctctgagtgagtcaaaagaacaggaattcggaaaactcttcagtaaatatctagcggatcctagtaatctctttgtggtttcttctgatttctgccattggggtcaaaggttccgttacagttactatgatgaatcccagggggagatttatagatccattgaacatctagataaaatgggtatgagtattatagaacaattagaccctgtatcttttagcaattacttgaagaaataccataatactatatgtggaagacatcccattggggtgttattaaatgctatcacagagctccagaagaatggaatgaatatgagtttttcgtttttgaattatgcccagtcgagccagtgtagaaactggcaagacagttcagtgagttatgcagctggagcactcacggtccactgaagctctgaatcctcagggatgccacctgcacattctcatactctgtccggggtcccagcctagcctttaccacgatactggtcctggtttggggggattctgaaacctcaaactaatagaactttcttctctttttttctagtaggtgtagtccttccttaatttcaactcattaaaaaatgctttatagtttagggcagtggaaggaaggctggcatcaaaatattttgatcaaaaaagatgacaatgtaaaggctcagttgtggcagacagttttttgaaagtaacttgtaaagcatttaccatatcctaaatttgcactctttgcagacttgtgcacatatattccgctttcagaatagttttgcaaattgtacacaaacaaacaaaaaggtggaagctttttaataaagaaattgcatttataaatgatctgtattagaatataataaatctccagttatagtcaattactacccatgttgtacaacagataccttctattttagttgctaataaagggctacacaactcaaaaaaaaaaaaaaaaaaaaa

SEQ ID NO: 288921 - DNA, 1000 bp, Homo Sapiens; identical to SEQ ID NO: 117298

SEQ ID NO: 288922 - DNA, 1000 bp, Homo Sapiens
agtgagcacatcacccctcaccaagcaactccctaccctgatcctgttccaaggtggcaaggaggcaatgcggcggccacagattgacaagaaaggacgggctgtctcatggaccttctctgaggagaatgtgatccgagaatttaacttaaatgagctataccagcgggccaagaaactatcaaaggctggagacaatatccctgaggagcagcctgtggcttcaacccccaccacagtgtcagatggggaaaacaagaaggataaataagatcctcactttggcagtgcttcctctcctgtcaattccaggctctttccataaccacaagcctgaggtgcagcttttatttatgttttccctttggctgtgactgggtggggcagcatgcagcttctgattttaaagaggcatctagggaattgtcaggcaccctacaggaaggcctgccatgcttgtggccaactgtttcactggagcaaagaaagagatctcataggacggagggggaaaatggttttccctccaagcttgggtcagtgtgttaactgcttatcagctattcagacatctccatggtttctccatgaaactctgtggtttcatcattccttcttagttgacctgcacagcttggttagacctagatttaaccctaaggtaagatgctggggtatagaacgctaagaattttcccccaaggactcttgcttcctcaagcccttctggcttcgtttatggtcttcattaaaagtataagcctaactttgtcgctagtcctaaggagaaacctttaaccacaaagtttttatcattgaagacaatattgaacaaccccctattttgtggggattgagaaggggtgaatagaggcttgagactttcctttgtgtggtaggacttggaggagaaatcccctggactttcactaaccctctgacatactccccacacccagttgatggctttccgtaataaaaagattgggatttccttttg

SEQ ID NO: 288923 - DNA, 1000 bp, Homo Sapiens
tcagatcccagtttttgtgatgattcggccacggggaggtgattttttgtattcagatcgtgaaattgaggtgatgaaggctgacattcgtcttgccaagccttatggtgctgatggtttggtttttggggcattgactgaagatggacacattgacaaagagctgtgtatgtcccttatggctatttgccgccctctgccagtcactttccaccgagcctttgacatggttcatgatccaatggcagctctggagaccctcttaaccttgggatttgaacgcgtgttgaccagtggatgtgacagttcagcattagaagggctacccctaataaatcgactcattgagcaggcaaaaggcaggattgtggtaatgccaggaggtggtataacagacagaaatctacaaaggatccttgagggttcaggtgctacagaattccactgttctgctcggtctactagagactcgggaatgaagtttcgaaattcatctgttgccatgggagcctcactttcttgctcagaatattccctaaaggtaacagatgtgaccaaagtaaggactttgaatgctatcgcaaagaacatcctggtgtagccagacctctctgagagacatggatatcacaggatgaaggtagaactataatctgcaattctctatgacacagctttaaccttcttctctggccaggacagtcgcaatctttgttttaagtttcacatggccatggagaatgtgcccaagaagaaaaagaatttgaaacagagatacagtcacttcctttgcttagtcttaccagtgattgtcatcatggttaaagctggtctgtgcttcttccatagacagaagcttagtctgttttcagtggaattaattgatgaactgggaaaattttaactgcatggtatgaattcagagtgtgacttaagggtcaattcaaagcagtattttgacttttcatttgtaaaataaaaatttccactattaaaaaaa

SEQ ID NO: 288924 - DNA, 1000 bp, Homo Sapiens; identical to SEQ ID NO: 117299

SEQ ID NO: 288925 - DNA, 1000 bp, Homo Sapiens; identical to SEQ ID NO: 117301

SEQ ID NO: 288926 - DNA, 765 bp, Homo Sapiens
ccacgcgtccgggacccggcccgcgccttctgcccctgctgccggccgcgccatgcggtgagcgccccaggccgccagagcccacccgacccggcccgacgcccggacctgccgcccagacccgccaccgcacccggaccccgacgctccgaacccgggcgcagccgcagctcaagatggcccgaggcagcgccctccttctcgcctccctcctcctcgccgcggccctttctgcctctgcggggctctggtcgccggccaaggaaaaacgaggctggaccctgaacagcgcgggctacctgctgggcccacatgccgttggcaaccacaggtcattcagcgacaagaatggcctcaccagcaagcgggagctgcggcccgaagatgacatgaaaccaggaagctttgacaggtccatacctgaaaacaatatcatgcgcacaatcattgagtttctgtctttcttgcatctcaaagaggccggtgccctcgaccgcctcctggatctccccgccgcagcctcctcagaagacatcgagcggtcctgagagcctcctgggcatgtttgtctgtgtgctgtaacctgaagtcaaaccttaagataatggataatcttcggccaatttatgcagagtcagccattcctgttctctttgccttgatgttgtgttgttatcatttaagattttttttttttggtaattattttgagtggcaaaataaagaatagcaattaaaaaaaaaaaaacaaaaaaaaaaaaaaaa

SEQ ID NO: 288927 - DNA, 1000 bp, Homo Sapiens; identical to SEQ ID NO: 222546

SEQ ID NO: 288928 - DNA, 1000 bp, Homo Sapiens
cacatttctaaatttaacagagatgctgtagcttaaaacatgttttgataagtaattacactggacctaggcaaaaccactgaagaacaagtgttcctttttaccacatacatattatgttttgatcactgctgcttgagccccgctattggtataattcagatcatattagcttgttgctgaggatgtcacatataagacaggatcaaacctgaaagacactaatggttcatcctctataaggccaacaaagaaaacaaattaatgtgatgtaacttgcatttatgtgcactctgcataggtttcccaataatactgtaatgttgctgaacacctttccctgttttccatttatacacatattaaagtcatattgggaaagatggcaaagcttttgagaatataaacacacctgttttgtttttcttaagttcaacatacttttgtagaatttgtaaaataaatgttcgtatcataattgagaatttatagccaaggatcctcaaaacagaagtttcatcttaggatagtgtttgatatatctaagaaagtccagtaacagagaagaaatgtctcaaatgtctcgtatcagttttagtgtttttcagtattagggaaaggtaatataaaaacaggtaaaatgtataaaaatagacctgatcaacatcataggagataaatattcattatatagcataggatattattacttgaatgttctcagggaggcagcaagtcagaaggcctaggttctagtcctagctccatcatttaccaactgtgtgaccttacttcacctcttagccttgttctcctcactagcagtaggaaagtaacacctaccctgcctacctcacagggctgttgtgagggttcaattggtatatgtgaaaattctttcagaattgtaaaatgctatatgactgtaaggaattattgcatttgttccaaggttaataaaaatttgagcttaaaaaaaaaaaaaaaaaaaaaaaaaaaa

SEQ ID NO: 288929 - DNA, 1000 bp, Homo Sapiens
cccaccctgcgacggtgggttctgcatcagcaaacgctgaggagtgggcagattttctttgtcttttgcttgcattttctagatccacacctggatactgcccatgttgacgagacagcagcagggggagagggagggaaggaaggtgcggctgcaagaaggaaggcacgggacaggcatgtgacactaggccacaagcgataagcacaggcacctgacttttaagtttttgtttgtttgttgtttcccaaagtgctgataacaataacaacaacaataggattccaaccaggagcctcaagtgacagccaggaagagacctgaaggttggggccaccacaatgccaaatcgtttctaaaggaagctgaaaaatgggactgtcttttgcccacttcgttgtgttaaaaggggacatttgtccaaactccccaaccgagttctagaagctcctgacaaggaggcagcatccagccttgaccaggcctcccagttccctggaaccgtatcaggcattcccctgcctctcacaaatgtttcagggaggccagttctgcagggtgtcagctccaggacccacagggccagaaccagctgggagaattggttatttgagatgtggtactgcttcctcacaagtctcccacaggccatgtaaagggtatttttttgtggcttgctgtgttgctgagatcatcgtatgcaacagctgggtaataagactagcatagctcaaactatcctgccaaacgctctcatctgatttttcctcccttctcccccaacctccaatcaccctgagtcacctgtaaattcatttgtcattcaaagcggaataacaagttgtccctagcaaaaccgctgagcgctttataattttgtggtgtatttttgtcagtaggtagcagaggcggaagtattttttggtgtaattcttgaaattttctgacaggaaacaaataaagatagatgtgtctgagaaaaaaaaaaaaaaaaaaaaaa

SEQ ID NO: 288930 - DNA, 1000 bp, Homo Sapiens
ccatctgctcgctgctctgcgaccccaaccccgatgaccccctggtgccagagatagcacacacctacaaggccgacagagagaagtacaacagactagcaagagagtggacacaaaaatatgctatgtaagtgccttggaggttttacatgagacactgtccaagagaagctggcagagaggtcttcccttaaaactttgggctgttggctgagccattcaaagagcatcatctgttcttcaaacaaatgttggtcacccactctctccagctgcagcatgttggtgccattttcagcaattacggctttgacagtgccacctctttgatgccaaatcagcaaccattgttgttatgatctgcagtcttcctggtgacactggaatctctctctctgccgcctcagtttgtctgctggtctcttggggggccaggccctgcacgtctctcctacccggcctcaaatggtgcttctgcccatgatggtaccacaccagggcctcagcctggcccctcaccacataccctttgccttttagaactcagtgccatcctgggtgcccagggcagagcaggctttgttcgcacctcatctgctgcagaaccacatcctgaggagtctcagcttatcctggagggaattgggaacagtgtcactgggaagtgaaggcctagccctgtggcttccaccagtctcctcctgcagtgccacgtggtggcatttctcgcctcacaccaagaagcagcaagtggaaaatttcaggatacaaagcacataacaccccataagagatgattatgtttttagaagcaagagcaaaattatgaaacctctagagatttgggtcatgttactccatttgatgaagattctcactaccgcccgctcctcccataggagcctacactaagtccaagtgtgagccattcacagactagaacacaaggagggagagagactcttaaacgtaaataaaaatgcaattcactcacaactct

SEQ ID NO: 288931 - DNA, 1000 bp, Homo Sapiens
gttcggaagcgtagagacgtggccttggcaggtcctaagcaaaggggacaaggaagaagttgcctatgaagaaagggcctgtgaaggcggcaaatttgccacagtagaagtgacagataagcctgtggatgaggctctacgggaagcaatgcccaaggtcgcaaagtatgcggggggcaccaatgacaagggaattgggatggggatgacagtccctatttcctttgctgtgttccccaatgaagatggctctctgcagaagaaattaaaagtctggttccggattccaaaccaatttcaaagcgacccaccagctcccagtgacaaaagcgttaagattgaggaacgggaaggcatcactgtctattccatgcagtttggtggttatgccaaggaagcagactacgtagcacaagccacccgtctgcgtgctgccctggagggcacagccacctaccggggggacatctacttctgcacgggttatgaccctcccatgaagccctacggacggcgcaatgagatctggctgttgaagacatgagtgacccactgaaccaagaacttactggaagtgtgcctctgtgtctccttcctcgggggtaaggaggggacagtgcttcccaagttccagctgcaagtccaacttaaccaactttccttcaaagtcagttactgccaattttctgaaaaaagcatgttccatatactaagtctcttttctcacagtaggaaataatacagccaagatatgcagcatccttctcattgatgtagaaaattctgcgatagaccagaaaaatcctggcagcttttctccaggcatctgggtcactaaaaactgattttctaaaattattggatttgtattttgttattaagggggaaaatgtgatttgtgcctgatctttcatctgtgattcttataagagctttgtcttcagaaaaactaaaaataaaaggcattgacttaaacagctgagacaaaaaaaaaaaaaaa

SEQ ID NO: 288932 - DNA, 1000 bp, Homo Sapiens; identical to SEQ ID NO: 222548

SEQ ID NO: 288933 - DNA, 967 bp, Homo Sapiens
ggcagaggcatcatggagggtccccggggatggctggtgctctgtgtgctggccatatcgctggcctctatggtgaccgaggacttgtgccgagcaccagacgggaagaaaggggaggcaggaagacctggcagacgggggcggccaggcctcaagggggagcaaggggagccgggggcccctggcatccggacaggcatccaaggccttaaaggagaccagggggaacctgggccctctggaaaccccggcaaggtgggctacccagggcccagcggccccctcggggcccgtggcatcccgggaattaaaggcaccaagggcagcccaggaaacatcaaggaccagccgaggccagccttctccgccattcggcggaaccccccaatggggggcaacgtggtcatcttcgacacggtcatcaccaaccaggaagaaccgtaccagaaccactccggccgattcgtctgcactgtacccggctactactacttcaccttccaggtgctgtcccagtgggaaatctgcctgtccatcgtctcctcctcaaggggccaggtccgacgctccctgggcttctgtgacaccaccaacaaggggctcttccaggtggtgtcagggggcatggtgcttcagctgcagcagggtgaccaggtctgggttgaaaaagaccccaaaaagggtcacatttaccagggctctgaggccgacagcgtcttcagcggcttcctcatcttcccatctgcctgagccagggaaggaccccctcccccacccacctctctggcttccatgctccgcctgtaaaatgggggcgctattgcttcagctgctgaagggagggggctggctctgagagccccaggactggctgccccgtgacacatgctctaagaagctcgtttcttagacctcttcctggaataaacatctgtgtctgtgtctgctgaaaaaaaaaaaaaaaaaa

SEQ ID NO: 288934 - DNA, 1000 bp, Homo Sapiens; identical to SEQ ID NO: 117307

SEQ ID NO: 288935 - DNA, 1000 bp, Homo Sapiens
ctacaggttctgtctgcttcccacttaacagacccattttggctttctatcactcaaagaaccaaggtgggaagctggcagtgcttggttcatgtcacatgttcagtgatcaatatttggacaaagaagaaaacagcaaaatcatggatgttgttttccagtggctcacgacaggagacatccacctaaaccagattgatgctgaggacccagagatttctgactacatgatgctgccctacacagccaccctatcaaagcggaatcgagagtgtctccaggagagtgatgagatcccaagggactttaccaccctcttcgacctgtccatcttccagctggataccacctccttccacagcgtcatcgaggctcacgagcagctaaatgtgaaacatgaaccactccagctcatccagcctcagtttgagacgccgctgccaacccttcagcctgcggtttttcctcccagtttccgggagttaccacctcctcctctggagctatttgatttagatgaaacgttctcctctgagaaggcacggctggctcagattaccaataagtgtactgaagaagacctggaattttatgtcaggaagtgtggtgatattcttggagtaaccagtaaactaccaaaggaccaacaggatgccaaacatatccttgagcacgtcttcttccaagtggtggagttcaagaaattgaaccaggaacatgacatcgatacaagtgaaacagcattccagaacaatttctgaagaccatgcctcttgaagctttttctgcctcctgattctctctttgtaaactattttcaaattgtttttcaactccttatcaaaattgtttatacactctttcctccatgagctctggaaggtatatgcatcttctgtaatactcagataggtataagatttttcacaaaatccttatgtaagatacattccatttttaaaaattaaatgtatggttgcatctgtctttttatacccta

SEQ ID NO: 288936 - DNA, 1000 bp, Homo Sapiens
ggattggacaaaatgatcttgcttgggcacaacctaggtggattcttggctgctgcttactcgctgaagtacccatcaagggttaatcatctcattttagtggagccttggggtttccctgaacgaccagaccttgctgatcaagacagaccaattccagtttggatcagagccttgggagcagcattgactccctttaaccctttagctggcctaaggattgcaggaccctttggtttaagtctagtgcagcgtttaaggcctgatttcaaacgaaagtattcttcaatgttcgaagacgatactgtgacagaatacatctaccactgtaatgtgcagactccaagtggtgagacagctttcaagaatatgactattccttatggatgggcaaaaaggccaatgctccagcgaattggtaaaatgcaccctgacattccagtttcagtgatctttggcgcccgatcctgcatagatggcaattctggcaccagcatccagtccttacgaccacattcatatgtgaagacaatagctattcttggggcaggacattatgtatatgcagatcaaccagaagaattcaaccagaaagtaaaggagatctgcgacactgtggactgaacacactgaagctctgatgggaaaacctggtgactgatatagttgttcagcaataattcatagtctgtgatgaagagtagtgaatacaacacacaaccaggcagccttcttgactatactttgcacatgttttctttaggaattcactcacacatttaaaccagttagtgccttctagaagaatggctttcctttctcctacacaaaattgaaatatacaagtctctaaatataatacctttaaataaaaggttatttgtccctctgaaaaaaaaaaaaaaaaaaaaaaaaaaaaaaaaaaaaaaaaaaaaaaaaaaaaaaaaaaaaaaaaaaaaaaaaaaaaaaaaaaaaaaaaaaaaaaaaaaaaaaaaaaaaa

SEQ ID NO: 288937 - DNA, 1000 bp, Homo Sapiens; identical to SEQ ID NO: 222553

SEQ ID NO: 288938 - DNA, 1000 bp, Homo Sapiens; identical to SEQ ID NO: 117309

SEQ ID NO: 288939 - DNA, 1000 bp, Homo Sapiens; identical to SEQ ID NO: 222555

SEQ ID NO: 288940 - DNA, 1000 bp, Homo Sapiens
agatgtacagtatctaacttgatctgaactgaacctgttttccttgatgatgcctaaaactacatccatagtttctggtgaacctgtaatacagttctgaaagtacagttttatataataagatgctgatctctttattctttcaagtaagagtgctagtgaacaaattgtgttacttgccttgggattttttgaacgtttgtaaaatgctgtcttcctagtccaaacagctgcagctttgggcatttttctttttaattattcttcctctgactttgtatcccttaatacctacactctccaattgtaagagaaagggggcagggaagcaatatagcttccattctaaggctgtattcccgttatgaattactagctgattacagttcagagcattgatcctggaatgtgtgctggagaaatttaaaatactggggttttttgtttaatggtgcctatttagagttggaagttgaacagctgttgcattacatacttttgcttttttattgaaattttgaaatcaaacgtcttgatttttctgttctgttgaattgctatgttcaggatgttctagggggtgggggcagggactcttttcgtaataagcacttgttttattttgtgtgtgtggagtataaaggctacacccttattgtaaaaaaataataataataaaatgaaagaaacaatcaccaccaccattattaaactgtaacttgtctagtaaattgtcactagaactatttgctgtgggcatttcctctattctgttacgtcattaacagtgccttactgtgcaaggcaccaaaggacataaatacgtacttgcaaagattccagatgagctgttcatgtgggccccttgctgactatattccagccacttcagggttgtttgtaatgaccgttatagagaagggctcgacctgcagaagaaactggggtgtttttattctcattcaacaaacccaaataaaaacagtatatgtaaccaaaa

SEQ ID NO: 288941 - DNA, 1000 bp, Homo Sapiens
tcttaatgccgacgtcgctgaacttctggtggttgaaaaggacactcgatttattcctggattacagatgctttctgatgcagcacctgggaaactgagaattgttcatggagatgtcttgacatttaaggtagaaaaggctttttcagaaagtcttaaaagaccctgggaagatgatcctccaaatgtacatattattggaaatctgccttttagtgtttcaactccactgattatcaagtggcttgaaaatatttcctgtagagatggaccttttgtttatggcagaactcagatgactttgacttttcaaaaggaagtggcagagagacttgcagccaatacaggaagcaaacagcgtagtcgcctctctgttatggctcagtacctctgcaatgttcgacacatctttacaattccaggacaagcttttgtccccaaaccagaggtggacgtgggcgtggtgcacttcactcccttgatacagcccaagatagagcagccattcaagctggtggaaaaagtggttcagaatgtatttcagttccgaaggaaatactgccatcgagggctcagaatgttattccctgaagcgcagcgcttggaaagcacgggcaggctgttagagttggcagacatagaccctactcttcggccccgccagctctccatctcacactttaagagcctctgtgatgtatacagaaaaatgtgtgatgaagacccacaactctttgcatataatttcagagaagaactcaagcgaagaaaaagcaaaaatgaagaaaaagaagaggatgacgcagagaattacagactctagctgctgcctgggggcgagcagcctaccagatgtcgatttgcctacgtggagcttcttatataggtactcttttgtctttacagaatgacgatacaaatgccaatgaccagatgtgacttattttccttttactatacagcttggcagagaaaataaatatcatcaaataagaaaaaa
